United States Patent Application Publication US 2024/0327476 A1 - sequence listing, part 3

SEQ ID NO: 2156 - DNA, 6651 bp, Homo sapiens
  source 1..6651: mol_type = unassigned DNA
agagcgcccaggagcgctaccggctgagggtggggaagcgcagggccaagcgcgcgaagcaggttgtgggggaccgggtcgagtggaagtacccgccggagaggaaggccggctggctgtggcgcccagagacggtggagtccgaggaggaggagaaggaggcctgcagaaggaagagcaggcccttagaagtccagcagcagcaactccggcggcccacagtcagattcagcacctgcctcagatctccacgtctgtctcagctgcccctctcctgctgcctctcaggcaccagtgccattaacgagctggcgaagatgggcgacccggatctcctggaagtgttggcggaggaaggggaaaaagtcaataagcatatagactactctttccaaatgagtgagcagagcctgagcagcagagagaccagctttctcatcaatgaagaaacaatgcctgcaaagcgattcaatttgttcctgaggcggcggcttatgtttcaaaaaaatcagcaaagcaaagattctatcttcttccgagatgggattaggcaaattgattttgtgctttcctacgttgatgatgtaaagaaagacgcagagttaaaggcggaaagaagaaaagagtttgaaactaatctcagaaaaacaggtcttgagttggaaatagaagacaaaagggactcggaagatggaagaacttattttgtcaagatccatgccccttgggaggtattagttacctatgctgaagtcttgggaatcaaaatgcctattaaggagagtgatattccccgccctaagcacactcctataagctatgtgcttggacctgtaagactcccactgagtgtgaagtatccccatcctgaatattttactgcacaattcagcagacatcggcaggagctcttcctcatcgaagatcaggcaaccttctttccatcctcatcaagaaacagaattgtgtactatattctctcaagatgtccttttggcatagaagatgggaagaaaaggtttgggattgaaagactgctaaactctaacacttactcatctgcctatccactccatgatggccaatattggaagccatcagaacctcccaatcctaccaatgaaagatacacacttcaccagaattgggctcgattttcctatttctacaaggagcagcctttagacttgattaagaattattatggagaaaaaattggtatctattttgtctttcttggattttacacagaaatgctattctttgcagctgtagttggcttagcttgttttatttatggcttattatcaatggaacataacacaagcagcactgaaatctgtgaccctgagattggtggtcagatgatcatgtgcccactctgtgatcaagtgtgtgattattggagactaaatagtacgtgtttggcttcaaagttctcccatttgtttgataatgagtcaacagtgttctttgcaatattcatgggaatttgggtcaccttatttttggagttttggaaacaacgacaagccagactggaatatgaatgggacctggtggactttgaagaggaacagcagcagcttcagctgagaccagaatttgaagctatgtgtaaacacaggaaattgaatgcagtgactaaggagatggaaccttacatgcctctatacacgcgtattccatggtactttctttcaggagccacagtgacattatggatgtctcttgtcgtcaccagtatggtagctgtaattgtgtaccgcctgtcagtctttgctacatttgctagtttcatggaaagtgatgcatccttaaagcaggtcaaaagcttccttactcctcagataaccacatcactcacaggatcatgcttgaactttattgtcatcttgatcttgaatttcttttatgaaaagatatctgcctggatcacaaaaatggaaattcctcgaacataccaggagtatgagagcagtcttaccttgaaaatgttcctgtttcagtttgtaaatttttactcatcctgcttctacgtagctttctttaaagggaagttcgtaggctatcctggaaaatacacatatttatttaatgagtggagaagtgaagagtgtgatcctggaggctgtcttatagaattgacaacccaattgaccattataatgaccgggaaacagatttttggaaacattaaagaagccatttatcccttggctttgaattggtggagacgccgaaaagctcggacaaactctgagaagctgtatagtcgatgggagcaggatcatgaccttgaaagttttggaccccttgggcttttctatgagtacttagaaacagttactcaatttggatttgttacactatttgtggcctcttttcctttggctcctcttcttgctctcataaataatattgtagagattcgagtggatgcctggaaacttaccactcaatacaggagaactgtagcttctaaagctcatagcataggtgtttggcaagacattctttatggaatggctgtcctttctgttgcaactaatgcctttattgttgcatttacgtcagacatcattccccgtctagtttactactatgcttactcaacaaatgccacacagcctatgacaggatatgtgaataatagcctgtcagtattcctgatagctgattttccaaaccacactgcaccttcggaaaaacgagacttcatcacttgcaggtacagagattacagatatcctcctgatgacgagaataaatattttcataatatgcaattctggcatgtccttgctgccaagatgaccttcatcattgttatggaacatgttgtgtttttagttaaatttttgctggcctggatgatacctgatgttccaaaagatgttgtggagagaatcaagagagaaaagttaatgactatcaagattctccatgattttgagctcaacaaattaaaagagaacttgggaattaattctaatgaatttgccaagcatgtcatgattgaggaaaacaaagcacagctggctaaatcaacactctaatcagtatagtgaggaagcagcaggtgatctgccttacttcactttatcctctggttttagggccagacgccagaagccatgtgtcaattttaccctttcttttttttttttttctttttttttttaaactcaaagtttttatacacttttatagaggccaactttgtgatgttggaaatgtactacttctctgcttcattgactgggccctctccagatgttgttttctgaggtgctgtaaatgactgttgaaagtgcaggtagaatcagaatactgggaaattatggagtcttgcagtttagtaagaaacactggccttgggctgtcccatcactttccagtgcatctatttatttttgtggtcttctcttgggttatttgatacctccttccccattaagaaaaatgttggggcaaaaagaaatggatcaaagagactgactgagccctatatatcctatcattttaaaatatgcaaatgaattgccaagatcagatgacataagaaaactcacacattaaggtgttaatgtatcatagcagaggtttattcctaacacattcaactaccatcagaatcccagatagttcttcctggtaaaggcagaattccttttctcgagactgaaattttgggtttcaacataaaacaacttggttcttagagataataatttggttataatagtttcaagactgatcttatctggaaagcaacattatgaagctgttagattgcttcaggttctcaagcaaagacacaatacagaagtaaatgtgttttcttagtagttaatggatgcaggacaatgtatattgattaatttgttgattttaatttagaaaattgttaaattatttcttaaaaatcacttttcttctggaatgccaatttcacatcatgaagcctttttgtataagttagatacgagttgtttatgataaacatttctttgctttaaaataattgcaaatattttaataagtttacaaccttttctattgatgtatcatcttatacaatgctcagtgccttgttccaatacctctgacacacaagaagtcatgttgttagctagtgatttgatgtgatgtaacatcttaaatgtaagcttgtcttaatgaaattgtcagtgtaataacaactacagtcttgaaaaccaaaagtgaatcaaccaactaagaatgagttcatggacttaataatctaagggggaaaaaatgtttgttgaattattcctctcaaatttaggcttgtgttacatgcacaaaaatccttgttctgttttcacttaaaaaaactaaatatgtataactttgtgtatacacacacacacatctatatatataattattagcactagagggatatagtccagttatgtagtatttaaatctccagtttcaaattataattcacctccaaaagaatagttttttaatcacacacataagaaattttatcacaatatttaaaactaatatttcattatctaatgctaataaattattgtggtactgccagtattaaatatatggcagatggtattaactactgatcaatagtaagcatacagaactggggattatggattttataaactatgagacagtcaccccagtttggactgggactaatccccagtactgatttgtcatccactgagtagactttatgaatattttgggtaatttgaaatgatctcattattgaaagatgatttcatatgtagagaagataatatttctttcttgaaaaaacaagtcaggcttaccatgatgtgtgcaaccaatgtaggatctttggcttgtcaaatcagattctccattgctatagtgtacagtgcacacagctcatattgcttccttcctgggtgctgataaaaataagaaagagcatggaaattggtttcttgaatataagctttaatttttaaggcttaaaagtattcatagaggtagactgtatgataaataaaaacaaatttaattcacaaagttatctgtacactgcagttttaaaatataccaactaaattattgggtttctggaagtgaatggagaaaacagcaagggaagaaatcgtttttaagataagtaaataattcccatggattgataaatattttccttttaaaatgttatggactgatattttttattcacctttaaatttcttatcaagaagtttatctttgtttttcagatttaaaaatgaaatacaggtattcgtcactttcctgaaaccatgctaaccaaaatcagtagccaaaccaattcagatagatgtgtctcatctaattaaacccattggtttttatgggagggctgcattaagagcacccaaccaccacatgtaagttgataattaccagcatggcaggtgattttatctgctgaccaagcgcatagttttgttttgttttcagaatgttctagggaacatttgagattttatgtgaaataaaattttaagtgccaaagccaaaaaaatacttaactcttttcaaaggccctctttcatccttgccttcgtcaactttcctttgcacacaggaagcaaaatctacttcaagacatttattttagaggaatccattaagaaaggattgttttacttaaatgaaatgctgtcttatttttgctgtgtcttttgacacctcttagctttaacattcttcttttaaccaagccattatgcaaagttatcaaagaagaggagaaggaaaggaggacagatgaaagtgacgggaaatgagaaagaagaggagtgaggaaacagttatttccttatgaatcctgtgtgtttctttggaagaaagagctgttccgaggaagtttggtccagctgtggttgataagaggtatatctcttaaaaaagacacctaatgaaagtgagagaaaagctaaagaaaatttcaatgtgaccactattatgtgtcaaaataaaacttagattccaaagtggttttgtagtgttgggtgctatgagtaggtatggatctctgttgattgactccagttgaaggtgagaaatctgtaccaatcattcaaaaagggaatctattgttttgaaagaaactctctcatatttcctttaaattgttaatagttgttatgcaactaaagaatgttatgaagaaaaatagcattgcaaaaagtaccattggccagccttacaagtcagccacaatgagtcggtataactactgtgttattctttttctagacaaattttgactcttctacttttatgtgtaataattccagtattctatttatttcagcattatgtgaaaaatgataagaatgttaaaaagaaaataatagtgtggtttaattggtatgagatacctgcttcctcctcctcaaaggtttgactgggtgtatctctcctatgtgtgacattatgtctcctggtgttaacacaggaaatgagtgctcctttttaaaatttctttcttccaagtttttttttccaggaagagaaatatgcagttatgcaggaaaagctctcttaaataatgtgtacataaatctcaagagaatcaaattcacagagtgaataaagtaataatattaaactaca

SEQ ID NO: 2157 - DNA, 5975 bp, Homo sapiens
  source 1..5975: mol_type = unassigned DNA
gagaggcgtcctccggctctgggctccggtcggtgggtgcctcggctcggctttccccggcgctggctgggctcagcggcccctgagcccaagcgacacacgccccgcggtccccgatccggcccctgggagagccgcgccgttctggaacccgggagcccccaacttcgcgccaagttcggagccgccttctgagggagacatgaaaaagatgagcaggaatgttttgctacaaatggaggaggaggaggacgacgacgatggggatatcgtgttggaaaaccttggacagacaattgtccccgatttgggatcactggaaagtcagcatgattttcgaaccccggagtttgaagaatttaatggaaaacctgactccctcttttttaatgatggccagcgaagaattgactttgttctagtatatgaggatgaaagcagaaaagagaccaataaaaagggtacaaatgaaaaacaaaggaggaaaagacaagcatacgaatctaaccttatctgtcatggcctgcagttagaagcaacaagatcagtattggatgacaagcttgtatttgtaaaagtacacgcaccatgggaggtgttatgtacgtatgctgagataatgcacatcaaattgcctctgaaacccaatgatctgaaaaaccggtcctcagcctttggtacactcaactggtttaccaaagtcctcagtgtagacgaaagcatcatcaagccagagcaagagtttttcactgccccatttgagaagaaccggatgaatgatttttacatagttgatagagatgctttcttcaatccagccaccagaagccgcattgtttacttcatcctctctcgggtcaagtatcaagtgataaacaatgttagcaagtttgggatcaacagacttgtaaactctgggatctacaaggcagctttcccactccatgattgcaaattccgccgtcagtcagaggatcccagctgccctaatgaacggtaccttctgtacagagaatgggctcatcctcgaagcatatacaaaaagcagcccttggatcttatcaggaaatactatggagagaagattggaatctactttgcttggctgggctattacactcagatgcttctcctggccgcagttgtaggagtggcttgctttctctatggatatcttaatcaagataactgtacatggagcaaagaagtttgtcatcctgatattggtggcaagatcataatgtgtcctcagtgtgataggctttgtccattctggaaactcaatattacttgcgagtcctcaaagaaattgtgcatcttcgacagttttggaaccctggtctttgcagtatttatgggagtatgggttaccttgtttttggagttttggaagcgacgccaggcagaacttgagtatgaatgggatactgttgagttacagcaggaagaacaagcccgaccagaatacgaagcacgatgtactcacgtagtgataaatgagattactcaggaagaagaacgcattccctttactgcctggggaaaatgtatacggataaccctctgtgccagtgctgtctttttctggatcctattgatcatcgcttcagttattgggatcattgtctataggctctcggtgttcattgtattttctgcaaaacttcccaagaacattaatggaacagacccaatccagaaatacctgactccacagacagccacgtccatcacggcctccatcatcagctttataattatcatgattctgaacaccatatatgaaaaagtggcaattatgattactaacttcgaactcccaaggacccagactgattatgagaacagcctcaccatgaagatgttcttattccagtttgtcaactactactcttcatgcttctacatagcattctttaagggcaaatttgtaggctatccaggagacccagtttattggttgggaaaatacagaaatgaagagtgtgacccaggtggctgtcttcttgaactgacaactcagctgacaataatcatgggaggaaaagcaatctggaataacatacaagaagtattattgccctggatcatgaatctaattgggcgatttcacagagtttctggatcagaaaagataaccccacgatgggaacaggactaccatctgcagcctatgggcaaactgggattattttatgaatatcttgaaatgattattcagtttgggttcgtcaccttatttgtggcctcttttccactggcccctctgttggctctcgtgaacaatatattggaaataagagtggacgcatggaaactgaccacccagtttagacgcctggtaccagagaaagcccaagacattggagcatggcagcccatcatgcaaggaatagcaattctggctgtggtgaccaatgccatgatcatagctttcacgtcggacatgatcccccgcctagtgtactactggtccttctccgtccctccctacggggaccacacttcctacaccatggaagggtacatcaacaacactctctccatcttcaaagtcgcagacttcaaaaacaaaagcaagggaaacccgtactctgacctgggtaaccataccacatgcaggtatcgtgatttccgatacccacctggacacccccaggagtataaacacaacatctactattggcatgtgattgcagccaagctggcttttatcattgtcatggagcacgtcatctactctgtgaaatttttcatttcatatgcaattcccgatgtatcaaaacgcacaaagagcaagatccagagagaaaaatacctaacccaaaagcttcttcatgagaatcacctcaaagatatgacgaaaaatatgggggtgatagctgagcggatgatagaagcagtagataacaatttacggccaaaatcagaataagagctttatgttctgagaagcactttaaggaatttagctttgtcaaaatatattaggaatcactaatgagaatgtgtaagttaaatcactttggcaaatatgagtctcaactattgccatttcctcatgtattatttttcagtttcagctagcgatgcagaaactggaaaatgtaaaacttagatcatgaagggcataaaacttatcacccggaaaacctcaatgttacctttttctgataaattggaattttacagaaaaagtccctcagtgtgcttaaaaaccaccccttctaaagtagaatggattcttttttttctgtttgattattttcatttctgtctattctcaggcgcatgatctcctttatttttaagccatgtttcatttcttcacttggctagatctgttccagggtcatcttttccttacagtaccatcattatagatttaatttaatagctttcatgtgattaaaaatagctaactagactcaaggattcacaatatttaggtgtattttcaatacctccagaaaggaaacctcagttaatcagaggaaatagtttcagtcttcatttgagcatgtctttccatctcaaaaaaatactcttagtaggttggagtgaagatagcaaggttttgaagcatatttgtcctaatccacagtgacactttttatcttccaggagcactcctaggaggttccgtgcctaatcaatgttgactgctttgcagatctcaagggaataaaatgacaaaagcagggaaagttacagattcaaacagcattttaactcatgttgatctggataattaatcttttctaaagatgtgtagtttcttggaaaacagtgatatcacatgattaaaattacatttttatcaacataattgtctggaaaagataagcccctcaattttctaccagttgacttttattcattagatacagaaggtgcagtattacacatcaccagctgcctttgtgaatggctcactacacagccattggggtacaactgtgtgcatgggcagaaacagcaagtgccctcattgtggtcattgggtggggagtgccttttgtcaaggagtctgcaggaattggcttatttctgtatgccaaagtgatcaacacaccaaagtctctgccataaagaatgtggcttccttgcatcctccatcctgttactctgggcccagtaatttgatgtaactgtctgattgtactagagacaggagtatacccagcttattcataatcaagtaaagagactcagattagatttgattttttagcctcctctagagccaatcaggcagttaagagtaataaaggaaaagggtttggtcacaaaccctaccattatctggagattacttcctgctgcactcctgtcttgccatgcacgtcttgccccctcacttttgctcagcctagcagtctacttcactttattgccttgtaagtgtcaggcctcctgggcgctctggaaaagacagggagccaggccctctcacccctactggtaacaggtcattgctgggtgcacaagagggaggtgatttgcatcatggtcatgctgcatgggcttcactgggatgctgttaaacaccagaggagccaacctatcagaatcccagcagcaaaggaaaactcagattttagaggctttttacaataaagtagcgtaactctaggtcatgattgatttcaaatgcctgccatgaatgatttgtaagtaattatgtaggatccatcaaagcagtattgtaggcttttgaattgtcccagtggatccgggaccccatttcactgtctctcttgatcgtgttaatgatgcaatcagagttcaagacaggccccatgaagtctgactgcactgggatggagaaatgaatttcttcccactgaaggaaactctttctcattcgcagccaagacgggagtgccactgttcctctcttcactcctgagatactgcttctggaagcgggtgtcacttcctctctagtacctcttctcttctctgaagtgtgtgactatctcctagtgtttaaatttggcagttactcgccatgtatgtcagcatagaaaaggaaatgtttttaccttatctcctgtatgtatgatagaacttaaaagaaatgtgcatttgttttcatagccccagcagagaaaatcctcttcatagattaaatgtgctgctgtggacaggaggggaaaaaaaaccctctacatattgaaaggcaccaaatgtaatatctgacactgttaagatgcccaaaagagcaaagttgtagtggagatgcagggtcatttccccatgccatccacagtgtttgttagtgagtccacggctgacttgcagtgataaagaaaagcatggagctgtgtctgcagacaatggtggctgcatctgtaagtggcttcagaggcagcagccctggggaaattgatgggtgtggcagtggacctgtgaagagggagaatctagccttcagcctgtccagtgttaaccactagagaaactgagctttatatccttttttaatgcctgtgaattttagcatattgaaacattagagcaaatactcaggggatttttcattaaacatccctcagataatttagctatatatcattagaaagggaaagctatcatttttattttaaaactaaacaaggccatcttataaactgtcaccaaagtcttcccttttttattgcatgtgtgccttgaatttcataaaacattaattcacaatgggggtcagaatgtactcttgttgaaacacttcttgtaccattttatgttcatattatgtttgagagggtaaaaatgtatgagcagcttaactgaagtagaactattcatgatgcttttcacacattgtggcataagatgtaaagtttgtaattaatgttaatttctgtgcattttaatattcttttataattattaatgttaatttctgtgcattttaatattcttttataattatgagcattttaataaattcatttttacaaacaata

SEQ ID NO: 2158 - DNA, 3558 bp, Homo sapiens
  source 1..3558: mol_type = unassigned DNA
cttctgcgcgcctcgtaaaaccggggaagttcaatcattccgcagcgagccgcggcggccgcactgggcatgctcagtctccgggctccgctcggcaggcgagaggcgtcctccggctctgggctccggtcggtgggtgcctcggctcggctttccccggcgctggctgggctcagcggcccctgagcccaagcgacacacgccccgcggtccccgatccggcccctgggagagccgcgccgttctggaacccgggagcccccaacttcgcgccaagttcggagccgccttctgagggagacatgaaaaagatgagcaggaatgttttgctacaaatggaggaggaggaggacgacgacgatggggatatcgtgttggaaaaccttggacagacaattgtccccgatttgggatcactggaaagtcagcatgattttcgaaccccggagtttgaagaatttaatggaaaacctgactccctcttttttaatgatggccagcgaagaattgactttgttctagtatatgaggatgaaagcagaaaagagaccaataaaaagggtacaaatgaaaaacaaaggaggaaaagacaagcatacgaatctaaccttatctgtcatggcctgcagttagaagcaacaagatcagtattggatgacaagcttgtatttgtaaaagtacacgcaccatgggaggtgttatgtacgtatgctgagataatgcacatcaaattgcctctgaaacccaatgatctgaaaaaccggtcctcagcctttggtacactcaactggtttaccaaagtcctcagtgtagacgaaagcatcatcaagccagagcaagagtttttcactgccccatttgagaagaaccggatgaatgatttttacatagttgatagagatgctttcttcaatccagccaccagaagccgcattgtttacttcatcctctctcgggtcaagtatcaagtgataaacaatgttagcaagtttgggatcaacagacttgtaaactctgggatctacaaggcagctttcccactccatgattgcaaattccgccgtcagtcagaggatcccagctgccctaatgaacggtaccttctgtacagagaatgggctcatcctcgaagcatatacaaaaagcagcccttggatcttatcaggaaatactatggagagaagattggaatctactttgcttggctgggctattacactcagatgcttctcctggccgcagttgtaggagtggcttgctttctctatggatatcttaatcaagataactgtacatggagcaaagaagtttgtcatcctgatattggtggcaagatcataatgtgtcctcagtgtgataggctttgtccattctggaaactcaatattacttgcgagtcctcaaagaaattgtgcatcttcgacagttttggaaccctggtctttgcagtatttatgggagtatgggttaccttgtttttggagttttggaagcgacgccaggcagaacttgagtatgaatgggatactgttgagttacagcaggaagaacaagcccgaccagaatacgaagcacgatgtactcacgtagtgataaatgagattactcaggaagaagaacgcattccctttactgcctggggaaaatgtatacggataaccctctgtgccagtgctgtctttttctggatcctattgatcatcgcttcagttattgggatcattgtctataggctctcggtgttcattgtattttctgcaaaacttcccaagaacattaatggaacagacccaatccagaaatacctgactccacagacagccacgtccatcacggcctccatcatcagctttataattatcatgattctgaacaccatatatgaaaaagtggcaattatgattactaacttcgaactcccaaggacccagactgattatgagaacagcctcaccatgaagatgttcttattccagtttgtcaactactactcttcatgcttctacatagcattctttaagggcaaatttgtaggctatccaggagacccagtttattggttgggaaaatacagaaatgaagagtgtgacccaggtggctgtcttcttgaactgacaactcagctgacaataatcatgggaggaaaagcaatctggaataacatacaagaagtattattgccctggatcatgaatctaattgggcgatttcacagagtttctggatcagaaaagataaccccacgatgggaacaggactaccatctgcagcctatgggcaaactgggattattttatgaatatcttgaaatgattattcagtttgggttcgtcaccttatttgtggcctcttttccactggcccctctgttggctctcgtgaacaatatattggaaataagagtggacgcatggaaactgaccacccagtttagacgcctggtaccagagaaagcccaagacattggagcatggcagcccatcatgcaaggaatagcaattctggctgtggtgaccaatgccatgatcatagctttcacgtcggacatgatcccccgcctagtgtactactggtccttctccgtccctccctacggggaccacacttcctacaccatggaagggtacatcaacaacactctctccatcttcaaagtcgcagacttcaaaaacaaaagcaagggaaacccgtactctgacctgggtaaccataccacatgcaggtatcgtgatttccgatacccacctggacacccccaggagtataaacacaacatctactattggcatgtgattgcagccaagctggcttttatcattgtcatggagtatctcgctttgttgcccaggctgggacacagtggcatgatcttggctcactgcaacctccgcctcccagttgactgctgtatgtgttataggtttgtcgatgaaattagacttttggaacaactaacttctgactttattgactccctctattatatattttctatttcaataatatctattttcttttctgttactttctttttccttctactttctttggggccaactccgtgtttttctgtatcgaatttcttaagttagatttattcaataattcattcaacaaatatttgtgtgtctattatgtggccagcattgtttcatgtgctcaagatagagtagcattgtttggctcattaatattccaatactggcatttaagaccattaattttcctctaaatcgtatttgagctgcaacccacaagcttttatatgtatagttttttgttgttgctattattaaaagtattttagatcctcccttgttttgcttttcaatctgaaatgccttcatgccattttaatttttaaaaggtaatttaattgagcctaatttctttttcttttttcttttttttgagacagagtcttactctgtcacccaggctggagtgcagtggcgtgatctcagctcaatgcaagctctgcctcccaggttcacgccattctcctgtctcagcctcccaagtagctgggactacaggcgcccaccaccatgcctggct

SEQ ID NO: 2159 - DNA, 3448 bp, Homo sapiens
  source 1..3448: mol_type = unassigned DNA
tcagtctccgggctccgctcggcaggcgagaggcgtcctccggctctgggctccggtcggtgggtgcctcggctcggctttccccggcgctggctgggctcagcggcccctgagcccaagcgacacacgccccgcggtccccgatccgcccccaacttcgcgccaagttcggagccgccttctgagggagacatgaaaaagatgagcaggaatgttttgctacaaatggaggaggaggaggacgacgacgatggggatatcgtgttggaaaaccttggacagacaattgtccccgatttgggatcactggaaagtcagcatgattttcgaaccccggagtttgaagaatttaatggaaaacctgactccctcttttttaatgatggccagcgaagaattgactttgttctagtatatgaggatgaaagcagaaaagagaccaataaaaagggtacaaatgaaaaacaaaggaggaaaagacaagcatacgaatctaaccttatctgtcatggcctgcagttagaagcaacaagatcagtattggatgacaagcttgtatttgtaaaagtacacgcaccatgggaggtgttatgtacgtatgctgagataatgcacatcaaattgcctctgaaacccaatgatctgaaaaaccggtcctcagcctttggtacactcaactggtttaccaaagtcctcagtgtagacgaaagcatcatcaagccagagcaagagtttttcactgccccatttgagaagaaccggatgaatgatttttacatagttgatagagatgctttcttcaatccagccaccagaagccgcattgtttacttcatcctctctcgggtcaagtatcaagtgataaacaatgttagcaagtttgggatcaacagacttgtaaactctgggatctacaaggcagctttcccactccatgattgcaaattccgccgtcagtcagaggatcccagctgccctaatgaacggtaccttctgtacagagaatgggctcatcctcgaagcatatacaaaaagcagcccttggatcttatcaggaaatactatggagagaagattggaatctactttgcttggctgggctattacactcagatgcttctcctggccgcagttgtaggagtggcttgctttctctatggatatcttaatcaagataactgtacatggagcaaagaagtttgtcatcctgatattggtggcaagatcataatgtgtcctcagtgtgataggctttgtccattctggaaactcaatattacttgcgagtcctcaaagaaattgtgcatcttcgacagttttggaaccctggtctttgcagtatttatgggagtatgggttaccttgtttttggagttttggaagcgacgccaggcagaacttgagtatgaatgggatactgttgagttacagcaggaagaacaagcccgaccagaatacgaagcacgatgtactcacgtagtgataaatgagattactcaggaagaagaacgcattccctttactgcctggggaaaatgtatacggataaccctctgtgccagtgctgtctttttctggatcctattgatcatcgcttcagttattgggatcattgtctataggctctcggtgttcattgtattttctgcaaaacttcccaagaacattaatggaacagacccaatccagaaatacctgactccacagacagccacgtccatcacggcctccatcatcagctttataattatcatgattctgaacaccatatatgaaaaagtggcaattatgattactaacttcgaactcccaaggacccagactgattatgagaacagcctcaccatgaagatgttcttattccagtttgtcaactactactcttcatgcttctacatagcattctttaagggcaaatttgtaggctatccaggagacccagtttattggttgggaaaatacagaaatgaagagtgtgacccaggtggctgtcttcttgaactgacaactcagctgacaataatcatgggaggaaaagcaatctggaataacatacaagaagtattattgccctggatcatgaatctaattgggcgatttcacagagtttctggatcagaaaagataaccccacgatgggaacaggactaccatctgcagcctatgggcaaactgggattattttatgaatatcttgaaatgattattcagtttgggttcgtcaccttatttgtggcctcttttccactggcccctctgttggctctcgtgaacaatatattggaaataagagtggacgcatggaaactgaccacccagtttagacgcctggtaccagagaaagcccaagacattggagcatggcagcccatcatgcaaggaatagcaattctggctgtggtgaccaatgccatgatcatagctttcacgtcggacatgatcccccgcctagtgtactactggtccttctccgtccctccctacggggaccacacttcctacaccatggaagggtacatcaacaacactctctccatcttcaaagtcgcagacttcaaaaacaaaagcaagggaaacccgtactctgacctgggtaaccataccacatgcaggtatcgtgatttccgatacccacctggacacccccaggagtataaacacaacatctactattggcatgtgattgcagccaagctggcttttatcattgtcatggagtatctcgctttgttgcccaggctgggacacagtggcatgatcttggctcactgcaacctccgcctcccagttgactgctgtatgtgttataggtttgtcgatgaaattagacttttggaacaactaacttctgactttattgactccctctattatatattttctatttcaataatatctattttcttttctgttactttctttttccttctactttctttggggccaactccgtgtttttctgtatcgaatttcttaagttagatttattcaataattcattcaacaaatatttgtgtgtctattatgtggccagcattgtttcatgtgctcaagatagagtagcattgtttggctcattaatattccaatactggcatttaagaccattaattttcctctaaatcgtatttgagctgcaacccacaagcttttatatgtatagttttttgttgttgctattattaaaagtattttagatcctcccttgttttgcttttcaatctgaaatgccttcatgccattttaatttttaaaaggtaatttaattgagcctaatttctttttcttttttcttttttttgagacagagtcttactctgtcacccaggctggagtgcagtggcgtgatctcagctcaatgcaagctctgcctcccaggttcacgccattctcctgtctcagcctcccaagtagctgggactacaggcgcccaccaccatgcctggct

SEQ ID NO: 2160 - DNA, 5955 bp, Homo sapiens
  source 1..5955: mol_type = unassigned DNA
ttggggcagaggaggcttgtaggaataggggaagagttcataagcagagctgaaacaacaccaaacatggaaatgttacaaggtggagaaattgtgcttactgaaactcttctcagaaatattgctgtttgtggatgatagaaatcttcagagttgtcacttaaggtagaggtaggagggtaagaagcgtcaaggactcaccgaattgtccattcccccttttgttctgctgtggaatgttttgtgctgctgtgttggaaaaccttggacagacaattgtccccgatttgggatcactggaaagtcagcatgattttcgaaccccggagtttgaagaatttaatggaaaacctgactccctcttttttaatgatggccagcgaagaattgactttgttctagtatatgaggatgaaagcagaaaagagaccaataaaaagggtacaaatgaaaaacaaaggaggaaaagacaagcatacgaatctaaccttatctgtcatggcctgcagttagaagcaacaagatcagtattggatgacaagcttgtatttgtaaaagtacacgcaccatgggaggtgttatgtacgtatgctgagataatgcacatcaaattgcctctgaaacccaatgatctgaaaaaccggtcctcagcctttggtacactcaactggtttaccaaagtcctcagtgtagacgaaagcatcatcaagccagagcaagagtttttcactgccccatttgagaagaaccggatgaatgatttttacatagttgatagagatgctttcttcaatccagccaccagaagccgcattgtttacttcatcctctctcgggtcaagtatcaagtgataaacaatgttagcaagtttgggatcaacagacttgtaaactctgggatctacaaggcagctttcccactccatgattgcaaattccgccgtcagtcagaggatcccagctgccctaatgaacggtaccttctgtacagagaatgggctcatcctcgaagcatatacaaaaagcagcccttggatcttatcaggaaatactatggagagaagattggaatctactttgcttggctgggctattacactcagatgcttctcctggccgcagttgtaggagtggcttgctttctctatggatatcttaatcaagataactgtacatggagcaaagaagtttgtcatcctgatattggtggcaagatcataatgtgtcctcagtgtgataggctttgtccattctggaaactcaatattacttgcgagtcctcaaagaaattgtgcatcttcgacagttttggaaccctggtctttgcagtatttatgggagtatgggttaccttgtttttggagttttggaagcgacgccaggcagaacttgagtatgaatgggatactgttgagttacagcaggaagaacaagcccgaccagaatacgaagcacgatgtactcacgtagtgataaatgagattactcaggaagaagaacgcattccctttactgcctggggaaaatgtatacggataaccctctgtgccagtgctgtctttttctggatcctattgatcatcgcttcagttattgggatcattgtctataggctctcggtgttcattgtattttctgcaaaacttcccaagaacattaatggaacagacccaatccagaaatacctgactccacagacagccacgtccatcacggcctccatcatcagctttataattatcatgattctgaacaccatatatgaaaaagtggcaattatgattactaacttcgaactcccaaggacccagactgattatgagaacagcctcaccatgaagatgttcttattccagtttgtcaactactactcttcatgcttctacatagcattctttaagggcaaatttgtaggctatccaggagacccagtttattggttgggaaaatacagaaatgaagagtgtgacccaggtggctgtcttcttgaactgacaactcagctgacaataatcatgggaggaaaagcaatctggaataacatacaagaagtattattgccctggatcatgaatctaattgggcgatttcacagagtttctggatcagaaaagataaccccacgatgggaacaggactaccatctgcagcctatgggcaaactgggattattttatgaatatcttgaaatgattattcagtttgggttcgtcaccttatttgtggcctcttttccactggcccctctgttggctctcgtgaacaatatattggaaataagagtggacgcatggaaactgaccacccagtttagacgcctggtaccagagaaagcccaagacattggagcatggcagcccatcatgcaaggaatagcaattctggctgtggtgaccaatgccatgatcatagctttcacgtcggacatgatcccccgcctagtgtactactggtccttctccgtccctccctacggggaccacacttcctacaccatggaagggtacatcaacaacactctctccatcttcaaagtcgcagacttcaaaaacaaaagcaagggaaacccgtactctgacctgggtaaccataccacatgcaggtatcgtgatttccgatacccacctggacacccccaggagtataaacacaacatctactattggcatgtgattgcagccaagctggcttttatcattgtcatggagcacgtcatctactctgtgaaatttttcatttcatatgcaattcccgatgtatcaaaacgcacaaagagcaagatccagagagaaaaatacctaacccaaaagcttcttcatgagaatcacctcaaagatatgacgaaaaatatgggggtgatagctgagcggatgatagaagcagtagataacaatttacggccaaaatcagaataagagctttatgttctgagaagcactttaaggaatttagctttgtcaaaatatattaggaatcactaatgagaatgtgtaagttaaatcactttggcaaatatgagtctcaactattgccatttcctcatgtattatttttcagtttcagctagcgatgcagaaactggaaaatgtaaaacttagatcatgaagggcataaaacttatcacccggaaaacctcaatgttacctttttctgataaattggaattttacagaaaaagtccctcagtgtgcttaaaaaccaccccttctaaagtagaatggattcttttttttctgtttgattattttcatttctgtctattctcaggcgcatgatctcctttatttttaagccatgtttcatttcttcacttggctagatctgttccagggtcatcttttccttacagtaccatcattatagatttaatttaatagctttcatgtgattaaaaatagctaactagactcaaggattcacaatatttaggtgtattttcaatacctccagaaaggaaacctcagttaatcagaggaaatagtttcagtcttcatttgagcatgtctttccatctcaaaaaaatactcttagtaggttggagtgaagatagcaaggttttgaagcatatttgtcctaatccacagtgacactttttatcttccaggagcactcctaggaggttccgtgcctaatcaatgttgactgctttgcagatctcaagggaataaaatgacaaaagcagggaaagttacagattcaaacagcattttaactcatgttgatctggataattaatcttttctaaagatgtgtagtttcttggaaaacagtgatatcacatgattaaaattacatttttatcaacataattgtctggaaaagataagcccctcaattttctaccagttgacttttattcattagatacagaaggtgcagtattacacatcaccagctgcctttgtgaatggctcactacacagccattggggtacaactgtgtgcatgggcagaaacagcaagtgccctcattgtggtcattgggtggggagtgccttttgtcaaggagtctgcaggaattggcttatttctgtatgccaaagtgatcaacacaccaaagtctctgccataaagaatgtggcttccttgcatcctccatcctgttactctgggcccagtaatttgatgtaactgtctgattgtactagagacaggagtatacccagcttattcataatcaagtaaagagactcagattagatttgattttttagcctcctctagagccaatcaggcagttaagagtaataaaggaaaagggtttggtcacaaaccctaccattatctggagattacttcctgctgcactcctgtcttgccatgcacgtcttgccccctcacttttgctcagcctagcagtctacttcactttattgccttgtaagtgtcaggcctcctgggcgctctggaaaagacagggagccaggccctctcacccctactggtaacaggtcattgctgggtgcacaagagggaggtgatttgcatcatggtcatgctgcatgggcttcactgggatgctgttaaacaccagaggagccaacctatcagaatcccagcagcaaaggaaaactcagattttagaggctttttacaataaagtagcgtaactctaggtcatgattgatttcaaatgcctgccatgaatgatttgtaagtaattatgtaggatccatcaaagcagtattgtaggcttttgaattgtcccagtggatccgggaccccatttcactgtctctcttgatcgtgttaatgatgcaatcagagttcaagacaggccccatgaagtctgactgcactgggatggagaaatgaatttcttcccactgaaggaaactctttctcattcgcagccaagacgggagtgccactgttcctctcttcactcctgagatactgcttctggaagcgggtgtcacttcctctctagtacctcttctcttctctgaagtgtgtgactatctcctagtgtttaaatttggcagttactcgccatgtatgtcagcatagaaaaggaaatgtttttaccttatctcctgtatgtatgatagaacttaaaagaaatgtgcatttgttttcatagccccagcagagaaaatcctcttcatagattaaatgtgctgctgtggacaggaggggaaaaaaaaccctctacatattgaaaggcaccaaatgtaatatctgacactgttaagatgcccaaaagagcaaagttgtagtggagatgcagggtcatttccccatgccatccacagtgtttgttagtgagtccacggctgacttgcagtgataaagaaaagcatggagctgtgtctgcagacaatggtggctgcatctgtaagtggcttcagaggcagcagccctggggaaattgatgggtgtggcagtggacctgtgaagagggagaatctagccttcagcctgtccagtgttaaccactagagaaactgagctttatatccttttttaatgcctgtgaattttagcatattgaaacattagagcaaatactcaggggatttttcattaaacatccctcagataatttagctatatatcattagaaagggaaagctatcatttttattttaaaactaaacaaggccatcttataaactgtcaccaaagtcttcccttttttattgcatgtgtgccttgaatttcataaaacattaattcacaatgggggtcagaatgtactcttgttgaaacacttcttgtaccattttatgttcatattatgtttgagagggtaaaaatgtatgagcagcttaactgaagtagaactattcatgatgcttttcacacattgtggcataagatgtaaagtttgtaattaatgttaatttctgtgcattttaatattcttttataattattaatgttaatttctgtgcattttaatattcttttataattatgagcattttaataaattcatttttacaaacaata

SEQ ID NO: 2161 - DNA, 5504 bp, Homo sapiens
  source 1..5504: mol_type = unassigned DNA
gggcatgctcagtctccgggctccgctcggcaggcgagaggcgtcctccggctctgggctccggtcggtgggtgcctcggctcggctttccccggcgctggctgggctcagcggcccctgagcccaagcgacacacgccccgcggtccccgatccggcccctgggagagccgcgccgttctggaacccgggagcccccaacttcgcgccaagttcggagccgccttctgagggagacatgaaaaagatgagcaggaatgttttgctacaaatggaggaggaggaggacgacgacgatggggatatcggtgatgttcctgcctccaggaggccttttctgactcctcatactcacctcccatccagcctggtgttggaaaaccttggacagacaattgtccccgatttgggatcactggaaagtcagcatgattttcgaaccccggagtttgaagaatttaatggaaaacctgactccctcttttttaatgatggccagcgaagaattgactttgttctagtatatgaggatgaaagcagaaaagagaccaataaaaagggtacaaatgaaaaacaaaggaggaaaagacaagcatacgaatctaaccttatctgtcatggcctgcagttagaagcaacaagatcagtattggatgacaagcttgtatttgtaaaagtacacgcaccatgggaggtgttatgtacgtatgctgagataatgcacatcaaattgcctctgaaacccaatgatctgaaaaaccggtcctcagcctttggtacactcaactggtttaccaaagtcctcagtgtagacgaaagcatcatcaagccagagcaagagtttttcactgccccatttgagaagaaccggatgaatgatttttacatagttgatagagatgctttcttcaatccagccaccagaagccgcattgtttacttcatcctctctcgggtcaagtatcaagtgataaacaatgttagcaagtttgggatcaacagacttgtaaactctgggatctacaaggcagctttcccactccatgattgcaaattccgccgtcagtcagaggatcccagctgccctaatgaacggtaccttctgtacagagaatgggctcatcctcgaagcatatacaaaaagcagcccttggatcttatcaggaaatactatggagagaagattggaatctactttgcttggctgggctattacactcagatgcttctcctggccgcagttgtaggagtggcttgctttctctatggatatcttaatcaagataactgtacatggagcaaagaagtttgtcatcctgatattggtggcaagatcataatgtgtcctcagtgtgataggctttgtccattctggaaactcaatattacttgcgagtcctcaaagaaattgtgcatcttcgacagttttggaaccctggtctttgcagtatttatgggagtatgggttaccttgtttttggagttttggaagcgacgccaggcagaacttgagtatgaatgggatactgttgagttacagcaggaagaacaagcccgaccagaatacgaagcacgatgtactcacgtagtgataaatgagattactcaggaagaagaacgcattccctttactgcctggggaaaatgtatacggataaccctctgtgccagtgctgtctttttctggatcctattgatcatcgcttcagttattgggatcattgtctataggctctcggtgttcattgtattttctgcaaaacttcccaagaacattaatggaacagacccaatccagaaatacctgactccacagacagccacgtccatcacggcctccatcatcagctttataattatcatgattctgaacaccatatatgaaaaagtggcaattatgattactaacttcgaactcccaaggacccagactgattatgagaacagcctcaccatgaagatgttcttattccagtttgtcaactactactcttcatgcttctacatagcattctttaagggcaaatttgtaggctatccaggagacccagtttattggttgggaaaatacagaaatgaagagtgtgacccaggtggctgtcttcttgaactgacaactcagctgacaataatcatgggaggaaaagcaatctggaataacatacaagaagtattattgccctggatcatgaatctaattgggcgatttcacagagtttctggatcagaaaagataaccccacgatgggaacaggactaccatctgcagcctatgggcaaactgggattattttatgaatatcttgaaatgattattcagtttgggttcgtcaccttatttgtggcctcttttccactggcccctctgttggctctcgtgaacaatatattggaaataagagtggacgcatggaaactgaccacccagtttagacgcctggtaccagagaaagcccaagacattggagcatggcagcccatcatgcaaggaatagcaattctggctgtggtgaccaatgccatgatcatagctttcacgtcggacatgatcccccgcctagtgtactactggtccttctccgtccctccctacggggaccacacttcctacaccatggaagggtacatcaacaacactctctccatcttcaaagtcgcagacttcaaaaacaaaagcaagggaaacccgtactctgacctgggtaaccataccacatgcaggtatcgtgatttccgatacccacctggacacccccaggagtataaacacaacatctactattggcatgtgattgcagccaagctggcttttatcattgtcatggagcacgtcatctactctgtgaaatttttcatttcatatgcaattcccgatgtatcaaaacgcacaaagagcaagatccagagagaaaaatacctaacccaaaagcttcttcatgagaatcacctcaaagatatgacgaaaaatatgggggtgatagctgagcggatgatagaagcagtagataacaatttacggccaaaatcagaataagagctttatgttctgagaagcactttaaggaatttagctttgtcaaaatatattaggaatcactaatgagaatgtgtaagttaaatcactttggcaaatatgagtctcaactattgccatttcctcatgtattatttttcagtttcagctagcgatgcagaaactggaaaatgtaaaacttagatcatgaagggcataaaacttatcacccggaaaacctcaatgttacctttttctgataaattggaattttacagaaaaagtccctcagtgtgcttaaaaaccaccccttctaaagtagaatggattcttttttttctgtttgattattttcatttctgtctattctcaggcgcatgatctcctttatttttaagccatgtttcatttcttcacttggctagatctgttccagggtcatcttttccttacagtaccatcattatagatttaatttaatagctttcatgtgattaaaaatagctaactagactcaaggattcacaatatttaggtgtattttcaatacctccagaaaggaaacctcagttaatcagaggaaatagtttcagtcttcatttgagcatgtctttccatctcaaaaaaatactcttagtaggttggagtgaagatagcaaggttttgaagcatatttgtcctaatccacagtgacactttttatcttccaggagcactcctaggaggttccgtgcctaatcaatgttgactgctttgcagatctcaagggaataaaatgacaaaagcagggaaagttacagattcaaacagcattttaactcatgttgatctggataattaatcttttctaaagatgtgtagtttcttggaaaacagtgatatcacatgattaaaattacatttttatcaacataattgtctggaaaagataagcccctcaattttctaccagttgacttttattcattagatacagaaggtgcagtattacacatcaccagctgcctttgtgaatggctcactacacagccattggggtacaactgtgtgcatgggcagaaacagcaagtgccctcattgtggtcattgggtggggagtgccttttgtcaaggagtctgcaggaattggcttatttctgtatgccaaagtgatcaacacaccaaagtctctgccataaagaatgtggcttccttgcatcctccatcctgttactctgggcccagtaatttgatgtaactgtctgattgtactagagacaggagtatacccagcttattcataatcaagtaaagagactcagattagatttgattttttagcctcctctagagccaatcaggcagttaagagtaataaaggaaaagggtttggtcacaaaccctaccattatctggagattacttcctgctgcactcctgtcttgccatgcacgtcttgccccctcacttttgctcagcctagcagtctacttcactttattgccttgtaagtgtcaggcctcctgggcgctctggaaaagacagggagccaggccctctcacccctactggtaacaggtcattgctgggtgcacaagagggaggtgatttgcatcatggtcatgctgcatgggcttcactgggatgctgttaaacaccagaggagccaacctatcagaatcccagcagcaaaggaaaactcagattttagaggctttttacaataaagtagcgtaactctaggtcatgattgatttcaaatgcctgccatgaatgatttgtaagtaattatgtaggatccatcaaagcagtattgtaggcttttgaattgtcccagtggatccgggaccccatttcactgtctctcttgatcgtgttaatgatgcaatcagagttcaagacaggccccatgaagtctgactgcactgggatggagaaatgaatttcttcccactgaaggaaactctttctcattcgcagccaagacgggagtgccactgttcctctcttcactcctgagatactgcttctggaagcgggtgtcacttcctctctagtacctcttctcttctctgaagtgtgtgactatctcctagtgtttaaatttggcagttactcgccatgtatgtcagcatagaaaaggaaatgtttttaccttatctcctgtatgtatgatagaacttaaaagaaatgtgcatttgttttcatagccccagcagagaaaatcctcttcatagattaaatgtgctgctgtggacaggaggggaaaaaaaaccctctacatattgaaaggcaccaaatgtaatatctgacactgttaagatgcccaaaagagcaaagttgtagtggagatgcagggtcatttccccatgccatccacagtgtttgttagtgagtccacggctgacttgcagtgataaagaaaagcatggagctgtgtctgcagacaatggtggctgcatctgtaagtggcttcagaggcagcagccctggggaaattgatgggtgtggca

SEQ ID NO: 2162 - DNA, 749 bp, Homo sapiens
  source 1..749: mol_type = unassigned DNA
aaacatccagaatacatttccaacaagagcactggccaagtcagcttcttctgagagagtctctagaagacatgatgctacactcagctttgggtctctgcctcttactcgtcacagtttcttccaaccttgccattgcaataaaaaaggaaaagaggcctcctcagacactctcaagaggatggggagatgacatcacttgggtacaaacttatgaagaaggtctcttttatgctcaaaaaagtaagaagccattaatggttattcatcacctggaggattgtcaatactctcaagcactaaagaaagtatttgcccaaaatgaagaaatacaagaaatggctcagaataagttcatcatgctaaaccttatgcatgaaaccactgataagaatttatcacctgatgggcaatatgtgcctagaatcatgtttgtagacccttctttaacagttagagctgacatagctggaagatactctaacagattgtacacatatgagcctcgggatttacccctattgatagaaaacatgaagaaagcattaagacttattcagtcagagctataagagatgatggaaaaaagccttcacttcaaagaagtcaaatttcatgaagaaaacctctggcacattgacaaatactaaatgtgcaagtatatagattttgtaatattactatttagtttttttaatgtgtttgcaatagtcttattaaaataaatgttttttaaatctgagactgac

SEQ ID NO: 2163 - DNA, 663 bp, Homo sapiens
  source 1..663: mol_type = unassigned DNA
ttgtcccctcttcggcttccgtagaggaagtggcgcggaccttcatttggggtttcggttcccccccttccccttccccggggtctgggggtgacattgcaccgcgcccctcgtggggtcgcgttgccaccccacgcggactccccagctggcgcgcccctcccatttgcctgtcctggtcaggcccccaccccccttcccacctgaccagccatgggggctgcggtgtttttcggctgcactttcgtcgcgttcggcccggccttcgcgcttttcttgatcactgtggctggggacccgcttcgcgttatcatcctggtcgcagggaaggcagatgaggggttagcatcgctgagtgaggacggaagatcacccatctccatccgccagatggcctatgtttctggtctctccttcggtatcatcagtggtgtcttctctgttatcaatattttggctgatgcacttgggccaggtgtggttgggatccatggagactcaccctattacttcctgacttcagcctttctgacagcagccattatcctgctccataccttttggggagttgtgttctttgatgcctgtgagaggagacggtactgggctttgggcctggtggttgggagtcacctactgacatcgggactgacattcctgaac

SEQ ID NO: 2164 - DNA, 2353 bp, Homo sapiens
  source 1..2353: mol_type = unassigned DNA
agcccttcaagaagaggtatgattgctaccacttttccccacaaagtgacgaaaggaaacagcgacggaagcgcaaccgaaccctggaattggtgtctcgactggtccattcccggcccacccccattaaccggctcgagccactcccaggacgaagtcaaggcctcggaaggcgactacaactcccagcaggtcgagcagctccgcccgcgctgattctccattggccttccgggggtggggattagatgggaggtggccgtggggctgcggccgggatttgtcccctcttcggcttccgtagaggaagtggcgcggaccttcatttggggtttcggttcccccccttccccttccccggggtctgggggtgacattgcaccgcgcccctcgtggggtcgcgttgccaccccacgcggactccccagctggcgcgcccctcccatttgcctgtcctggtcaggcccccaccccccttcccacctgaccagccatgggggctgcggtgtttttcggctgcactttcgtcgcgttcggcccggccttcgcgcttttcttgatcactgtggctggggacccgcttcgcgttatcatcctggtcgcaggggcatttttctggctggtctccctgctcctggcctctgtggtctggttcatcttggtccatgtgaccgaccggtcagatgcccggctccagtacggcctcctgatttttggtgctgctgtctctgtccttctacaggaggtgttccgctttgcctactacaagctgcttaagaaggcagatgaggggttagcatcgctgagtgaggacggaagatcacccatctccatccgccagatggcctatgtttctggtctctccttcggtatcatcagtggtgtcttctctgttatcaatattttggctgatgcacttgggccaggtgtggttgggatccatggagactcaccctattacttcctgacttcagcctttctgacagcagccattatcctgctccataccttttggggagttgtgttctttgatgcctgtgagaggagacggtactgggctttgggcctggtggttgggagtcacctactgacatcgggactgacattcctgaacccctggtatgaggccagcctgctgcccatctatgcagtcactgtttccatggggctctgggccttcatcacagctggagggtccctccgaagtattcagcgcagcctcttgtgtaaggactgactacctggactgatcgcctgacagatcccacctgcctgtccactgcccatgactgagcccagccccagcccgggtccattgcccacattctctgtctccttctcgtcggtctaccccactacctccagggttttgctttgtccttttgtgaccgttagtctctaagctttaccaggagcagcctgggttcagccagtcagtgactggtgggtttgaatctgcacttatccccaccacctggggacccccttgttgtgtccaggactccccctgtgtcagtgctctgctctcaccctgcccaagactcacctcccttcccctctgcaggccgacggcaggaggacagtcgggtgatggtgtattctgccctgcgcatcccacccgaggactgagggaacctaggggggacccctgggcctggggtgccctcctgatgtcctcgccctgtatttctccatctccagttctggacagtgcaggttgccaagaaaagggacctagtttagccattgccctggagatgaaattaatggaggctcaaggatagatgagctctgagtttctcagtactccctcaagactggacatcttggtctttttctcaggcctgagggggaaccatttttggtgtgataaataccctaaactgcctttttttcttttttgaggtggggggagggaggaggtatattggaactcttctaacctccttgggctatattttctctcctcgagttgctcctcatggctgggctcatttcggtccctttctccttggtcccagaccttgggggaaaggaaggaagtgcatgtttgggaactggcattactggaactaatggttttaacctccttaaccaccagcatccctcctctccccaaggtgaagtggagggtgctgtggtgagctggccactccagagctgcagtgccactggaggagtcagactaccatgacatcgtagggaaggaggggagatttttttgtagtttttaattggggtgtgggaggggcggggaggttttctataaactgtatcattttctgctgagggtggagtgtcccatccttttaatcaaggtgattgtgattttgactaataaaaaagaatttgt

SEQ ID NO: 2165 - DNA, 1713 bp, Homo sapiens
  source 1..1713: mol_type = unassigned DNA
aggaagtggcgcggaccttcatttggggtttcggttcccccccttccccttccccggggtctgggggtgacattgcaccgcgcccctcgtggggtcgcgttgccaccccacgcggactccccagctggcgcgcccctcccatttgcctgtcctggtcaggcccccaccccccttcccacctgaccagccatgggggctgcggtgtttttcggctgcactttcgtcgcgttcggcccggccttcgcgcttttcttgatcactgtggctggggacccgcttcgcgttatcatcctggtcgcaggggcatttttctggctggtctccctgctcctggcctctgtggtctggttcatcttggtccatgtgaccgaccggtcagatgcccggctccagtacggcctcctgatttttggtgctgctgtctctgtccttctacaggaggtgttccgctttgcctactacaagctgcttaagaaggcagatgaggggttagcatcgctgagtgaggacggaagatcacccatctccatccgccagatggcctatgtttctggtctctccttcggtatcatcagtggtgtcttctctgttatcaatattttggctgatgcacttgggccaggtgtggttgggatccatggagactcaccctattacttcctgacttcagcctttctgacagcagccattatcctgctccataccttttggggagttgtgttctttgatgcctgtgagaggagacggtactgggctttgggcctggtggttgggagtcacctactgacatcgggactgacattcctgaacccctggtatgaggccagcctgctgcccatctatgcagtcactgtttccatggggctctgggccttcatcacagctggagggtccctccgaagtattcagcgcagcctcttgtgccgacggcaggaggacagtcgggtgatggtgtattctgccctgcgcatcccacccgaggactgagggaacctaggggggacccctgggcctggggtgccctcctgatgtcctcgccctgtatttctccatctccagttctggacagtgcaggttgccaagaaaagggacctagtttagccattgccctggagatgaaattaatggaggctcaaggatagatgagctctgagtttctcagtactccctcaagactggacatcttggtctttttctcaggcctgagggggaaccatttttggtgtgataaataccctaaactgcctttttttcttttttgaggtggggggagggaggaggtatattggaactcttctaacctccttgggctatattttctctcctcgagttgctcctcatggctgggctcatttcggtccctttctccttggtcccagaccttgggggaaaggaaggaagtgcatgtttgggaactggcattactggaactaatggttttaacctccttaaccaccagcatccctcctctccccaaggtgaagtggagggtgctgtggtgagctggccactccagagctgcagtgccactggaggagtcagactaccatgacatcgtagggaaggaggggagatttttttgtagtttttaattggggtgtgggaggggcggggaggttttctataaactgtatcattttctgctgagggtggagtgtcccatccttttaatcaaggtgattgtgattttgactaataaaaaagaatttgtaa

SEQ ID NO: 2166 - DNA, 1501 bp, Homo sapiens
  source 1..1501: mol_type = unassigned DNA
ctcttcggcttccgtagaggaagtggcgcggaccttcatttggggtttcggttcccccccttccccttccccggggtctgggggtgacattgcaccgcgcccctcgtggggtcgcgttgccaccccacgcggactccccagctggcgcgcccctcccatttgcctgtcctggtcaggcccccaccccccttcccacctgaccagccatgggggctgcggtgtttttcggctgcactttcgtcgcgttcggcccggccttcgcgcttttcttgatcactgtggctggggacccgcttcgcgttatcatcctggtcgcagggaggtgttccgctttgcctactacaagctgcttaatttctggtctctccttcggtatcatcagtggtgtcttctctgttatcaatattttggctgatgcacttgggccaggtgtggttgggatccatggagactcaccctattacttcctgacttcagcctttctgacagcagccattatcctgctccataccttttggggagttgtgttctttgatgcctgtgagaggagacggtactgggctttgggcctggtggttgggagtcacctactgacatcgggactgacattcctgaacccctggtatgaggccagcctgctgcccatctatgcagtcactgtttccatggggctctgggccttcatcacagctggagggtccctccgaagtattcagcgcagcctcttgtgccgacggcaggaggacagtcgggtgatggtgtattctgccctgcgcatcccacccgaggactgagggaacctaggggggacccctgggcctggggtgccctcctgatgtcctcgccctgtatttctccatctccagttctggacagtgcaggttgccaagaaaagggacctagtttagccattgccctggagatgaaattaatggaggctcaaggatagatgagctctgagtttctcagtactccctcaagactggacatcttggtctttttctcaggcctgagggggaaccatttttggtgtgataaataccctaaactgcctttttttcttttttgaggtggggggagggaggaggtatattggaactcttctaacctccttgggctatattttctctcctcgagttgctcctcatggctgggctcatttcggtccctttctccttggtcccagaccttgggggaaaggaaggaagtgcatgtttgggaactggcattactggaactaatggttttaacctccttaaccaccagcatccctcctctccccaaggtgaagtggagggtgctgtggtgagctggccactccagagctgcagtgccactggaggagtcagactaccatgacatcgtagggaaggaggggagatttttttgtagtttttaattggggtgtgggaggggcggggaggttttctataaactgtatcattttctgctgagggtggagtgtcccatccttttaatcaaggtgattgtgattttgact

SEQ ID NO: 2167 - DNA, 4189 bp, Homo sapiens
  source 1..4189: mol_type = unassigned DNA
accgaaccccgcccgcgccgggagcatctcgcgtccccaacgggcccccgggtcggtttccgcggtggccatgactgcggccgtgttcttcggctgcgccttcattgccttcgggcctgcgctcgccctttatgtcttcaccatcgccaccgagccgttgcgtatcatcttcctcatcgccggagctttcttctggttggtgtctctactgatttcgtcccttgtttggttcatggcaagagtcattattgacaacaaagatggaccaacacagaaatatctgctgatctttggagcgtttgtctctgtctatatccaagaaatgttccgatttgcatattataaactcttaaaaaaagccagtgaaggtttgaagagtataaacccaggtgagacagcaccctctatgcgactgctggcctatgtttctggcttgggctttggaatcatgagtggagtattttcctttgtgaataccctatctgactccttggggccaggcacagtgggcattcatggagattctcctcaattcttcctttattcagctttcatgacgctggtcattatcttgctgcatgtattctggggcattgtattttttgatggctgtgagaagaaaaagtggggcatcctccttatcgttctcctgacccacctgctggtgtcagcccagaccttcataagttcttattatggaataaacctggcgtcagcatttataatcctggtgctcatgggcacctgggcattcttagctgcgggaggcagctgccgaagcctgaaactctgcctgctctgccaagacaagaactttcttctttacaaccagcgctccagataacctcagggaaccagcacttcccaaaccgcagactacatctttagaggaagcacaactgtgcctttttctgaaaatccctttttctggtggaattgagaaagaaataaaactatgcagatatgcgttccattcacttggctttcacacaactgctctccgaaaggggtgctcagtggtgtgcgtcctggctgcacgagaatcacctgggacagtgtaaagccgactgattctgggctccaccttccagagctaattggcctgggcacgtggtgagttttaaaagcttcccaggtgattctgatgtgcagccatgttgagacccactggtttggtatccaaataggagcttcctgagaacaccttaagtggatgagaatctggtctttagctgtctcctaactcaactcgtgctgagcaagtaagtatctgaatgtcaaatcctggttatcttttatcttcctaagttctgaagtcacaaaaggctaaagggctatcacccctgctcactgtttgcgtgtacttcaccatcttaggagaacacggtaggttgggcttctaaatgcaataataaattacgctgactgtggtaacttagccaaagtaagatactgattaagccgtatttttctgaagtgcttccattccaggttttgctttctgaggcattacattgtttttgagtatagattacattttattaactaaaaatgattgttttgtgacttccttgggaaggtattttaaaatcaggaatttttatgcaatgtctataagcctgtttaaagctttccatgggctctgccccaaggccgttggctgcagcgttcaccatctgagtgccagttgctggactagttgaggtgaagtgcattgttttctctctgagcagctgtgcggggagctgagtgatgtgccctgggacaggcttcactggagctggtggaagtataaccagaagcacaaggaaatgagccaaaagggtgtcattgacacttttcatttgctcctgtgatactaacaacactttcacccaaatggcttaatgtaatattggaaatagatcttaaactgccaaatctcacactattgcataatccatatgctctttagatctagtcagtgtctctgggttttggtagcagatacagcgttccctttacaggaatacccaaggtgttctttcagcttccagacaggtcctttgatttcctttataaagggaaaattctggcaaatcgtgcctttactattagaaattgttcccagttgatgtcttttggggagctggtggcatgaaatgcaaatgacctatacattaaagtgatgtctcagtgaataccatacatgcagtagaacattcagaagagaggagcagcaatcctgaggggctgggggagtgacagtggcaggacggatgggcgggtttgacagattgtggtgggaagaagaatgatcatgtttaaagctaacatagccagtgttttgggctagccacacatcattccagagaccaaaaccttactcatgaactagacctttatcgatatcagtgaacccccatgtttaaaatattagaatgtttagagataaaatagagataatagagataaaagaagaggagggcttctatcaatgctgtaaacagtctgataagcgactgtggttattcccctaaagtttacttcagcactaacactagtgcttccgctggagtttgcagttttccagctttatacaggattttcctttgactggaagagtcaaggatatagagactcaacagtgacatttattgtacaacatcaaggggaataggatactcatcaaactgggattattcttatcaaaacatggtcttctttgaataagaaaaatacatagttggttattatggacttaaaactgtgttaaatggatattctgataaaatatttgctgctctgtagagtgtggaaagtctgagaatattagctttactcatcttgagctttgaggatgttctctgtacgccgatggtttcatattaactaaaaaagctgggtattgtaaaatctcatttataaaaactcagatgagaagaaaattttctttgatggtgagactgttgtcttagttcaggaaattatttaataatcctttgttacctgtgaatgaaggaactttgtaattctgatttatcgtaaaacatgagcctttccagagtcagcttagacactgttgtcgcaaatagccatgctttgccttatgccaaggaggcccagagggagggcctagtcttcctctgttgctgtacatatattgaaatgcttttttttttttattttgcatttgttatctataatgagctttctgagccctgatattatgtgagacaaacaggagttattgatgttatacactcccttccattcaggattttctgcttggagggaaatatgttgaccttagagaattgtgaatattgttgcaattcttgaatatattaccatgtgaataatagagactgtgttgctctctagtataagctatatttatttttgattcatttgaattactagttataactggagaaattttgttacctctatcctggcttgcctgactggctgtataatagcagcagcctcttttagagcatcttaatgaaaacatggatgaaaggaattaatgatgatatctgcagactgcgtagaaaatggcttttgttcccagcgttaacattttcttctcaatcacatttcaatgtttgtggagagtggcagattcacaccagaaacactaggtgttcatatccatagcatggatgcagaataagcagttgggagagaagcttcttcctacctggtactcctcccattcacctcagcccagccccagacaggcgttagcattcagtgtgggccctcaggcagccctgaagcctggctgggtcatcagatgggggcagcctgtgacgggcaccagcggcctgattccagggaagagttcctggagggtgttggctgtttttgttagctcagtttttttctgggctccaccattcctaactccaggtagacaagatagatgtcacacacaacaattttaaagtattttgcttagtgcattttgtttatgattgcagtgtttgtttcttatttaataggctttttacttcattctattaaattttagtgtttagaagaggcgggtactgtcactgtgtaaaatatgtaatattttatatgttataccatgtcatatatacttgcaatatcagaccttgcattcaatatacaatgcaattgactctttgcagacctgcatttttcagtgaacaataaaaagattgtctggcactcctca

SEQ ID NO: 2168 - DNA, 872 bp, Homo sapiens
  source 1..872: mol_type = unassigned DNA
tttccgcggtggccatgactgcggccgtgttcttcggctgcgccttcattgccttcgggcctgcgctcgccctttatgtcttcaccatcgccaccgagccgttgcgtatcatcttcctcatcgccggccgaagggtggaaacctgtaaaaacaccgaagcacctgactgtgcgtctccttctgggagcttgagctttcttctggttggtgtctctactgatttcgtcccttgtttggttcatggcaagagtcattattgacaacaaagatggaccaacacagaaatatctgctgatctttggagcgtttgtctctgtctatatccaagaaatgttccgatttgcatattataaactcttaaaaaaagccagtgaaggtttgaagagtataaacccaggtgagacagcaccctctatgcgactgctggcctatgtttctggcttgggctttggaatcatgagtggagtattttcctttgtgaataccctatctgactccttggggccaggcacagtgggcattcatggagattctcctcaattcttcctttattcagctttcatgacgctggtcattatcttgctgcatgtattctggggcattgtattttttgatggctgtgagaagaaaaagtggggcatcctccttatcgttctcctgacccacctgctggtgtcagcccagaccttcataagttcttattatggaataaacctggcgtcagcatttataatcctggtgctcatgggcacctgggcattcttagctgcgggaggcagctgccgaagcctgaaactctgcctgctctgccaagacaagaactttcttctttacaaccagcgctccagataacctcagggaaccagcacttc

SEQ ID NO: 2169 - DNA, 685 bp, Homo sapiens
  source 1..685: mol_type = unassigned DNA
tttccgcggtggccatgactgcggccgtgttcttcggctgcgccttcattgccttcgggcctgcgctcgccctttatgtcttcaccatcgccaccgagccgttgcgtatcatcttcctcatcgccggagctttcttctggttggtgtctctactgatttcgtcccttgtttggttcatggcaagagtcattattgacaacaaagatggaccaacacagaaatatctgctgatctttggagcgtttgtctctgtctatatccaagaaatgttccgatttgcatattataaactcttaaaaaaagccagtgaaggtttgaagagtataaacccaggtgagacagcaccctctatgcgactgctggcctatgctttcatgacgctggtcattatcttgctgcatgtattctggggcattgtattttttgatggctgtgagaagaaaaagtggggcatcctccttatcgttctcctgacccacctgctggtgtcagcccagaccttcataagttcttattatggaataaacctggcgtcagcatttataatcctggtgctcatgggcacctgggcattcttagctgcgggaggcagctgccgaagcctgaaactctgcctgctctgccaagacaagaactttcttctttacaaccagcgctccagataacctcagggaaccagcacttc

SEQ ID NO: 2170 - DNA, 5859 bp, Homo sapiens
  source 1..5859: mol_type = unassigned DNA
gacggaactccttccattgcaaaagctcggcgcggcctcgggagctgcccggcggccccggaccgaggcagccctcccctttaaaagaagcggaggacaggattgggatccttgaaacccgaaacccagaaacagcatcggagcggaaaccagaggggaaaccttgaactcctccagacaattgcttccggggagttgcgagggagcgagggggaataaaggacccgcgaggaagggcccgcggatggcgcgtccctgagggtcgtggcgagttcgcggagcgtgggaaggagcggaccctgctctccccgggctgcgggccatggccacggcggagcggagagccctcggcatcggcttccagtggctctctttggccactctggtgctcatctgcgccgggcaagggggacgcagggaggatgggggtccagcctgctacggcggatttgacctgtacttcattttggacaaatcaggaagtgtgctgcaccactggaatgaaatctattactttgtggaacagttggctcacaaattcatcagcccacagttgagaatgtcctttattgttttctccacccgaggaacaaccttaatgaaactgacagaagacagagaacaaatccgtcaaggcctagaagaactccagaaagttctgccaggaggagacacttacatgcatgaaggatttgaaagggccagtgagcagatttattatgaaaacagacaagggtacaggacagccagcgtcatcattgctttgactgatggagaactccatgaagatctctttttctattcagagagggaggctaataggtctcgagatcttggtgcaattgtttactgtgttggtgtgaaagatttcaatgagacacagctggcccggattgcggacagtaaggatcatgtgtttcccgtgaatgacggctttcaggctctgcaaggcatcatccactcaattttgaagaagtcctgcatcgaaattctagcagctgaaccatccaccatatgtgcaggagagtcatttcaagttgtcgtgagaggaaacggcttccgacatgcccgcaacgtggacagggtcctctgcagcttcaagatcaatgactcggtcacactcaatgagaagcccttttctgtggaagatacttatttactgtgtccagcgcctatcttaaaagaagttggcatgaaagctgcactccaggtcagcatgaacgatggcctctcttttatctccagttctgtcatcatcaccaccacacactgttctgacggttccatcctggccatcgccctgctgatcctgttcctgctcctagccctggctctcctctggtggttctggcccctctgctgcactgtgattatcaaggaggtccctccaccccctgccgaggagagtgaggaagaagatgatgatggtctgcctaagaaaaagtggccaacggtagacgcctcttattatggtgggagaggcgttggaggcattaaaagaatggaggttcgttggggagaaaagggctccacagaagaaggtgctaagttggaaaaggcaaagaatgcaagagtcaagatgccggagcaggaatatgaattccctgagccgcgaaatctcaacaacaatatgcgtcggccttcttccccccggaagtggtactctccaatcaagggaaaactcgatgccttgtgggtcctactgaggaaaggatatgatcgtgtgtctgtgatgcgtccacagccaggagacacggggcgctgcatcaacttcaccagggtcaagaacaaccagccagccaagtacccactcaacaacgcctaccacacctcctcgccgcctcctgcccccatctacactcccccacctcctgcgccccactgccctcccccgccccccagcgcccctacccctcccatcccgtccccaccttccacccttccccctcctccccaggctccacctcccaacagggcacctcctccctcccgccctcctccaaggccttctgtctagagcccaaagttcctgctctgggctctctcagaaacttcaggagatgttagaacaagtctttccagttagagaagaggagtggtgataaagcccactgaccttcacacattctaaaaattggttggcaatgccagtataccaacaatcatgatcagctgaaagaaacagatattttaaattgccagaaaacaaatgatgaggcaactacagtcagatttatagccagccatctatcacctctagaaggttccagagacagtgaaactgcaagatgctctcaacaggattatgtctcatggagaccagtaagaaaatcatttatctgaaggtgaaatgcagagttggataagaaatacattgctgggtttctaaaatgctgccttcctgcctctactccacctccatccctggactttggacccttggcctaggagcctaaggaccttcacccctgtgcaccacccaagaaagaggaaaactttgcctacaactttggaaatgctggggtccctggtgtggtaagaaactcaacatcagacgggtatgcagaaggatgttcttctgggatttgcaggtacataaaaaatgtatggcatcttttccttgcaaattcttccagtttccaagtgagaaggggagcaggtgtttactgatggaaaaggtatgttgctatgttgatgtgtaagtgaaatcagttgtgtgcaatagacaggggcgtattcatgggagcatcagccagtttctaaaacccacaggccatcagcagctagaggtggctggctttggccagacatggaccctaaatcaacagacaatggcattgtcgaagagcaacctgttaatgaatcatgttaaaaatcaaggtttggcttcagtttaaatcacttgaggtatgaagtttatcctgttttccagagataaacataagttgatcttcccaaaataccatcattaggacctatcacacaatatcactagttttttttgtttgtttgttttttgttttttttcttggtaaagccatgcaccacagacttctgggcagagctgagagacaatggtcctgacataataaggatctttgattaacccccataaggcatgtgtgtgtatacaaatatacttctctttggcttttcgacatagaacctcagctgttaaccaaggggaaatacatcagatctgcaacacagaaatgctctgcctgaaatttccaccatgcctaggactcaccccatttatccaggtctttctggatctgtttaatcaataagccctataatcacttgctaaacactgggcttcatcacccagggataaaaacagagatcattgtcttggacctcctgcatcagcctattcaaaattatctctctctctagctttccacaaatcctaaaattcctgtcccaagccacccaaattctcagatcttttctggaacaaggcagaatataaaataaatatacatttagtggcttgggctatggtctccaaagatccttcaaaaatacatcaagccagcttcattcactcactttacttagaacagagatataagggcctgggatgcatttattttatcaataccaatttttgtggccatggcagacattgctaatcaatcacagcactatttcctattaagcccactgatttcttcacaatccttctcaaattacaattccaaagagccgccactcaacagtcagatgaacccaacagtcagatgagagaaatgaaccctacttgctatctctatcttagaaagcaaaaacaaacaggagtttccagggagaatgggaaagccagggggcataaaaggtacagtcaggggaaaatagatctaggcagagtgccttagtcagggaccacgggcgctgaatctgcagtgccaacaccaaactgacacatctccaggtgtacctccaaccctagccttctcccacagctgcctacaacagagtctcccagccttctcagagagctaaaaccagaaatttccagactcatgaaagcaaccccccagcctctccccaaccctgccgcattgtctaatttttagaacactaggcttcttctttcatgtagttcctcataagcaggggccagaatatctcagccacctgcagtgacattgctggacccctgaaaaccattccataggagaatgggttccccaggctcacagtgtagagacattgagcccatcacaactgttttgactgctggcagtctaaaacagtccacccaccccatggcactgccgcgtgattcccgcggccattcagaagttcaagccgagatgctgacgttgctgagcaacgagatggtgagcatcagtgcaaatgcaccattcagcacatcagtcatatgcccagtgcagttacaagatgttgtttcggcaaagcattttgatggaatagggaactgcaaatgtatgatgattttgaaaaggctcagcaggatttgttcttaaaccgactcagtgtgtcatccccggttatttagaattacagttaagaaggagaaacttctataagactgtatgaacaaggtgatatcttcatagtgggctattacaggcaggaaaatgttttaactggtttacaaaatccatcaatacttgtgtcattccctgtaaaaggcaggagacatgtgattatgatcaggaaactgcacaaaattattgttttcagcccccgtgttattgtccttttgaactgtttttttttttattaaagccaaatttgtgttgtatatattcgtattccatgtgttagatggaagcatttcctatccagtgtgaataaaaagaacagttgtagtaaattattataaagccgatgatatttcatggcaggttattctaccaagctgtgcttgttggtttttcccatgactgtattgcttttataaatgtacaaatagttactgaaatgacgagacccttgtttgcacagcattaataagaaccttgataagaaccatattctgttgacagccagctcacagtttcttgcctgaagcttggtgcaccctccagtgagacacaagatctctcttttaccaaagttgagaacagagctggtggattaattaatagtcttcgatatctggccatgggtaacctcattgtaactatcatcagaatgggcagagatgatcttgaagtgtcacatacactaaagtccaaacactatgtcagatgggggtaaaatccattaaagaacaggaaaaaataattataagatgataagcaaatgtttcagcccaatgtcaacccagttaaaaaaaaaattaatgctgtgtaaaatggttgaattagtttgcaaactatataaagacatatgcagtaaaaagtctgttaatgcacatcctgtgggaatggagtgttctaaccaattgccttttcttgttatctgagctctcctatattatcatactcagataaccaaattaaaagaattagaatatgatttttaatacacttaacattaaactcttctaactttcttctttctgtgataattcagaagatagttatggatcttcaatgcctctgagtcattgttataaaaaatcagttatcactataccatgctataggagactgggcaaaacctgtacaatgacaaccctggaagttgctttttttaaaaaaataataaatttcttaaatcaactcttttttctggttgtctgtttgttataaagtgcaacgtattcaagtcctcaatatcctgatcataataccatgctataggagactgggcaaaacctgtacaatgacaaccctggaagttgcttttttaaaaaaaataataaatttcttaaatcaa

SEQ ID NO: 2171 - DNA, 1384 bp, Homo sapiens
  source 1..1384: mol_type = unassigned DNA
aggacccgcgaggaagggcccgcggatggcgcgtccctgagggtcgtggcgagttcgcggagcgtgggaaggagcggaccctgctctccccgggctgcgggccatggccacggcggagcggagagccctcggcatcggcttccagtggctctctttggccactctggtgctcatctgcgccgggcaagggggacgcagggaggatgggggtccagcctgctacggcggatttgacctgtacttcattttggacaaatcaggaagtgtgctgcaccactggaatgaaatctattactttgtggaacagttggctcacaaattcatcagcccacagttgagaatgtcctttattgttttctccacccgaggaacaaccttaatgaaactgacagaagacagagaacaaatccgtcaaggcctagaagaactccagaaagttctgccaggaggagacacttacatgcatgaaggatttgaaagggccagtgagcagatttattatgaaaacagacaagggtacaggacagccagcgtcatcattgctttgactgatggagaactccatgaagatctctttttctattcagagagggaggctaataggtctcgagatcttggtgcaattgtttactgtgttggtgtgaaagatttcaatgagacacagctggcccggattgcggacagtaaggatcatgtgtttcccgtgaatgacggctttcaggctctgcaaggcatcatccactcaattttgaagaagtcctgcatcgaaattctagcagctgaaccatccaccatatgtgcaggagagtcatttcaagttgtcgtgagaggaaacggcttccgacatgcccgcaacgtggacagggtcctctgcagcttcaagatcaatgactcggtcacactcaatgagaagcccttttctgtggaagatacttatttactgtgtccagcgcctatcttaaaagaagttggcatgaaagctgcactccaggtcagcatgaacgatggcctctcttttatctccagttctgtcatcatcaccaccacacactgttctgacggttccatcctggccatcgccctgctgatcctgttcctgctcctagccctggctctcctctggtggttctggcccctctgctgcactgtgattatcaaggaggtccctccaccccctgccgaggagagtgaggaaaataaaataaaataacaagaagaagaaagaaagaaatcccacagaaacagataacctaacacagcccgtgcaacgtattttatacaatgctctgaaaatcatagtctcaatctagacagtcttttcctctagttccctgtattcaaatcccagtgtctaacattcaataaatagctatatgaaatcaaa

SEQ ID NO: 2172 - DNA, 2221 bp, Homo sapiens
  source 1..2221: mol_type = unassigned DNA
gaaacagcatcggagcggaaaccagaggggaaaccttgaactcctccagacaattgcttccggggagttgcgagggagcgagggggaataaaggacccgcgaggaagggcccgcggatggcgcgtccctgagggtcgtggcgagttcgcggagcgtgggaaggagcggaccctgctctccccgggctgcgggccatggccacggcggagcggagagccctcggcatcggcttccagtggctctctttggccactctggtgctcatctgcgccgggcaagggggacgcagggaggatgggggtccagcctgctacggcggatttgacctgtacttcattttggacaaatcaggaagtgtgctgcaccactggaatgaaatctattactttgtggaacagttggctcacaaattcatcagcccacagttgagaatgtcctttattgttttctccacccgaggaacaaccttaatgaaactgacagaagacagagaacaaatccgtcaaggcctagaagaactccagaaagttctgccaggaggagacacttacatgcatgaaggatttgaaagggccagtgagcagatttattatgaaaacagacaagggtacaggacagccagcgtcatcattgctttgactgatggagaactccatgaagatctctttttctattcagagagggaggctaataggtctcgagatcttggtgcaattgtttactgtgttggtgtgaaagatttcaatgagacacagctggcccggattgcggacagtaaggatcatgtgtttcccgtgaatgacggctttcaggctctgcaaggcatcatccactcaattttgaagaagtcctgcatcgaaattctagcagctgaaccatccaccatatgtgcaggagagtcatttcaagttgtcgtgagaggaaacggcttccgacatgcccgcaacgtggacagggtcctctgcagcttcaagatcaatgactcggtcacactcaatgagaagcccttttctgtggaagatacttatttactgtgtccagcgcctatcttaaaagaagttggcatgaaagctgcactccaggtcagcatgaacgatggcctctcttttatctccagttctgtcatcatcaccaccacacactgtagcctccacaaaattgcatcaggccccacaacagctgcttgcatggaatagcagagaataccgcctgctccctccggacagcacactcctgaaaacggggagagaggagccaaacatgctcggtttacactttccttatttactgaatgagtggagggcagagacaggcctggagttacgcacactgagtgccccaacatggaaagaaacatcaggagggacaggaaacgttccctccttaaccaacagttttcaagaccttactggaggcactttattggctacataatcactccatgcggtgggcatcaggcagaatcctggtgcagacccaactttgaggtggaggatttcacagtttctttattttgaacttcccccaggctcccactaattcctctccattctatcctcctccctttcccacaaaagaaaacagaaaggagcagcagtgtttgataccgtatcatccagaggcctggttctctcccattatagggcaaacaagccctggcaagatatttcactcccgccccatgccatgcattaaaaatccaaaattgcctatattccacctgccaagcaagagatgctttcattattgaagttccaaatgtatacctttgagaacagtgccttctcgtcttaaaagagaggtcctcattttgtgagttgggagcagagggaattaaagaaagccatgatgcagggatttggccattcaagccgggcagccttcagagaatgtcatccctaatgacacatgcccgaatgaaggagcggggctgagcttgtcctgccttcgtattgaatgttgcctgtctgcctccttaatagcgggcctctgtgtgagcatttgacaagacttaaaactattcattgaagaaaatggatgatcccccaacaggaagatgcaaccccatgggctgcctgcttgaccacagaagtgcttccagctccagttgctcatctgagaactccccccaccacttgctgttaaaattgttaaaattaaaggccatgttgattgattttttaaactttatttccattttttttaataaaataagaattgg

SEQ ID NO: 2173 - DNA, 1732 bp, Homo sapiens
  source 1..1732: mol_type = unassigned DNA
agtcatcttcaactcggcaggaacccacaagtgtgcatgtgtggctcggaggcttcagctggggccccgccctcgtccccaggcgcacactgacacacgcagcccagacccggcccgagcgggctcctgccctcggcgtggcttctctccagccgggagtcccagggccagctagcctcctcccctaaaggggacggcctgtcagcgcagtgccagagtccagcaccgggaggaaagtttcggagtgcggagggagttggggccgccggaggagaagagtctccactcctagtttgttctgccgtcgccgcgtcccagggaccccttgtcccgaagcgcacggcagcgggggggacttcagccctccaggcggggtgggttccaggtccgggtccgaggcgggcgctggaggctcggccccaggccggagaggaactcctttcgcgagctgtcgccgtgggcccgcattgtctgcaggaactctccggaatcgggagggggaggactggatcgcgcttccactgggattcgtcaagagttccggcggcagctgcggcggtggcggagactccctttgtcctctcaggacctccctctctccctccctgtcagctggtgggtcccgctgccgcaggcgccggcgtctcagctgctcgccgccccccaccccagagtgcgtgccgggtgactcccgccacctttgcgaccctcctgagcttaggggactgcgagcgggagggagtctcaggcccccggccgcaggatggtggcggagcggtccccggcccgcagccccgggagctggctgttccccgggctgtggctgttggtgctcagcggtcccggggggctgctgcgcgcccaggagcagccctcctgcagaagagcctttgatctctacttcgtcctggacaagtctgggagtgtggcaaataactggattgaaatttataatttcgtacagcaacttgcggagagatttgtgagccctgaaatgagattatctttcattgtgttttcttctcaagcaactattattttgccattaactggagacagaggcaaaatcagtaaaggcttggaggatttaaaacgtgttagtccagtaggagagacatatatccatgaaggactaaagctagcgaatgaacaaattcagaaagcaggaggcttgaaaacctccagtatcataattgctctgacagatggcaagttggacggtctggtgccatcatatgcagagaaagaggcaaagatatccaggtcacttggggctagtgtttattgtgttggtgtccttgattttgaacaagcacagcttgaaagaattgctgattccaaggagcaagttttccctgtcaaaggtggatttcaggctcttaaaggaataattaattctatactagctcagtcatgtactgaaatcctagaattgcagccctcaagtgtctgtgtgggggaggaatttcagattgtcttaagtggaagaggattcatgctgggcagtcggaatggcagtgttctctgcacttacactgtaaatgaaacatatacaacgagtgtaaaaccagtaagtgtacagcttaattctatgctttgtcctgcacctatcctgaataaagctggagagtggggtctcactgtcacccaggctggagtgaagtggcatgatctgactcactgtacttttggcctttctggctcaggtgatcctcctacttcagcctcctga

SEQ ID NO: 2174 - DNA, 1473 bp, Homo sapiens
  source 1..1473: mol_type = unassigned DNA
aggatggtggcggagcggtccccggcccgcagccccgggagctggctgttccccgggctgtggctgttggtgctcagcggtcccggggggctgctgcgcgcccaggagcagccctcctgcagaagagcctttgatctctacttcgtcctggacaagtctgggagtgtggcaaataactggattgaaatttataatttcgtacagcaacttgcggagagatttgtgagccctgaaatgagattatctttcattgtgttttcttctcaagcaactattattttgccattaactggagacagaggcaaaatcagtaaaggcttggaggatttaaaacgtgttagtccagtaggagagacatatatccatgaaggactaaagctagcgaatgaacaaattcagaaagcaggaggcttgaaaacctccagtatcataattgctctgacagatggcaagttggacggtctggtgccatcatatgcagagaaagaggcaaagatatccaggtcacttggggctagtgtttattgtgttggtgtccttgattttgaacaagcacagcttgaaagaattgctgattccaaggagcaagttttccctgtcaaaggtggatttcaggctcttaaaggaataattaattctatactagctcagtcatgtactgaaatcctagaattgcagccctcaagtgtctgtgtgggggaggaatttcagattgtcttaagtggaagaggattcatgctgggcagtcggaatggcagtgttctctgcacttacactgtaaatgaaacatatacaacgagtgtaaaaccagtaagtgtacagcttaattctatgctttgtcctgcacctatcctgaataaagctggagaaactcttgatgtttcagtgagctttaatggaggaaaatctgtcatttcaggatcattaattgtcacagccacagaatgttctaacgggatcgcagccatcattgttattttggtgttactgctactcctggggatcggtttgatgtggtggttttggcccctttgctgcaaagtggttattaaggatcctccaccaccacccgcccctgcaccaaaagaggaggaagaagaacctttgcctactaaaaagtggccaactgtggatgcttcctattatggtggtcgaggggttggaggaattaaaagaatggaggttcgttggggtgataaaggatctactgaggaaggtgcaaggctagagaaagccaaaaatgctgtggtgaagattcctgaagaaacagaggaacccatcaggcctagaccacctcgacccaaacccacacaccagcctcctcagacaaaatggtacaccccaattaagggtcgtcttgatgctctctgggctttgttgaggcggcagtatgaccgggtttctttgatgcgacctcaggaaggagatgaggtttgtatatgggaatgtattgagaaagagctaactgcttga

SEQ ID NO: 2175 - DNA, 1343 bp, Homo sapiens
  source 1..1343: mol_type = unassigned DNA
cgctgccgcaggcgccggcgtctcagctgctcgccgccccccaccccagagtgcgtgccgggtgactcccgccacctttgcgaccctcctgagcttaggggactgcgagcgggagggagtctcaggcccccggccgcaggatggtggcggagcggtccccggcccgcagccccgggagctggctgttccccgggctgtggctgttggtgctcagcggtcccggggggctgctgcgcgcccaggagcagccctcctgcagaagagcctttgatctctacttcgtcctggacaagtctgggagtgtggcaaataactggattgaaatttataatttcgtacagcaacttgcggagagatttgtgagccctgaaatgagattatctttcattgtgttttcttctcaagcaactattattttgccattaactggagacagaggcaaaatcagtaaaggcttggaggatttaaaacgtgttagtccagtaggagagacatatatccatgaaggactaaagctagcgaatgaacaaattcagaaagcaggaggcttgaaaacctccagtatcataattgctctgacagatggcaagttggacggtctggtgccatcatatgcagagaaagaggcaaagatatccaggtcacttggggctagtgtttattgtgttggtgtccttgattttgaacaagcacagcttgaaagaattgctgattccaaggagcaagttttccctgtcaaaggtggatttcaggctcttaaaggaataattaattcttctaacgggatcgcagccatcattgttattttggtgttactgctactcctggggatcggtttgatgtggtggttttggcccctttgctgcaaagtggttattaaggatcctccaccaccacccgcccctgcaccaaaagaggaggaagaagaacctttgcctactaaaaagtggccaactgtggatgcttcctattatggtggtcgaggggttggaggaattaaaagaatggaggttcgttggggtgataaaggatctactgaggaaggtgcaaggctagagaaagccaaaaatgctgtggtgaagattcctgaagaaacagaggaacccatcaggcctagaccacctcgacccaaacccacacaccagcctcctcagacaaaatggtacaccccaattaagggtcgtcttgatgctctctgggctttgttgaggcggcagtatgaccgggtttctttgatgcgacctcaggaaggagatgaggtttgtatatgggaatgtattgagaaagagctaactgcttgagtcagtataatggaggcagggaaatagtaataaaaaatgatt

SEQ ID NO: 2176 - DNA, 8273 bp, Homo sapiens
  source 1..8273: mol_type = unassigned DNA
tttcggagtgcggagggagttggggccgccggaggagaagagtctccactcctagtttgttctgccgtcgccgcgtcccagggaccccttgtcccgaagcgcacggcagcgggggggacttcagccctccaggcggggtgggttccaggtccgggtccgaggcgggcgctggaggctcggccccaggccggagaggaactcctttcgcgagctgtcgccgtgggcccgcattgtctgcaggaactctccggaatcgggagggggaggactggatcgcgcttccactgggattcgtcaagagttccggcggcagctgcggcggtggcggagactccctttgtcctctcaggacctccctctctccctccctgtcagctggtgggtcccgctgccgcaggcgccggcgtctcagctgctcgccgccccccaccccagagtgcgtgccgggtgactcccgccacctttgcgaccctcctgagcttaggggactgcgagcgggagggagtctcaggcccccggccgcaggatggtggcggagcggtccccggcccgcagccccgggagctggctgttccccgggctgtggctgttggtgctcagcggtcccggggggctgctgcgcgcccaggagcagccctcctgcagaagagcctttgatctctacttcgtcctggacaagtctgggagtgtggcaaataactggattgaaatttataatttcgtacagcaacttgcggagagatttgtgagccctgaaatgagattatctttcattgtgttttcttctcaagcaactattattttgccattaactggagacagaggcaaaatcagtaaaggcttggaggatttaaaacgtgttagtccagtaggagagacatatatccatgaaggactaaagctagcgaatgaacaaattcagaaagcaggaggcttgaaaacctccagtatcataattgctctgacagatggcaagttggacggtctggtgccatcatatgcagagaaagaggcaaagatatccaggtcacttggggctagtgtttattgtgttggtgtccttgattttgaacaagcacagcttgaaagaattgctgattccaaggagcaagttttccctgtcaaaggtggatttcaggctcttaaaggaataattaattctatactagctcagtcatgtactgaaatcctagaattgcagccctcaagtgtctgtgtgggggaggaatttcagattgtcttaagtggaagaggattcatgctgggcagtcggaatggcagtgttctctgcacttacactgtaaatgaaacatatacaacgagtgtaaaaccagtaagtgtacagcttaattctatgctttgtcctgcacctatcctgaataaagctggagaaactcttgatgtttcagtgagctttaatggaggaaaatctgtcatttcaggatcattaattgtcacagccacagaatgttctaacgggatcgcagccatcattgttattttggtgttactgctactcctggggatcggtttgatgtggtggttttggcccctttgctgcaaagtggttattaaggatcctccaccaccacccgcccctgcaccaaaagaggaggaagaagaacctttgcctactaaaaagtggccaactgtggatgcttcctattatggtggtcgaggggttggaggaattaaaagaatggaggttcgttggggtgataaaggatctactgaggaaggtgcaaggctagagaaagccaaaaatgctgtggtgaagattcctgaagaaacagaggaacccatcaggcctagaccacctcgacccaaacccacacaccagcctcctcagacaaaatggtacaccccaattaagggtcgtcttgatgctctctgggctttgttgaggcggcagtatgaccgggtttctttgatgcgacctcaggaaggagatgagggccggtgcataaacttctcccgagttccatctcagtaaaagggaagcaggaagaccaagaaggtacgaagatggcacattttcacatagctgattttcaaccaaatgaaaaaaatcaagtgcatttcagaagcttttggaagagcagcttaattcctctcagtcgggaaatgttttctctgccttctgctttgcttgcaccaaacatttctaaacacttgttctgccatctacatgggaggtgatgaaactcagtggtaactcatgatttatgacattgaaaataaagaggaacattgacctgcagactatggtttgtacaagaaagtttgtttgaatgtgtagaagaggaaaaagcaacaacagcaacaacacgaagatgataccaaaacaaggaccacaaaacaactagccatgatgggagacaggagttttttacatggaaacatggcacttgtgtttttatgtggcaagatctttatccataggcagagtatgaaatttcccaccaggctaagcaaataaagaagtccattgccttatagctatgtcagatcacagaatccttccaagtgctctatcacagtgtgccttatgggaagtttctgactggaaaatcttgtcattctaacactgaaaagtgcacacgcatgacaaaatgtagacaagatgcctcaaggtattggtagcaagcaagattttgccctttagttttcgaagacacctttctttcattatgcactcgggacaagaaaattaatagagcgttattccacagaaggcctctagccagagatcttgagtgtagtgcaagggactcattttttgcgaacttgtccctgtgactagtagattcccccttttcctgtgtttaggatttagtagtgcataaagcattaatatccataaacatacctagaagtttgttttgcttttaatttaaaggaagcagtaaccacaaagcttccgctcagggttttttctttcttcaagtctccaagggctcttcagcgtcacaagccagcaactctctttgcattaaaatttcaaagtttaattaatataattaaaagcaacagcaagcagcagcctgtgaagattttgctcatcttttttatgccttttgacattgaatgacctattactgtatgcgcattacttggattttgaggggcactctaccttggttatgattcagtagaggaaaaagaccacctttcttcaatttacaaattaaatcttctggagggtcgctatcacaaaacattgacgatgtatgtattataattttttagaaaaaccaccatcgtgtcacgtcgacgatgccaaattatgttagcgtgagcagaaacaccgtgggggaggaaggcagcagctgaagaaaaaagctcaaatgatctagtcactttcgatactgtacttcagatgcgaaatggatattcgagtggaaacctgacaaagtgcgcctgctttgatgtgaactggtatagacaatgaccagtggctgggtcagtgggatgtctctctgtgagcacaaaggcttatcaaatgacactaaaaataagttcaacaaccatcacattggaagggagaaggcgaacatttcatgtttggcgggcatgtgagtgcacaagatggaaagagcgattggagcatcctggtataattacccccattgtgctcttaatggaaatttcaaaggacgggagtattctgttggttggtgtccaggtttgtggcactgttccaagaggccttacacacacacacaaatatataattttctatacatatatatcctctagcttgaaacttttgctcaagtttatttatgtcactggctggctggatccaaagtcatgtgtccacacattcataaataaaaattttacctatgcctgtgctaccatttctttaagcccacataaagctaatgccttcttgggttgaatatgcagttgttatgcttagtttcagggatggaattctattcagttccaaaatgtccctcatgttcacagatgatactattggcagtagctgcatatgcaagtgtaacttggaagcctgatatagtatacccaaccctttctgcaatgagttattgtatccctttgttctgcatttgcatctggaacaagacctaatgtggcttccttaaatgggcacttcatttctgatgagtgcacaccaattattgctattttaatatcattgagaatactacagaagctaaggctatgtttctttggtaactacttcaaatttctctagaattatgtagcatacttacattttgctgcatgaacaatgaaaattaacctctgcctttaaatggaaaaataactttctgtagattgttatacagctactatgaagagctcttaatgaagaggaagtggcagtggtctatatgtagactgaaaaaatatcattaataaagttcaaagactgatggaatttcattgcccttaaagatatgaaccagatctgttttatgcttttctccaattatactaactagcagttgaaaagaatttgttttgaagagtgttattttcttaccaaaagaccagatcaaaaatccctatacttttccaccaaaaaaagattaaaatgaagccatttctataaatttaatggcactttatattttatatagagaaatagcttctgtttgattttctggacaccatgtcagtcaagatctactttctgtgtaaaaatgaataagtcttgcacataatccattcgtgttgcataaggttgcaaaaacaattaagtgggaaatgactcctaacttatgtgtctactctgcctagaaagaaagttttgaaggcatctatatatatttcataacaatgtctgttctttatggatttgatccataaatatttatctatctgaaaactttgatacttggaatgttttccttagagcatttggtgctccaagaaaaaacatttggtgctaagagttgcagcactgatgcctttccctaagttaattctattttaaaaatttatatttccttcccaatgagatgcagagtaaaatttgagaccctccattgactagggagcagcatctgtcatctatggttaattactattttgacaaaaatatagaaggtttaaacccccatgtatttcagattgttagagaaagaagtagtttgcttatatttcccttgaactttattctaaccatttaaataataaattattcaatatttgttataataaatccttactagatacaagatttgggtgtttctgtgaagttaactttattatctaaatatcactaaccattgtttactgctcagaggcagatacatttgtttagtttaaagttgaaacaaattctatattgtggataattaggtgtttaaaacattttgatagaccagcttatatatgttatttttgaaatttaagaaggcagaatgtaattaggtcacatttacaagtagaaggaattataacttcctactccatgcatatattgtatattggttagcttttactagcattttctagcatcacattactttagaaagtttttgagagtttcattactactggaaaagtttggtgggtatatgtacacaggaaagaaatatatgcatcatttcaatatgaaaggaaatacataatctagaaacatagaataactcttggtacatctgttacatagttaaggaaagaaacaggcaggtgaggctggagaatgttgtctatttgtaggaaataaagtcagtgcagacgcatattctagtttagagttagattaatattgtgcttagtgaatttctatgacatatttctgagaacactttaatatatttccacacctactggaatctaattcagtcgatcggataaaagaaagacttttttgttgttgtttttgaaaatccataatgtagcaggttctgcgctggttttttaatgtattttatttttgtgctctcctgccaaaagaaaaggctgataagtaagtacacagtacaacatgtaaatttgtataaaaatatgcttgtttagattgctctacaataactatattaaggtaaattgtgtgtgtgtgtgtgagagagagagagagagagagaaacagagggagaattgactcaatgtgttttctatgaagagtcttagcttaggaatcaggtaacagagaggtcctagaccatagacccagccatcaactagcttgctgatgttgaacagatcaactctcaaccatagactgaagatggaatgaagatatcaaaagttccttttagcactgactagattttttttcttttttttgaaacagagtctcactctgtcacccaggctggagttcaatggcatggtctgggctgactgtaacctcctcttcctgggttcaagtgattctcatccctcagcctcctgagtagctgggattacaggcacataacaccacacccagctaactcttgtatttttgtagaaatggggtttcgctatgttgctcagactggtctcaaacacctggcctcaagtgatcctcctgcctcagtctcccaaatgctgtgattacaggcacaagctactgcaccaggcctctgactacatttctattaatatggttaggttggaggttttagtatttttgtatctcatatttgtatcaatatgactggcttctttgtctgtagtgtgtggtaatattagttctgtaaactgtcagttgcaaaaaaaaaaaataccttgaactatagtatatgttgataattagccataataatttcttagttaatttcttataattaaatttgtcaaagaggaaacttacagtttatatctgatgaaatctctaaaaagatgggtaaaacattgggaaatgtatgcatgtacttcactctggtttcatagggttagcaagtgtcttaaaaacatatataaagaagcacagagattgttaggagatatttatgctcccagttttaataattgggatactttgtataccacagaaagaaaaattactaaactcctctttttttagtcaaaattggaaaaaaagtcttaattgacagttactatgcctgtgctacccatagcaagtattcagtggaaaatactttactaagtaagtaatttgaacacagcttaaaatccatagtatgttacaattgctagcctttcacaaagtttgcattgtcttaatgtagaaggatactgtgatctaagaattcacaattttaaaaagtggaacctaaatagggtttcctaattgccatgaagttatttgtatcttagatgaattatatttacaacattgtaaatgtcagtgggtgatccaaaataaattgttaaagttattaaaatgtacatttaagtaggtttcagtttgactagaaataattggcaagaaggcaagaactagtcttctagagcagggatcccatcccccaggtcatggactggtactggtccatggcctgttagaaaccaggccacacagcaggagatgagtggaaagcaagtgaaacttcatgggtatttacagcaattccccgtcgctcgcattaccacctgagctgtgtctcctgtgagatcagcagcagcattagattctcaaggagcacaaacccttttggaactgtgtgtgagggatctaagttgcgcatttcttatgagaatctaatacctgatgatctgttgttgtctcccaccacccccagatgggaccatctagttgcaggaaaacaagctcaggctcccactgattctacattatagtgagttgtgtaattatttcattatatataacaatgtaataataatagaaataaagtacataataaatgtaatccacttgaattatcctgaaaccatccccaccccccaccccccggtctgtggaaaaattggcttccacgaaactggtccgtggtgccaaaaatattgggtatggttgttctagggtgtagactatgaaaaagatatgcattgtctccatgaactaaaaggcaaggtgattttaaacaatttagatgccaaacaaagaaaccaaaagcttccaaagtaataaatgatagagaaaggaaattgttacatcatgtgccaaattagaagcaaatctaaacttcttatcatgtactccaccatctgatttgtataagtaattggggaaagaaaaactcacaatataaaacaagattgactagttctagcagatgacacctgtaaatagaatttttactagttgaaattctgatgtgaaatgaagccattattattatcacaataaagtgttctttttagttctttttttaata

SEQ ID NO: 2177 - DNA, 3963 bp, Homo sapiens
  source 1..3963: mol_type = unassigned DNA
cacttaaggagctcgggccagcgcgagggggagcagggaggaagcccggctgctgcggacctcctcggacccggacccagccccagcccggccccagccagccccgacggcgccatgcggggtccgagcggggctctgtggctgctcctggctctgcgcaccgtgctcggtggcatggaggtgcggtggtgcgccacctcggacccagagcagcacaagtgcggcaacatgagcgaggccttccgggaagcgggcatccagccctccctcctctgcgtccggggcacctccgccgaccactgcgtccagctcatcgcggcccaggaggctgacgccatcactctggatggaggagccatctatgaggcgggaaaggagcacggcctgaagccggtggtgggcgaagtgtacgatcaagaggtcggtacctcctattacgccgtggctgtggtcaggaggagctcccatgtgaccattgacaccctgaaaggcgtgaagtcctgccacacgggcatcaatcgcacagtgggctggaacgtgcccgtgggctacctggtggagagcggccgcctctcggtgatgggctgcgatgtactcaaagctgtcagcgactattttgggggcagctgcgtcccgggggcaggagagaccagttactctgagtccctctgtcgcctctgcaggggtgacagctctggggaaggggtgtgtgacaagagccccctggagagatactacgactacagcggggccttccggtgcctggcggaaggggcaggggacgtggcttttgtgaagcacagcacggtactggagaacacggatgggaagacgcttccctcctggggccaggccctgctgtcacaggacttcgagctgctgtgccgggatggtagccgggccgatgtcaccgagtggaggcagtgccatctggcccgggtgcctgctcacgccgtggtggtccgggccgacacagatgggggcctcatcttccggctgctcaacgaaggccagcgtctgttcagccacgagggcagcagcttccagatgttcagctctgaggcctatggccagaaggatctactcttcaaagactctacctcggagcttgtgcccatcgccacacagacctatgaggcgtggctgggccatgagtacctgcacgccatgaagggtctgctctgtgaccccaaccggctgcccccctacctgcgctggtgtgtgctctccactcccgagatccagaagtgtggagacatggccgtggccttccgccggcagcggctcaagccagagatccagtgcgtgtcagccaagtccccccaacactgcatggagcggatccaggctgagcaggtcgacgctgtgaccctgagtggcgaggacatttacacggcggggaagacgtacggcctggttcccgcagccggggagcactatgccccggaagacagcagcaactcgtactacgtggtggccgtggtgagacgggacagctcccacgccttcaccttggatgagcttcggggcaagcgctcctgccacgccggtttcggcagccctgcaggctgggatgtccccgtgggtgcccttattcagagaggcttcatccggcccaaggactgtgacgtcctcacagcagtgagcgagttcttcaatgccagctgcgtgcccgtgaacaaccccaagaactacccctcctcgctgtgtgcactgtgcgtgggggacgagcagggccgcaacaagtgtgtgggcaacagccaggagcggtattacggctaccgcggcgccttcaggtgcctggtggagaatgcgggtgacgttgccttcgtcaggcacacaaccgtctttgacaacacaaacggccacaattccgagccctgggctgctgagctcaggtcagaggactatgaactgctgtgccccaacggggcccgagccgaggtgtcccagtttgcagcctgcaacctggcacagataccaccccacgccgtgatggtccggcccgacaccaacatcttcaccgtgtatggactgctggacaaggcccaggacctgtttggagacgaccacaataagaacgggttcaaaatgttcgactcctccaactatcatggccaagacctgcttttcaaggatgccaccgtccgggcggtgcctgtcggagagaaaaccacctaccgcggctggctggggctggactacgtggcggcgctggaagggatgtcgtctcagcagtgctcgggcgcagcggccccggcgcccggggcgcccctgctcccgctgctgctgcccgccctcgccgcccgcctgctcccgcccgccctctgagcccggccgccccgccccagagctccgatgcccgcccggggagtttccgcggcggcttcgcgctggaatccagaaggaagctcgcgaaggccgggcccggcgtgggcgggagcaggcgcctccccgggagccccgccgcccacgggcgccacctggcgctgctacctgaggcgccgcccccgggcccgcgcggcccttcccgccaaccgccgcctcccgccacctggagccgcgcgggccgcgccggaggaggccggttgcccaggaaaccgctgagtccgggcttcccgccgcccgccccgcggtgtcgcccgaggggcccgcccgcctcctccccgcagccccgcgcccccgtccgcgaggccccctggggacgcggtggccgccgaggcgcctacacccgcaggccgcggccaggccgtcccaggaggccccggcgccaacgggacccggcgcgtgggacagcggcctctgctggcggcggcgggagggaggccggaccggggcgacggggagaagccttcgcccgcgggaccgtgtccggggtgggggctccagttcctccgaccgcccgtgcgctgggagggaggccgagcccggggaacgccgcgtgccctgcctcgtcccccactgtggccgcgccagctccatcccgggccagccgcgtccacgggccccctcccgagtctcctcaggctctcgcctcccctacccccgtgggatgcccaccgcccgcacccacgcccgagcctggcggcagcagccgccccccgcctgaagggagccggaggtgacccaggccgcgggctcccgaggcccctgaagggctgcgcgtggggacccgccatgcttctgggttccgaacgggggtgagctccgtctcctcacccggccccgcacccgctgggcctggggacccctcactccccgtgcccgcccctccgcgaggcagcagaaagcgcccggccggggcctctctctactccatcttgccacagttgtctgagaagccagaaaaagtttccagaactggcagcccttaaaaaaaatgaagaggaagagaagaaatgggagcaggcagccctcgtcagcagaccgggagccgcgtgggcgcggagccatttgcattccggtctgcgggggctcggggatgctggtgacaggcccggttcccggtggctcgcccccacctgcgggcgtcgggaaggatcccttccatctctcagccgcagaggaggccctggcagcgccccggctgtagccatgcaaccccgaggagtcccgggcaccttcaccccaccgggaggggccacaaggacctgggcctcggccaccaagctttgtcccctctcgctgtggggggctagtgattctcctccgacctgacgattgcttggttttttcaaaagggagttttgtgcggtgagaagtgtgtttctgtgtggctaactctgggctagcgtgccgtggccattgaaggtgtggcctgcgtgggtgcagtgtaagtgacgctggattgtcaggtggcagcaggggacccctgctgtgtcagtgctaatgaaacatgttggttggtttctaaaataaagccaaacaagccagcacatgcagaggcttggaccctgatagaaa

SEQ ID NO: 2178 - DNA, 1650 bp, Homo sapiens
  source 1..1650: mol_type = unassigned DNA
agggggagcagggaggaagcccggctgctgcggacctcctcggacccggacccagccccagcccggccccagccagccccgacggcgccatgcggggtccgagcggggctctgtggctgctcctggctctgcgcaccgtgctcggtggcatggaggtgcggtggtgcgccacctcggacccagagcagcacaagtgcggcaacatgagcgaggccttccgggaagcgggcatccagccctccctcctctgcgtccggggcacctccgccgaccactgcgtccagctcatcgcggcccaggaggctgacgccatcactctggatggaggagccatctatgaggcgggaaaggagcacggcctgaagccggtggtgggcgaagtgtacgatcaagaggtcggtacctcctattacgccgtggctgtggtcaggaggagctcccatgtgaccattgacaccctgaaaggcgtgaagtcctgccacacgggcatcaatcgcacagtgggctggaacgtgcccgtgggctacctggtggagagcggccgcctctcggtgatgggctgcgatgtactcaaagctgtcagcgactattttgggggcagctgcgtcccgggggcaggagagaccagttactctgagtccctctgtcgcctctgcaggggtgacagctctggggaaggggtgtgtgacaagagccccctggagagatactacgactacagcggggccttccggtgcctggcggaaggggcaggggacgtggcttttgtgaagcacagcacggtactggagaacacggatgaaagtccatcacgaaggcaaacatggaccagatctgaggaggaagaaggcgagtgccctgcacacgaggaagcacgtaggacgatgcgctctagtgctgggcaagcctggaaatgggctcccgttcacaggccccaggacgagtctgacaaaggagaatttggaaaacgggcaaagagtagggatatgttgggttaagaatcagctctttcaaacttggggttttttttgagatgggggtctcaccatgttgcccaggctggtctcaaacccccagcctcaactgatcctcgcatctcagcctcctgagtagctgggatgacaggcgtgcacctggcagctttttcaaagtgttgatggtaatctgaggcaatctaagggagtcattttttaagtgactttatacagaaagattggtaagagccaaggggtagaagtggcataaatgtctaaagcagggaagtgacaggactttcattgttcttggctgaggagaagcgggagtggctgatggaagcacctaaatgatgcctttgtctgtgggaaggcaaatgatgccccagagctctaaccaaaggttttgcagccgccgaaaaacaggaaagttgggaagcgggggtaggactacactgaatcattaacagtgctgtaaactaccatgtggccattaacaatgacctttagggagttttcctaaacgatcactctggtgcgggtgtttggttttgttttaaaatagctttgcagtgaaagctttcatgaccatacaaattatcttttttcttcctatttccttgtagaggtttttttcctccttgtcttaaggtcataaaaatattgttatgtggga

SEQ ID NO: 2179 - DNA, 2018 bp, Homo sapiens
  source 1..2018: mol_type = unassigned DNA
gcatgttgacacatcaggcccagctctatcactggggagggagataggctgccagggacagaaagggctctttgagaaggccactctgcctggagtgggggcgccgggcactgtcccccaaggtcgcggcagaggagataggggtctgtcctgcacaaacaccccaccttccactcggctcacttaaggcaggcagcccagcccctggcagcacccacgatgcgggacctgcctctcaccagcctggccctagtgctgtctgccctgggggctctgctggggactgaggccctcagagcagaggagccagctgtgggcaccagtggcctcatcttccgagaagacttggactggcctccaggcagcccacaagagcctctgtgcctggtggcactgggcggggacagcaatggcagcagctcccccctgcgggtggtgggggctctaagcgcctatgagcaggccttcctgggggccgtgcagagggcccgctggggcccccgagacctggccaccttcggggtctgcaacaccggtgacaggcaggctgccttgccctctctacggcggctgggggcctggctgcgggaccctggggggcagcgcctggtggtcctacacctggaggaagtgacctgggagccaacaccctcgctgaggttccaggagcccccgcctggaggagctggccccccagagctggcgctgctggtgctgtaccctgggcctggccctgaggtcactgtgacgagggctgggctgccgggtgcccagagcctctgcccctcccgagacacccgctacctggtgttagcggtggaccgccctgcgggggcctggcgcggctccgggctggccttgaccctgcagccccgcggagaggactcccggctgagtaccgcccggctgcaggcactgctgttcggcgacgaccaccgctgcttcacacggatgaccccggccctgctcctgctgccgcggtccgagcccgcgccgctgcctgcgcacggccagctggacaccgtgcccttcccgccgcccaggccatccgcggaactcgaggagtcgccacccagcgcagaccccttcctggagacgctcacgcgcctggtgcgggcgctgcgggtccccccggcccgggcctccgcgccgcgcctggccctggatccggacgcgctggccggcttcccgcagggcctagtcaacctgtcggaccccgcggcgctggagcgcctactcgacggcgaggagccgctgctgctgctgctgaggcccactgcggccaccaccggggatcctgcgcccctgcacgaccccacgtcggcgccgtgggccacggccctggcgcgccgcgtggctgctgaactgcaagcggcggctgccgagctgcgaagcctcccgggtctgcctccggccacagccccgctgctggcgcgcctgctcgcgctctgcccaggtggccccggcggcctcggcgatcccctgcgagcgctgctgctcctgaaggcgctgcagggcctgcgcgtggagtggcgcgggcgggatccgcgcgggccgggtcgggcacagcgcagcgcgggggccaccgccgccgacgggccgtgcgcgctgcgcgagctcagcgtagacctccgcgccgagcgctccgtactcatccccgagacctaccaggccaacaattgccagggcgtgtgcggctggcctcagtccgaccgcaacccgcgctacggcaaccacgtggtgctgctgctgaagatgcaggtccgtggggccgccctggcgcgcccaccctgctgcgtgcccaccgcctacgcgggcaagctgctcatcagcctgtcggaggagcgcatcagcgcgcaccacgtgcccaacatggtggccaccgagtgtggctgccggtgacccctgcgccgcgcggactcctgccccgagggtccggacgcgccccagctcgcgccccttcccatatttattcggaccccaagcatcgccccaataaagaccagcaagcaaccggc

SEQ ID NO: 2180 - DNA, 1437 bp, Homo sapiens
  source 1..1437: mol_type = unassigned DNA
atgctagggtctttggggctttgggcattacttcccacagctgtggaagcacccccaaacaggcgaacctgtgtgttctttgaggcccctggagtgcggggaagcacaaagacactgggagagctgctagatacaggcacagagctccccagagctatccgctgcctctacagccgctgctgctttgggatctggaacctgacccaagaccgggcacaggtggaaatgcaaggatgccgagacagtgatgagccaggctgtgagtccctccactgtgacccaagtccccgagcccaccccagccctggctccactctcttcacctgctcctgtggcactgacttctgcaatgccaattacagccatctgcctcctccagggagccctgggactcctggctcccagggtccccaggctgccccaggtgagtccatctggatggcactggtgctgctggggctgttcctcctcctcctgctgctgctgggcagcatcatcttggccctgctacagcgaaagaactacagagtgcgaggtgagccagtgccagagccaaggccagactcaggcagggactggagtgtggagctgcaggagctgcctgagctgtgtttctcccaggtaatccgggaaggaggtcatgcagtggtttgggccgggcagctgcaaggaaaactggttgccatcaaggccttcccaccgaggtctgtggctcagttccaagctgagagagcattgtacgaacttccaggcctacagcacgaccacattgtccgatttatcactgccagccgggggggtcctggccgcctgctctctgggcccctgctggtactggaactgcatcccaagggctccctgtgccactacttgacccagtacaccagtgactggggaagttccctgcggatggcactgtccctggcccagggcctggcatttctccatgaggagcgctggcagaatggccaatataaaccaggtattgcccaccgagatctgagcagccagaatgtgctcattcgggaagatggatcgtgtgccattggagacctgggccttgccttggtgctccctggcctcactcagccccctgcctggacccctactcaaccacaaggcccagctgccatcatggaagaccctgatgggctgagggagctcctagaagactgttgggatgcagacccagaagcacggctgacagctgagtgtgtacagcagcgcctggctgccttggcccatcctcaagagagccacccctttccagagagctgtccacgtggctgcccacctctctgcccagaagactgtacttcaattcctgcccctaccatcctcccctgtaggcctcagcggagtgcctgccacttcagcgttcagcaaggcccttgttccaggaatcctcagcctgcctgtaccctttctcctgtgtaa

SEQ ID NO: 2181 - DNA, 1787 bp, Homo sapiens
  source 1..1787: mol_type = unassigned DNA
aagatttggccaggggcagctgtgctggcttatgctcttctccttctgctgctgccatcctccagcaagatgctagggtctttggggctttgggcattacttcccacagctgtggaagcacccccaaacaggcgaacctgtgtgttctttgaggcccctggagtgcggggaagcacaaagacactgggagagctgctagatacaggcacagagctccccagagctatccgctgcctctacagccgctgctgctttgggatctggaacctgacccaagaccgggcacaggtggaaatgcaaggatgccgagacagtgatgagccaggctgtgagtccctccactgtgacccaagtccccgagcccaccccagccctggctccactctcttcacctgctcctgtggcactgacttctgcaatgccaattacagccatctgcctcctccagggagccctgggactcctggctcccagggtccccaggctgccccaggtgagtccatctggatggcactggtgctgctggggctgttcctcctcctcctgctgctgctgggcagcatcatcttggccctgctacagcgaaagaactacagagtgcgaggtgagccagtgccagagccaaggccagactcaggcagggactggagtgtggagctgcaggagctgcctgagctgtgtttctcccaggtaatccgggaaggaggtcatgcagtggtttgggccgggcagctgcaaggaaaactggttgccatcaaggccttcccaccgaggtctgtggctcagttccaagctgagagagcattgtacgaacttccaggcctacagcacgaccacattgtccgatttatcactgccagccgggggggtcctggccgcctgctctctgggcccctgctggtactggaactgcatcccaagggctccctgtgccactacttgacccagtacaccagtgactggggaagttccctgcggatggcactgtccctggcccagggcctggcatttctccatgaggagcgctggcagaatggccaatataaaccaggtattgcccaccgagatctgagcagccagaatgtgctcattcgggaagatggatcgtgtgccattggagacctgggccttgccttggtgctccctggcctcactcagccccctgcctggacccctactcaaccacaaggcccagctgccatcatggaagctggcacccagaggtacatggcaccagagctcttggacaagactctggacctacaggattggggcatggccctccgacgagctgatatttactctttggctctgctcctgtgggagatactgagccgctgcccagatttgaggcctgcagtccaccacccttccaactggcctatgaggcagaactgggcaatacccctacctctgatgagctatgggccttggcagtgcaggagaggaggcgtccctacatcccatccacctggcgctgctttgccacagaccctgatgggctgagggagctcctagaagactgttgggatgcagacccagaagcacggctgacagctgagtgtgtacagcagcgcctggctgccttggcccatcctcaagagagccacccctttccagagagctgtccacgtggctgcccacctctctgcccagaagactgtacttcaattcctgcccctaccatcctcccctgtaggcctcagcggagtgcctgccacttcagcgttcagcaaggcccttgttccaggaatcctcagcctgcctgtaccctttctcctgtgtaa

SEQ ID NO: 2182 - DNA, 1863 bp, Homo sapiens
  source 1..1863: mol_type = unassigned DNA
gtatctgaagaaagatttggccaggggcagctgtgctggcttatgctcttctccttctgctgctgccatcctccagcaagatgctagggtctttggggctttgggcattacttcccacagctgtggaagcacccccaaacaggcgaacctgtgtgttctttgaggcccctggagtgcggggaagcacaaagacactgggagagctgctagatacaggcacagagctccccagagctatccgctgcctctacagccgctgctgctttgggatctggaacctgacccaagaccgggcacaggtggaaatgcaaggatgccgagacagtgatgagccaggctgtgagtccctccactgtgacccaagtccccgagcccaccccagccctggctccactctcttcacctgctcctgtggcactgacttctgcaatgccaattacagccatctgcctcctccagggagccctgggactcctggctcccagggtccccaggctgccccaggtgagtccatctggatggcactggtgctgctggggctgttcctcctcctcctgctgctgctgggcagcatcatcttggccctgctacagcgaaagaactacagagtgcgaggtgagccagtgccagagccaaggccagactcaggcagggactggagtgtggagctgcaggagctgcctgagctgtgtttctcccaggtaatccgggaaggaggtcatgcagtggtttgggccgggcagctgcaaggaaaactggttgccatcaaggccttcccaccgaggtctgtggctcagttccaagctgagagagcattgtacgaacttccaggcctacagcacgaccacattgtccgatttatcactgccagccgggggggtcctggccgcctgctctctgggcccctgctggtactggaactgcatcccaagggctccctgtgccactacttgacccagtacaccagtgactggggaagttccctgcggatggcactgtccctggcccagggcctggcatttctccatgaggagcgctggcagaatggccaatataaaccaggtattgcccaccgagatctgagcagccagaatgtgctcattcgggaagatggatcgtgtgccattggagacctgggccttgccttggtgctccctggcctcactcagccccctgcctggacccctactcaaccacaaggcccagctgccatcatggaagctggcacccagaggtacatggcaccagagctcttggacaagactctggacctacaggattggggcatggccctccgacgagctgatatttactctttggctctgctcctgtgggagatactgagccgctgcccagatttgaggcctgacagcagtccaccacccttccaactggcctatgaggcagaactgggcaatacccctacctctgatgagctatgggccttggcagtgcaggagaggaggcgtccctacatcccatccacctggcgctgctttgccacagaccctgatgggctgagggagctcctagaagactgttgggatgcagacccagaagcacggctgacagctgagtgtgtacagcagcgcctggctgccttggcccatcctcaagagagccacccctttccagagagctgtccacgtggctgcccacctctctgcccagaagactgtacttcaattcctgcccctaccatcctcccctgtaggcctcagcggagtgcctgccacttcagcgttcagcaaggcccttgttccaggaatcctcagcctgcctgtaccctttctcctgtgtaaatatgcagtttatgtgtcatcaatgtacatgccaacataaatatggcgattgtatagctgt

SEQ ID NO: 2183 - DNA, 4721 bp, Homo sapiens
  source 1..4721: mol_type = unassigned DNA
atcaccgagggcgggcgcctcagcccgggaggacactccccagggtaaactacaggcctcacaaagcggagggagctggacgcgaaggctcggcagcggcgccgacaggcttaccccaggcccactctaggccgcacagggttcgcgccacctccggcccaggacagctctcagacgctgccagcgtggagctcgacccggctcacaatgcgctgggccccgcagcgtgagcgcaggcgcccgagaggcggcgggggtcgggcggacggcgcgctccagccgagccgcctccctctctcggcccacacccgcgcggccgcccttcgcctgccggggagctgcgggtggctggagggcgggaagcgaccggccagtctgcacctgcatgacccggtcgcgcgccgacccctcccctctctctcccgggctcagtcctccttcctcttccgtccccctcccttttctccgggctgcaaccgggttccgccccgctcgcgcggctgcccggccagctgtgatgtcaccaggccacgccccctaatataaatactggcgtcgctggcgccgccttctcacactttcaggctctgatcgcggccgcagtttttccttttttcttctgccgtcgccttctctgcctcttctcatcctttctcgctctgctgctctgcagtgtgacgagtccgaatcctcttcccacccagcccgcgcctttcttcttttgcctgcgctgttctatttctccttcggccgccgccgccactgctgcacacagctggtgtcggtgccgcgcttttacccccaagtcgttcccgcagcctatggcccaggccgccttgggtatttctgctcaaggtaaccacatccctctttaaaaattccgccgaaaaagagaagacgctttacccgactctttgggccgttatctcacggcgaactttctgaccaagtatacaactacccagagggcctaggagaagtgctgtatagagagcagttcgacttcaacgctgagccaccttgggaacctagctgatgataggggggttccatctcccaacttgtccattttgttgcatattctaaggacccagacataggcttggtggcccgtctcttgtctttcctggtttatgactttcggctttgtggaatacggctgagatgaaaggatttattgatgatgcaaactactccgttggcctgttggatgaaggaacaaaccttggaaatgttattgataactatgtttatgaacataccctgacagggaaaaatgcattttttgtgggagatcttggaaagattgtgaagaaacacagtcaatggcagaatgtagtggctcagataaagccattctacacagtgaagtgcaactctgctccagctgtacttgagattttggcagctcttggaaccggatttgcttgttccagtaaaaatgaaatggctttagtgcaagagttgggtgtacctccagaaaacattatttacataagtccttgcaagcaagtgtctcagataaagtatgcagcaaaagttggagtgaatatcctgacatgtgacaatgaaattgaattgaagaaaattgcacgtaatcacccaaatgccaaggtcttactacatattgcaacagaagataatattggaggtgaagagggtaacatgaagtttggcactaccctgaagaactgtaggcatctcttggaatgtgctaaggaacttgatgtccaaataattggggttaaatttcatgtttcgagtgcttgcaaagaatctcaagtatatgtacatgctctatctgatgctcgatgtgtgtttgacatggctggagaaattggctttacgatgaacatgttagacattggtggaggattcacgggaactgaatttcaattggaagaggttaatcatgttatcagccctctgttggatatctactttcctgaaggatctggtgttaagataatttcagaacccggaagctactatgtgtcttctgcatttacactcgcagttaatatcatagcaaagaaagttgttgaaaatgataaatttccctctggagtagaaaaaaccggaagtgatgaaccagccttcatgtattatatgaatgatggtgtttatggttcttttgcaagtaaactgtctgaggacttaaataccattccagaggttcacaagaaatacaaggaagatgagcctctgtttacaagcagcctttggggtccatcctgtgatgagcttgatcaaattgtggaaagctgtcttcttcctgagctgaatgtgggagattggcttatctttgataacatgggagcagattctttccatgaaccatctgcttttaatgattttcagaggccagccatttattacatgatgtcattcagtgattggtatgagatgcaagatgctggaattacttcagactcaatgatgaagaacttcttctttgtgccttcttgcattcagctgagccaagaagacagcttttccgctgaagcttaaacaggcattaacgcttctttagatctgaagttgcaggttaagcttgtctggtcaacattccagtgtggaaaaataatttaaacaatcttattctcttaattcttttggcaacaaaaactattagtaatagctatttgggaccagacaaaatcagctttcatctataattcattggggataatgggagatttagataatgtatccagatttaaacctaccagtttgtcctaccccttaagcgtttaaaataaaatatgcaacaaaatggatgacttagtggagatggaagcccattaattgggttccccattaaatcgtttacatacaagaacacagtttttatactaaggatttgtgtttaaagtcttgtaaagttcatgtctttcacccagatatatcaaatgttagaagaccagtgtgacttcattagataacgtttagtgtatttagaatgtgtaaatttgtgctttgaactgtagtttaataaatgtaaaattgcatcatagtatttgttgacctaatgtaacccttgtatgattgcaataaaattttgtgtagattttactgttttttcaggctaaaactttgggaaaggggctagctagcaaaggtagttttgaaatagatgtgtatatggactgttttgaagggtttttttctttatagcccagttaagttttgtttggctcggtgcatttttcatttatttaattagtaatttaagtaaagtgtttggtaaatcattgtgaagttcagattcattatggagagttgatgtgcagtaagcatgatgtttaacaattttaacaccaaaaatgttaatcctgcataaatcaactgtaataataaataggtgtttctgtatagatagaatgcatagagtaccttagtaaatctttgaatcacaatcttttggctgaaatggaagattctgttaaatactttgaataaacttggggggagggaaataaaattgcagaaaactgcagagcactaaaacttaaagaagggctacatctttatccagaaacctgttgctcttttgcacggaatgtttaaattcagagttgggatgggggttggggtgaagcacacttattatcttcagttgcagtgatttcaaatttaggattttttgttgttggtttgaactgtccccttagtttcttgttatttccaatttgttctgcttagtcattacttttaattcttttcttactaaaattttatggtggttgggggaagggagttagcatcactaacctgacagttgttgccaggaatttgctttgtttactgctagtatattagaaatcctagatctcagaatcacaatagtaataaacaacaggggtcattttttcctaacttactctgtgttcaggtgtggaatttctgtctcccaagaggaaatgtgacttcactttggtgccaatggacagaaaattctacctgtgctacataggagaagtttggaatgcacttaatagctggtttttacaccttgatttcgaggtggaaagaaattgatcatgaatctctaataaatttaaatctcttaaaccagtaggtgcttaatattttttgatttgattaatgcccatttaaatctcatgggttctattaaaaatatatatatatagggccccaatccattgccatcaaattgcccttggacttttccaaggtatattatggggttttatgcaaaattccaagctaccatgtaactttttttaaccatttaacaaggagggggaactgtttcctaccttctttacatgttgtgcattgttgtggtccagaaatgccaaacctttttaaagatggtgcaactttgagtccttggcttgactatacaggccttgaacttcatggcatatcaactttgccatatctgcaggagagctgttctataagaaatagctcagagttgcaaatatcacatgtgaatgatacggtaacttttaagaaatgtctgtattgtatttgaagactgtttgccataaatctgaaatttgaacctatgtatttcaatttggtatgctaaaaagttctgaattaatgtaaagttttttgttataatattgtaatctcagttcaaaagttaactgcaaatataaaacccaatgatttctatatagtaaattgaactgtaaaggtaacttgtgtgtgattctgaatacatagataaatgtttttattcctca

SEQ ID NO: 2184 - DNA, 2857 bp, Homo sapiens
  source 1..2857: mol_type = unassigned DNA
aaatactggcgtcgctggcgccgccttctcacactttcaggctctgatcgcggccgcagtttttccttttttcttctgccgtcgccttctctgcctcttctcatcctttctcgctctgctgctctgcagtgtgacgagtccgaatcctcttcccacccagcccgcgcctttcttcttttgcctgcgctgttctatttctccttcggccgccgccgccactgctgcacacagctggtgtcggtgccgcgcttttacccccaagtcgttcccgcagcctatggcccaggccgccttgggtatttctgctcaaggtaaccacatccctctttaaaaattccgccgaaaaagagaagacgctttacccgactctttgggccgttatctcacggcgaactttctgaccaagtatacaactacccagagggcctaggagaagtgctgtatagagagcagttcgacttcaacgctgagccaccttgggaacctagctgatgataggggggttccatctcccaacttgtccatggaggtcttcacttcagaaatccaagactcatattcatccagcttggtgtcaagtgggctgttgctgccagaattatcttgtgattatttgagagatgtatcagtttcttctgaagtacaatcaactgtagaagcctttgtagcagtttgttgcatattctaaggacccagacataggcttggtggcccgtctcttgtctttcctggtttatgactttcggctttgtggaatacggctgagatgaaaggatttattgatgatgcaaactactccgttggcctgttggatgaaggaacaaaccttggaaatgttattgataactatgtttatgaacataccctgacagggaaaaatgcattttttgtgggagatcttggaaagattgtgaagaaacacagtcaatggcagaatgtagtggctcagataaagccattctacacagtgaagtgcaactctgctccagctgtacttgagattttggcagctcttggaaccggatttgcttgttccagtaaaaatgaaatggctttagtgcaagagttgggtgtacctccagaaaacattatttacataagtccttgcaagcaagtgtctcagataaagtatgcagcaaaagttggagtgaatatcctgacatgtgacaatgaaattgaattgaagaaaattgcacgtaatcacccaaatgccaaggtcttactacatattgcaacagaagataatattggaggtgaagagggtaacatgaagtttggcactaccctgaagaactgtaggcatctcttggaatgtgctaaggaacttgatgtccaaataattggggttaaatttcatgtttcgagtgcttgcaaagaatctcaagtatatgtacatgctctatctgatgctcgatgtgtgtttgacatggctggagaaattggctttacgatgaacatgttagacattggtggaggattcacgggaactgaatttcaattggaagaggttaatcatgttatcagccctctgttggatatctactttcctgaaggatctggtgttaagataatttcagaacccggaagctactatgtgtcttctgcatttacactcgcagttaatatcatagcaaagaaagttgttgaaaatgataaatttccctctggagtagaaaaaaccggaagtgatgaaccagccttcatgtattatatgaatgatggtgtttatggttcttttgcaagtaaactgtctgaggacttaaataccattccagaggttcacaagaaatacaaggaagatgagcctctgtttacaagcagcctttggggtccatcctgtgatgagcttgatcaaattgtggaaagctgtcttcttcctgagctgaatgtgggagattggcttatctttgataacatgggagcagattctttccatgaaccatctgcttttaatgattttcagaggccagccatttattacatgatgtcattcagtgattggtatgagatgcaagatgctggaattacttcagactcaatgatgaagaacttcttctttgtgccttcttgcattcagctgagccaagaagacagcttttccgctgaagcttaaacaggcattaacgcttctttagatctgaagttgcaggttaagcttgtctggtcaacattccagtgtggaaaaataatttaaacaatcttattctcttaattcttttggcaacaaaaactattagtaatagctatttgggaccagacaaaatcagctttcatctataattcattggggataatgggagatttagataatgtatccagatttaaacctaccagtttgtcctaccccttaagcgtttaaaataaaatatgcaacaaaatggatgacttagtggagatggaagcccattaattgggttccccattaaatcgtttacatacaagaacacagtttttatactaaggatttgtgtttaaagtcttgtaaagttcatgtctttcacccagatatatcaaatgttagaagaccagtgtgacttcattagataacgtttagtgtatttagaatgtgtaaatttgtgctttgaactgtagtttaataaatgtaaaattgcatcatagtatttgttgacctaatgtaacccttgtatgattgcaataaaattttgtgtagattttactgttttttcaggctaaaactttgggaaaggggctagctagcaaaggtagttttgaaatagatgtgtatatggactgttttgaagggtttttttctttatagcccagttaagttttgtttggctcggtgcatttttcatttatttaattagtaatttaagtaaagtgtttggtaaatcat

SEQ ID NO: 2185 - DNA, 773 bp, Homo sapiens
  source 1..773: mol_type = unassigned DNA
cttttttcttctgccgtcgccttctctgcctcttctcatcctttctcgctctgctgctctgcagtgtgacgagtccgaatcctcttcccacccagcccgcgcctttcttcttttgcctgcgctgttctatttctccttcggccgccgccgccactgctgcacacagctggtgtcggtgccgcgcttttacccccaagtcgttcccgcagcctatggcccaggccgccttgggtatttctgctcaaggtaaccacatccctctttaaaaattccgccgaaaaagagaagacgctttacccgactctttgggccgttatctcacgagttctttcctcatcatccataaatgtcattcattgagcatgtgatcagcttctcctagatagatgaaacattttgcctccaccaggagtgccttgatcctggtgagatacactttagggcgaactttctgaccaagtatacaactacccagagggcctaggagaagtgctgtatagagagcagttcgacttcaacgctgagccaccttgggaacctagctgatgataggggggttccatctcccaacttgtccattttgttgcatattctaaggacccagacataggcttggtggcccgtctcttgtctttcctggtttatgactttcggctttgtggaatacggctgagatgaaaggatttattgatgatgcaaactactccgttggcctgttggatgaaggaacaaaccttggaaatgttattgataactatgtttatgaacatacc

SEQ ID NO: 2186 - DNA, 660 bp, Homo sapiens
  source 1..660: mol_type = unassigned DNA
acacatggaggttcctggagagtggcgggcccagggagggcatggaggtttcacatccctccccctgtatcttgccctatgtgtctcttcatctgtatccttcgcaatatcctttataataaaccagtaaacacagggcgaactttctgaccaagtatacaactacccagagggcctaggagaagtgctgtatagagagcagttcgacttcaacgctgagccaccttgggaacctagctgatgataggggggttccatctcccaacttgtccattttgttgcatattctaaggacccagacataggcttggtggcccgtctcttgtctttcctggtttatgactttcggctttgtggaatacggctgagatgaaaggatttattgatgatgcaaactactccgttggcctgttggatgaaggaacaaaccttggaaatgttattgataactatgtttatgaacataccctgacagggaaaaatgcattttttgtgggagatcttggaaagattgtgaagaaacacagtcaatggcagaatgtagtggctcagataaagccattctacacagtgaagtgcaactctgctccagctgtacttgagattttggcagctcttggaaccggatttgcttgttccagtaaaaatgaaatggcttta

SEQ ID NO: 2187 - DNA, 1012 bp, Homo sapiens
  source 1..1012: mol_type = unassigned DNA
gcgcgcaaagccgtgcggagattggaggccgcgcgggtccctggtctgggccatgtctggctgtgatgctcgggagggagactgttgttcccggagatgcggcgcgcagtggcttacatggctatcaaaattgaagttcaaggtcaccagagttttgcaataccttcaggaacattctggctttggcgctcacttctctcccaggacaaggagcatccaagatacctgatcccagaactttgcaaacagttttaccatttaggctgggtcactgggactggaggaggaattagcttgaagcatggcgatgaaatctacattgctccttcaggagtgcaaaaggaacgaattcagcctgaagacatgtttgtttgtgatataaatgaaaaggacataagtggaccttcgccatcgaagaagctaaaaaaaagccagtgtactcctcttttcatgaatgcttacacaatgagaggagcaggtgcagtgattcatacccactctaaagctgctgtgatggccacacttctctttccaggacgggagtttaaaattacacatcaagagatgataaaaggaataaagaaatgtacttccggagggtattatagatatgatgatatgttagtggtacccattattgagaatacacctgaggagaaagacctcaaagatagaatggctcatgcaatgaatgaatacccagactcctgtgcagtactggtcagacgtcatggagtatatgtgtggggggaaacatgggagaaggccaaaaccatgtgtgagtgttatgactatttatttgatattgccgtatcaatgaagaaagtaggacttgatccttcacagctcccagttggagaaaatggaattgtctaagccaaaagaaagtctaattatatacagagataaagctaaacgtccctcccacaacacggaattatgggagctacaagatgagatttgagtggggacacagagccaaaccatatcatccagcgtccaggaagattca

SEQ ID NO: 2188 - DNA, 1366 bp, Homo sapiens
  source 1..1366: mol_type = unassigned DNA
acgttggccttgcctcccgggaagtcaggtgcgccgctggatatctcagccggcggggccttaccagaccccggcccccgccccgttcgccccgcccccgggctgccctcagcgccgcctgattgcatttgcggcctcgctgccgtatcccaggctaagcgccgcgcgcaaagccgtgcggagattggaggccgcgcgggtccctggtctgggccatgtctggctgtgatgctcgggagggagactgttgttcccggagatgcggcgcgcaggacaaggagcatccaagatacctgatcccagaactttgcaaacagttttaccatttaggctgggtcactgggactggaggaggaattagcttgaagcatggcgatgaaatctacattgctccttcaggagtgcaaaaggaacgaattcagcctgaagacatgtttgtttgtgatataaatgaaaaggacataagtggaccttcgccatcgaagaagctaaaaaaaagccagtgtactcctcttttcatgaatgcttacacaatgagaggagcaggtgcagtgattcatacccactctaaagctgctgtgatggccacacttctctttccaggacgggagtttaaaattacacatcaagagatgataaaaggaataaagaaatgtacttccggagggtattatagatatgatgatatgttagtggtacccattattgagaatacacctgaggagaaagacctcaaagatagaatggctcatgcaatgaatgaatacccagactcctgtgcagtactggtcagacgtcatggagtatatgtgtggggggaaacatgggagaaggccaaaaccatgtgtgagtgttatgactatttatttgatattgccgtatcaatgaagaaagtaggacttgatccttcacagctcccagttggagaaaatggaattgtctaagccaaaagaaagtctaattatatacagagataaagctaaacgtaattattatttaaatgaaagctatttttttaaatgaattgaaatttttcatgatgctactaatttgccactaaatactgcaaatggtcaccctgaatctcttctgacattggatgttatttgcttatattcttataattttaaatgagggcacagtgaaatgaaaattttatactctatgtttctgtttatttttaaatccttaacagcaaaatatttgcctttaatttcttttttatatatactctcagagaattcctcttaatttttaaagatgctggtgataataaaattcattagaaaatttcctcattgtggaatgagcattctcttgttttaatgttggtgtcagaaaataaatatgaaacattaagtccaaa

SEQ ID NO: 2189 - DNA, 3220 bp, Homo sapiens
  source 1..3220: mol_type = unassigned DNA
gagcattctctctggcagccggggtcacgggcagttgcagccgcggccgagcagccagccgctaagaaagagctcgccgctgccgctcccggagccgccgaggccagcttcgcggcgctgccccgcggcgggagaggaggctgcagaagagcggaggcggccagcgggagcggcggggctcagcgcgcacactcagcggccggggagcctcccgagctctgcgcccgcacgcgccagccgcggctcgcgcctttcttggcctccgggcgcccgacctctcctcccccgcgccggctcgccggggccgcggcggcccaaggagcagcatgaatctgcggctctgcgtgcaggcgctcctgctgctctggctctccttgaccgcggtgtgtggagggtccctgatgccgcttcccgatgggaatgggctggaagacggcaatgtccgccacctggtgcagcccagagggtcaaggaatgggccagggccctggcagggaggtcggaggaaattccgccgccagcggccccgcctctcccataagggacccatgcctttctgaagcaggactgaaggggcccccaagtgcccacccccggcggttatgtctcctccatagattggtctgcttctctggaggcctcacgtccattcagctctcacctcgcacctgctgtagccaccagtgggcccagctcttctcacctgcctgcttcccccagtggcgtgctcctggctgtagtttggatgattcccgttctctcacaagaatccgtccagtccatcttcctggcccctccctggactgactttggagacctagccccagaaagcctcccttcttctccaggtcccctccgccctagtccctgcctgtctcatctaacgccccaaaccttcatttgggccttccttcctcatgtctgccctgagcgcggggtggaagtgctcccttctgtgggctccagcagatcccttgttttcctgtcagttggacccctcacctggcctccagggaagaatgcagagaaaagcaaggagagactctagttaagaggtgctggctgcggggatccagacagggcacattgggggcatggaagtgccagggtggttttcaggagctctggtgaagtgggtggagcatcagcgtttgctcagttaagggagaggtagagaggggcccgtgaagtcctttgtcacttctcttgccttagtgtgcctcccaatactcccttcttcctgcccccacaccccatccccagctagcccaagctccaggtcaggaggggagggtgctgggcctgacatggctatataccctcccaggagtaaaagccaagcaagaggttgtttttgccaagaatcacagaatgttagagctgacaggacccttgaaggtcacttagccttcttaggcaaacgcctgcaaaacagaagcctggagaggggagtgacctgctcagagtcattgcagagccgggatggggaccaggtctcccatctcctactttatgacgccctcttccctcttgatgatgtcttttcaaagcaaatgaagtgccttttcccgaggctggggctgggggtggctgggaggggaagggaagggagaggcaagctggctgtgaactgtcctgttgtggggctggagctgctcccacctccctgacctacccctgctgcaccattcccccagctgggctggaaggttccataactggccagctgcccccataactggcagcattcccagacccagggtactctaataggggcggctcaggcactgagactaccgctcaaccccagggtggttttcaggagtccgaggtagccttcaatcactggactccatggccttcccttcgtgttgaccggaccttccttccagggcttttcctttgggggaggcggagaggggagaagaaggaagggaagggcagaaggaaggagggaagaaaagaaagcaaaggaacagaaggaaggaaagaaagatgggaggaagtgcagcaggaatagcaccctctccccgggaggccctagcttccgtgaggggccatcaccagccattccttggagggggctttctccccttttgcttgagcagggttcccaggagggagaaagagaagacaagagcctgatgcccaactttgtgtgtgtggggacgggggagtcagggccccccaagtcccacaatagccccaatgtttgcctatccacctcccccaagcccctttacctatgctgctgctaacgctgctgctgctgctgctgctgcttaaaggctcatgcttggagtggggactggtcggtgcccagaaagtctcttctgccactgacgcccccatcagggattgggccttctttcccccttcctttctgtgtctcctgcctcatcggcctgccatgacctgcagccaagcccagccccgtggggaaggggagaaagtgggggatggctaagaaagctgggagatagggaacagaagagggtagtgggtgggctaggggggctgccttatttaaagtggttgtttatgattcttatactaatttatacaaagatattaaggccctgttcattaagaaattgttcccttcccctgtgttcaatgtttgtaaagattgttctgtgtaaatatgtctttataataaacagttaaaagctgacagttcgcccttactcttggaggtcatgttcaggaggggcattcctttcccctgggggtcatgggtgtccccatgcccacatattgcacgtgcagggaggtaagtgcctgcatcccaaatcggttctaggtcaactggcctcaaactgatttgccatgagctcacaaaatgaatccctatgcttaatgaccaggtcacataaaatccagcccacttacaggttttctggcatctgtttgggtgtcctaatttttttggcagtgtcatttgaagaatttttttaaagcagtttatttaagaacatactgattaaatgcaggatcgctactaaaaattgttttgtatccttggtgggtgtcttctgctattttatctacttttgaacactttcaggactttttagccagtttgcctttcttgaaaaatgttatgttttcagcaataaatacatttgataatgactttgtttgtatcattttatgtttcacaaagtagagttgcttgatgaatgagatagcctgaaaaataaaatgcaaagagttcaat

SEQ ID NO: 2190 - DNA, 387 bp, Homo sapiens
  source 1..387: mol_type = unassigned DNA
atgggctggaagacggcaatgtccgccacctggtgcagcccagagggtcaaggaatgggccagggccctggcagggaggtcggaggaaattccgccgccagcggccccgcctctcccataagggacccatgcctttctgaagcaggactgaaggggcccccaagtgcccacccccggcggttatgtctcctccatagattggtctgcttctctggaggcctcacgtccattcagctctcacctcgcacctgctgtagccaccagtgggcccagctcttctcacctgcctgcttcccccagtggcgtgctcctggctgtagtttggatgattcccgttctctcacaagaatccgtccagtccatcttcctggcccctccctggactga

SEQ ID NO: 2191 - DNA, 2655 bp, Homo sapiens
  source 1..2655: mol_type = unassigned DNA
cggggtcacgggcagttgcagccgcggccgagcagccagccgctaagaaagagctcgccgctgccgctcccggagccgccgaggccagcttcgcggcgctgccccgcggcgggagaggaggctgcagaagagcggaggcggccagcgggagcggcggggctcagcgcgcacactcagcggccggggagcctcccgagctctgcgcccgcacgcgccagccgcggctcgcgcctttcttggcctccgggcgcccgacctctcctcccccgcgccggctcgccggggccgcggcggcccaaggagcagcatgaatctgcggctctgcgtgcaggcgctcctgctgctctggctctccttgaccgcggtgtgtggagggtccctgatgccgcttcccgatgggaatgggctggaagacggcaatgtccgccacctggtgcagcccagagggtcaaggaatgggccagggccctggcagggaggtcggaggaaattccgccgccagcggccccgcctctcccataagggacccatgcctttctgaagcaggactgaaggggcccccaagtgcccacccccggcggttatgtctcctccatagattggtctgcttctctggaggcctcacgtccattcagctctcacctcgcacctgctgtagccaccagtgggcccagctcttctcacctgcctgcttcccccagtggcgtgctcctggctgtagtttggatgattcccgttctctcacaagaatccgtccagtccatcttcctggcccctccctggactgactttggagacctagccccagaaagcctcccttcttctccaggtcccctccgccctagtccctgcctgtctcatctaacgccccaaaccttcatttgggccttccttcctcatgtctgccctgagcgcggggtggaagtgctcccttctgtgggctccagcagatcccttgttttcctgtcagttggacccctcacctggcctccagggaagaatgcagagaaaagcaaggagagactctagttaagaggtgctggctgcggggatccagacagggcacattgggggcatggaagtgccagggtggttttcaggagctctggtgaagtgggtggagcatcagcgtttgctcagttaagggagaggtagagaggggcccgtgaagtcctttgtcacttctcttgccttagtgtgcctcccaatactcccttcttcctgcccccacaccccatccccagctagcccaagctccaggtcaggaggggagggtgctgggcctgacatggctatataccctcccaggagtaaaagccaagcaagaggttgtttttgccaagaatcacagaatgttagagctgacaggacccttgaaggtcacttagccttcttaggcaaacgcctgcaaaacagaagcctggagaggggagtgacctgctcagagtcattgcagagccgggatggggaccaggtctcccatctcctactttatgacgccctcttccctcttgatgatgtcttttcaaagcaaatgaagtgccttttcccgaggctggggctgggggtggctgggaggggaagggaagggagaggcaagctggctgtgaactgtcctgttgtggggctggagctgctcccacctccctgacctacccctgctgcaccattcccccagctgggctggaaggttccataactggccagctgcccccataactggcagcattcccagacccagggtactctaataggggcggctcaggcactgagactaccgctcaaccccagggtggttttcaggagtccgaggtagccttcaatcactggactccatggccttcccttcgtgttgaccggaccttccttccagggcttttcctttgggggaggcggagaggggagaagaaggaagggaagggcagaaggaaggagggaagaaaagaaagcaaaggaacagaaggaaggaaagaaagatgggaggaagtgcagcaggaatagcaccctctccccgggaggccctagcttccgtgaggggccatcaccagccattccttggagggggctttctccccttttgcttgagcagggttcccaggagggagaaagagaagacaagagcctgatgcccaactttgtgtgtgtggggacgggggagtcagggccccccaagtcccacaatagccccaatgtttgcctatccacctcccccaagcccctttacctatgctgctgctaacgctgctgctgctgctgctgctgcttaaaggctcatgcttggagtggggactggtcggtgcccagaaagtctcttctgccactgacgcccccatcagggattgggccttctttcccccttcctttctgtgtctcctgcctcatcggcctgccatgacctgcagccaagcccagccccgtggggaaggggagaaagtgggggatggctaagaaagctgggagatagggaacagaagagggtagtgggtgggctaggggggctgccttatttaaagtggttgtttatgattcttatactaatttatacaaagatattaaggccctgttcattaagaaattgttcccttcccctgtgttcaatgtttgtaaagattgttctgtgtaaatatgtctttataataaacagttaaaagctga

SEQ ID NO: 2192 - DNA, 474 bp, Homo sapiens
  source 1..474: mol_type = unassigned DNA
aggcacagacaccaaggacagagacgctggctaggccgccctccccactgttaccaacatgaagctgctcgcagcaactgtgctactcctcaccatctgcagccttgaaggagctttggttcggagacaggcaaaggagccatgtgtggagagcctggtttctcagtacttccagaccgtgactgactatggcaaggacctgatggagaaggtcaagagcccagagcttcaggccgaggccaagtcttactttgaaaagtcaaaggagcagctgacacccctgatcaagaaggctggaacggaactggttaacttcttgagctatttcgtggaacttggaacacagcctgccacccagtgaagtgtccagaccattgtcttccaaccccagctggcctctagaacacccactggccagtcctagagctcctgtccctacccactctttgctacaataaatgctgaatgaatcca

SEQ ID NO: 2193 - DNA, 1470 bp, Homo sapiens
  source 1..1470: mol_type = unassigned DNA
tcagttcccactgcagcgcaggtgagctctcctgaggacctctctgtcagctcccctgattgtagggaggatccagtgtggcaagaaactcctccagcccagcaagcagctcaggatgttcctgaaggccgtggtcctgaccctggccctggtggctgtcgccggagccagggctgaggtcagtgctgaccaggtggccacggtgatgtgggactacttcagccagctgagcaacaatgccaaggaggccgtggaacatctccagaaatctgaactcacccagcaactcaatgccctcttccaggacaaacttggagaagtgaacacttacgcaggtgacctgcagaagaagctggtgccctttgccaccgagctgcatgaacgcctggccaaggactcggagaaactgaaggaggagattgggaaggagctggaggagctgagggcccggctgctgccccatgccaatgaggtgagccagaagatcggggacaacctgcgagagcttcagcagcgcctggagccctacgcggaccagctgcgcacccaggtcagcacgcaggccgagcagctgcggcgccagctgaccccctacgcacagcgcatggagagagtgctgcgggagaacgccgacagcctgcaggcctcgctgaggccccacgccgacgagctcaaggccaagatcgaccagaacgtggaggagctcaagggacgccttacgccctacgctgacgaattcaaagtcaagattgaccagaccgtggaggagctgcgccgcagcctggctccctatgctcaggacacgcaggagaagctcaaccaccagcttgagggcctgaccttccagatgaagaagaacgccgaggagctcaaggccaggatctcggccagtgccgaggagctgcggcagaggctggcgcccttggccgaggacgtgcgtggcaacctgaggggcaacaccgaggggctgcagaagtcactggcagagctgggtgggcacctggaccagcaggtggaggagttccgacgccgggtggagccctacggggaaaacttcaacaaagccctggtgcagcagatggaacagctcaggcagaaactgggcccccatgcgggggacgtggaaggccacttgagcttcctggagaaggacctgagggacaaggtcaactccttcttcagcaccttcaaggagaaagagagccaggacaagactctctccctccctgagctggagcaacagcaggaacagcagcaggagcagcagcaggagcaggtgcagatgctggcccctttggagagctgagctgcccctggtgcactggccccaccctcgtggacacctgccctgccctgccacctgtctgtctgtctgtcccaaagaagttctggtatgaacttgaggacacatgtccagtgggaggtgagaccacctctcaatattcaataaagctgctgagaatctagcct

SEQ ID NO: 2194 - DNA, 1897 bp, Homo sapiens
  source 1..1897: mol_type = unassigned DNA
caggcctccctccacctgtcttctcagagcaggtaatggcaagcatggctgccgtgctcacctgggctctggctcttctttcagcgttttcggccacccaggcacggaaaggcttctgggactacttcagccagaccagcggggacaaaggcagggtggagcagatccatcagcagaagatggctcgcgagcccgcgaccctgaaagacagccttgagcaagacctcaacaatatgaacaagttcctggaaaagctgaggcctctgagtgggagcgaggctcctcggctcccacaggacccggtgggcatgcggcggcagctgcaggaggagttggaggaggtgaaggctcgcctccagccctacatggcagaggcgcacgagctggtgggctggaatttggagggcttgcggcagcaactgaagccctacacgatggatctgatggagcaggtggccctgcgcgtgcaggagctgcaggagcagttgcgcgtggtgggggaagacaccaaggcccagttgctggggggcgtggacgaggcttgggctttgctgcagggactgcagagccgcgtggtgcaccacaccggccgcttcaaagagctcttccacccatacgccgagagcctggtgagcggcatcgggcgccacgtgcaggagctgcaccgcagtgtggctccgcacgcccccgccagccccgcgcgcctcagtcgctgcgtgcaggtgctctcccggaagctcacgctcaaggccaaggccctgcacgcacgcatccagcagaacctggaccagctgcgcgaagagctcagcagagcctttgcaggcactgggactgaggaaggggccggcccggacccccagatgctctccgaggaggtgcgccagcgacttcaggctttccgccaggacacctacctgcagatagctgccttcactcgcgccatcgaccaggagactgaggaggtccagcagcagctggcgccacctccaccaggccacagtgccttcgccccagagtttcaacaaacagacagtggcaaggttctgagcaagctgcaggcccgtctggatgacctgtgggaagacatcactcacagccttcatgaccagggccacagccatctgggggacccctgaggatctacctgcccaggcccattcccagctccttgtctggggagccttggctctgagcctctagcatggttcagtccttgaaagtggcctgttgggtggagggtggaaggtcctgtgcaggacagggaggccaccaaaggggctgctgtctcctgcacatccagcctcctgcgactccccaatctggatgcattacattcaccaggctttgcaaacccagcctcccagtgctcatttgggaatgctcatgagttactccattcaagggtgagggagtagggagggagaggcaccatgcatgtgggtgattatctgcaagcctgtttgccgtgatgctggaagcctgtgccactacatcctggagtttggctctagtcacttctggctgcctggtggccactgctacagctggtccacagagaggagcacttgtctccccagggctgccatggcagctatcaggggaatagaagggagaaagagaatatcatggggagaacatgtgatggtgtgtgaatatccctgctggctctgatgctggtgggtacgaaaggtgtgggctgtgataggagagggcagagcccatgtttcctgacatagctctacacctaaataagggactgaaccctcccaactgtgggagctccttaaaccctctggggagcatactgtgtgctctccccatctccagcccctccctctgggttcccaagttgaagcctagacttctggctcaaatgaaatagatgtttatgatagaa

SEQ ID NO: 2195 - DNA, 526 bp, Homo sapiens
  source 1..526: mol_type = unassigned DNA
aatgtctgctctctgtgcccagacgtgagcagagcaggtaatggcaagcatggctgccgtgctcacctgggctctggctcttctttcagcgttttcggccacccaggcacggaaaggcttctgggactacttcagccagaccagcggggacaaaggcagggtggagcagatccatcagcagaagatggctcgcgagcccgcgaccctgaaagacagccttgagcaagacctcaacaatatgaacaagttcctggaaaagctgaggcctctgagtgggagcgaggctcctcggctcccacaggacccggtgggcatgcggcggcagctgcaggaggagttggaggaggtgaaggctcgcctccagccctacatggcagaggcgcacgagctggtgggctggaatttggagggcttgcggcagcaactgaagccctacacgatggatctgatggagcaggtggccctgcgcgtgcaggagctgcaggagcagttgcgcgtggtgggggaagacaccaaggcccagttg

SEQ ID NO: 2196 - DNA, 1929 bp, Homo sapiens
  source 1..1929: mol_type = unassigned DNA
ataaagcagaatgtctgctctctgtgcccagacgtgagcaggcctccctccacctgtcttctcagagcaggtaatggcaagcatggctgccgtgctcacctgggctctggctcttctttcagcgttttcggccacccaggcacggaaaggcttctgggactacttcagccagaccagcggggacaaaggcagggtggagcagatccatcagcagaagatggctcgcgagcccgcgaccctgaaagacagccttgagcaagacctcaacaatatgaacaagttcctggaaaagctgaggcctctgagtgggagcgaggctcctcggctcccacaggacccggtgggcatgcggcggcagctgcaggaggagttggaggaggtgaaggctcgcctccagccctacatggcagaggcgcacgagctggtgggctggaatttggagggcttgcggcagcaactgaagccctacacgatggatctgatggagcaggtggccctgcgcgtgcaggagctgcaggagcagttgcgcgtggtgggggaagacaccaaggcccagttgctggggggcgtggacgaggcttgggctttgctgcagggactgcagagccgcgtggtgcaccacaccggccgcttcaaagagctcttccacccatacgccgagagcctggtgagcggcatcgggcgccacgtgcaggagctgcaccgcagtgtggctccgcacgcccccgccagccccgcgcgcctcagtcgctgcgtgcaggtgctctcccggaagctcacgctcaaggccaaggccctgcacgcacgcatccagcagaacctggaccagctgcgcgaagagctcagcagagcctttgcaggcactgggactgaggaaggggccggcccggacccccagatgctctccgaggaggtgcgccagcgacttcaggctttccgccaggacacctacctgcagatagctgccttcactcgcgccatcgaccaggagactgaggaggtccagcagcagctggcgccacctccaccaggccacagtgccttcgccccagagtttcaacaaacagacagtggcaaggttctgagcaagctgcaggcccgtctggatgacctgtgggaagacatcactcacagccttcatgaccagggccacagccatctgggggacccctgaggatctacctgcccaggcccattcccagctccttgtctggggagccttggctctgagcctctagcatggttcagtccttgaaagtggcctgttgggtggagggtggaaggtcctgtgcaggacagggaggccaccaaaggggctgctgtctcctgcacatccagcctcctgcgactccccaatctggatgcattacattcaccaggctttgcaaacccagcctcccagtgctcatttgggaatgctcatgagttactccattcaagggtgagggagtagggagggagaggcaccatgcatgtgggtgattatctgcaagcctgtttgccgtgatgctggaagcctgtgccactacatcctggagtttggctctagtcacttctggctgcctggtggccactgctacagctggtccacagagaggagcacttgtctccccagggctgccatggcagctatcaggggaatagaagggagaaagagaatatcatggggagaacatgtgatggtgtgtgaatatccctgctggctctgatgctggtgggtacgaaaggtgtgggctgtgataggagagggcagagcccatgtttcctgacatagctctacacctaaataagggactgaaccctcccaactgtgggagctccttaaaccctctggggagcatactgtgtgctctccccatctccagcccctccctctgggttcccaagttgaagcctagacttctggctcaaatgaaatagatgtttatg

SEQ ID NO: 2197 - DNA, 1282 bp, Homo sapiens
  source 1..1282: mol_type = unassigned DNA
actttaaggagggctgtccaactgcaaggacgctgtaagcaggaagtgaaaccacagagcttcaaaaaaagagcgggacagggacaagcgtatctaagaggctgaacatgaatccacagatcagaaatccgatggagcggatgtatcgagacacattctacgacaactttgaaaacgaacccatcctctatggtcggagctacacttggctgtgctatgaagtgaaaataaagaggggccgctcaaatctcctttgggacacaggggtctttcgaggccaggtgtatttcaagcctcagtaccacgcagaaatgtgcttcctctcttggttctgtggcaaccagctgcctgcttacaagtgtttccagatcacctggtttgtatcctggaccccctgcccggactgtgtggcgaagctggccgaattcctgtctgagcaccccaatgtcaccctgaccatctctgccgcccgcctctactactactgggaaagagattaccgaagggcgctctgcaggctgagtcaggcaggagcccgcgtgacgatcatggactatgaagaatttgcatactgctgggaaaactttgtgtacaatgaaggtcagcaattcatgccttggtacaaattcgatgaaaattatgcattcctgcaccgcacgctaaaggagattctcagatacctgatggatccagacacattcactttcaactttaataatgaccctttggtccttcgacggcgccagacctacttgtgctatgaggtggagcgcctggacaatggcacctgggtcctgatggaccagcacatgggctttctatgcaacgagttggacccggcccagatctacagggtcacttggttcatctcctggagcccctgcttctcctggggctgtgccggggaagtgcgtgcgttccttcaggagaacacacacgtgagactgcgcatcttcgctgcccgcatctatgattacgaccccctatataaggaggcgctgcaaatgctgcgggatgctggggcccaagtctccatcatgacctacgatgagtttgagtactgctgggacacctttgtgtaccgccagggatgtcccttccagccctgggatggactagaggagcacagccaagccctgagtgggaggctgcgggccattctccagaatcagggaaactgaaggatgggcctcagtctctaaggaaggcagagacctgggttgagcagcagaataaaagatcttcttccaagaaatgcaaacagaccgttcaccaccatctc

SEQ ID NO: 2198 - DNA, 616 bp, Homo sapiens
  source 1..616: mol_type = unassigned DNA
ggaggtcactttagggagggctgtcctgaaacctggagcctggagcagaaagtgaaaccctggtgctccagacaaagatcttagtcgggactagccggccaaggatgaagcctcacttcagaaacacagtggagcgaatgtatcgagacacattctcctacaacttttataatagacccatcctttctcgtcggaataccgtctggctgtgctacgaagtgaaaacaaagggtccctcaaggccccgtttggacgcaaagatctttcgaggccaggtgcccaggtctttcatcagagccccatttcaagtgctcagtagcccctttggccagtgcgccccaccacatgggacagcgcaggtccagtggcctccccagctgaccgcaggcagggaacaaggcagaccctagagggccaggccacagcaggggctgaggatgcctggtgaatggatgcctgggagaatggatgccagaattcacgcatgaggctctgaacagggctgggaaaacttccaaacgaagggaagctcatgtcttggtgcactttgtgatgatgcttcaacagcaggactgagatggggacatttacaataaacagaaatgtatgggctcga

SEQ ID NO: 2199 - DNA, 879 bp, Homo sapiens
  source 1..879: mol_type = unassigned DNA
gaagtccagagacagagcaccatgacttctgagaaaggtccttcaaccggtgaccccactctgaggagaagaatcgaaccctgggagtttgacgtcttctatgaccccagagaacttcgtaaagaggcctgtctgctctacgaaatcaagtggggcatgagccggaagatctggcgaagctcaggcaaaaacaccaccaatcacgtggaagttaattttataaaaaaatttacgtcagaaagagattttcacccatccatgagctgctccatcacctggttcttgtcctggagtccctgctgggaatgctcccaggctattagagagtttctgagtcggcaccctggtgtgactctagtgatctacgtagctcggcttttttggcacatggatcaacaaaatcggcaaggtctcagggaccttgttaacagtggagtaactattcagattatgagagcatcagagtattatcactgctggaggaattttgtcaactacccacctggggatgaagctcactggccacaatacccacctctgtggatgatgttgtacgcactggagctgcactgcataattctaagtcttccaccctgtttaaagatttcaagaagatggcaaaatcatcttacatttttcagacttcatcttcaaaactgccattaccaaacgattccgccacacatccttttagctacagggctgatacatccttctgtggcttggagatgaataggatgattccgtgtgtgtactgattcaagaacaagcaatgatgacccactaaagagtgaatgccatttagaatctagaaatgttcacaaggtaccccaaaactctgtagcttaaaccaacaataaatatgtattacctctggca

SEQ ID NO: 2200 - DNA, 1151 bp, Homo sapiens
  source 1..1151: mol_type = unassigned DNA
gcctctctcctctccctcagtgactcctgagccacagcccctccatggcccagaaggaagaggctgctgtggccactgaggctgcctcccagaatggggaggatctggagaacctggacgaccctgagaagctgaaagagctgattgagctgccgccctttgagattgtcacaggagaacggctgcctgccaacttctttaaattccagttccggaatgtggagtacagttccgggaggaacaagaccttcctctgctatgtggttgaagcacagggcaaggggggccaagtgcaggcatctcggggatacctagaggatgagcatgcggctgcccatgcagaggaagctttcttcaacaccatcctgccagccttcgacccagccctgcggtacaatgtcacctggtatgtgtcctccagcccctgtgcagcgtgtgctgaccgcattatcaaaacccttagcaagaccaagaacctgcgtctgctcattctggtgggtcgactcttcatgtgggaggagccggagatccaggctgctctgaagaagctgaaggaggctggctgtaaactgcgcatcatgaagccccaggacttcgaatatgtctggcagaattttgtggagcaagaagagggtgaatccaaggcctttcagccctgggaggacattcaggagaacttcctatactacgaggagaagttggcagacatcctgaagtagggcaactgggctttgcctcacgtattcctgctgccaccaagagacagcaatgacatgtacagccatctgggacatgcctgtcttcctaataccatttggagctggacaacatttgacaccaaccaatcatactggacaaggcccttagaggacttgaaatatacttctcatgctgtagtttatttaggctgtgactctctctctaatgctgctctcgggaaggacgaaagtgacctgcaaggagagaaatgcaaccatacatgggctccagtcaactatgggactgaaggtcctaattgctcacccaagggggctgcttaacacaaacagcctcagacccgaggtttagatttctgaaatatgcattttatgttaagttgggtatttttttaaaaaaagaaaaacagcaacattaataaaagaagtggtgtg

SEQ ID NO: 2201 - DNA, 1242 bp, Homo sapiens
  source 1..1242: mol_type = unassigned DNA
agtgactcctgagccacagcccctccatggcccagaaggaagaggctgctgtggccactgaggctgcctcccagaatggggaggatctggagaacctggacgaccctgagaagctgaaagagctgattgagctgccgccctttgagattgtcacaggagaacggctgcctgccaacttctttaaattccagttccggaatgtggagtacagttccgggaggaagctttcttcaacaccatcctgccagccttcgacccagccctgcggtacaatgtcacctggtatgtgtcctccagcccctgtgcagcgtgtgctgaccgcattatcaaaacccttagcaagaccaagaacctgcgtctgctcattctggtgggtcgactcttcatgtgggaggagccggagatccaggctgctctgaagaagctgaaggaggctggctgtaaactgcgcatcatgaagccccaggacttcgaatatgtctggcagaattttgtggagcaagaagagggtgaatccaaggcctttcagccctgggaggacattcaggagaacttcctatactacgaggagaagttggcagacatcctgaagtagggcaactgggctttgcctcacgtattcctgctgccaccaagagacagcaatgacatgtacagccatctgggacatgcctgtcttcctaataccatttggagctggacaacatttgacaccaaccaatcatactggacaaggcccttagaggacttgaaatatacttctcatgctgtagtttatttaggctgtgactctctctctaatgctgctctcgggaaggacgaaagtgacctgcaaggagagaaatgcaaccatacatgggctccagtcaactatgggactgaaggtcctaattgctcacccaagggggctgcttaacacaaacagcctcagacccgaggtttagatttctgaaatatgcattttatgttaagttgggtatttttttaaaaaaagaaaaacagcaacattaataaaagaagtggtgtgtttttcccgtggccagatttttaagaaacttgaacatctggaagttgccacagacaagcgagctagtccagacacagggacactccaggctatgaaccaagccatggttaaaccaagacttgcctagacaatgcagaataactctcccatacagacttcttacgacaatcaagtgagggcctttcccttctctgaaggcaagtaatagggcagaa

SEQ ID NO: 2202 - DNA, 1444 bp, Homo sapiens
  source 1..1444: mol_type = unassigned DNA
ggagaaggggtggggcagggtatcgctgactcagcagcttccaggttgctctgatgatatattaaggctcctgaatcctaagagaatgttggtgaagatcttaacaccacgccttgagcaagtcgcaagagcgggaggacacagaccaggaaccgagaagggacaagcacatggaagccagcccagcatccgggcccagacacttgatggatccacacatattcacttccaactttaacaatggcattggaaggcataagacctacctgtgctacgaagtggagcgcctggacaatggcacctcggtcaagatggaccagcacaggggctttctacacaaccaggctaagaatcttctctgtggcttttacggccgccatgcggagctgcgcttcttggacctggttccttctttgcagttggacccggcccagatctacagggtcacttggttcatctcctggagcccctgcttctcctggggctgtgccggggaagtgcgtgcgttccttcaggagaacacacacgtgagactgcgtatcttcgctgcccgcatctatgattacgaccccctatataaggaggcactgcaaatgctgcgggatgctggggcccaagtctccatcatgacctacgatgaatttaagcactgctgggacacctttgtggaccaccagggatgtcccttccagccctgggatggactagatgagcacagccaagccctgagtgggaggctgcgggccattctccagaatcagggaaactgaaggatgggcctcagtctctaaggaaggcagagacctgggttgagcagcagaataaaagatcttcttccaagaaatgcaaacagaccgttcaccaccatctccagctgctcacagacgccagcaaagcagtatgctcccgatcaagtagatttttaaaaaatcagagtgggccgggcgcggtggctcacgcctgtaatcccagcactttggaggccaaggcgggtggatcacgaggtcaggagatcgagaccatcctggctaacacggtgaaaccctgtctctactaaaaatacaaaaaattagccaggcgtggtggcgggcgcctgtagtcccagctactctggaggctgaggcaggagagtagcgtgaacccgggaggcagagcttgcggtgagccgagattgcgctactgcactccagcctgggcgacagtaccagactccatctcaaaaaaaaaaaaaccagactgaattaattttaactgaaaatttctcttatgttccaagtacacaatagtaagattatgctcaatattctcagaataattttcaatgtattaatgaaatgaaatgataatttggcttcatatctagactaacacaaaattaagaatcttccataattgcttttgctcagtaactgtgtcatgaattgcaagagtttccacaaacact

SEQ ID NO: 2203 - DNA, 1478 bp, Homo sapiens
  source 1..1478: mol_type = unassigned DNA
ggcctccctgccacggggatgctgccttttctgctccgggtgtttccacgaggcaggcatggaatcttccctggacaagcgacataccgtggagagacaggctcctgaatcctaagagaatgttggtgaagatcttaacaccacgccttgagcaagtcgcaagagcgggaggacacagaccaggaaccgagaagggacaagcacatggaagccagcccagcatccgggcccagacacttgatggatccacacatattcacttccaactttaacaatggcattggaaggcataagacctacctgtgctacgaagtggagcgcctggacaatggcacctcggtcaagatggaccagcacaggggctttctacacaaccaggctaagaatcttctctgtggcttttacggccgccatgcggagctgcgcttcttggacctggttccttctttgcagttggacccggcccagatctacagggtcacttggttcatctcctggagcccctgcttctcctggggctgtgccggggaagtgcgtgcgttccttcaggagaacacacacgtgagactgcgtatcttcgctgcccgcatctatgattacgaccccctatataaggaggcactgcaaatgctgcgggatgctggggcccaagtctccatcatgacctacgatgaatttaagcactgctgggacacctttgtggaccaccagggatgtcccttccagccctgggatggactagatgagcacagccaagccctgagtgggaggctgcgggccattctccagaatcagggaaactgaaggatgggcctcagtctctaaggaaggcagagacctgggttgagcagcagaataaaagatcttcttccaagaaatgcaaacagaccgttcaccaccatctccagctgctcacagacgccagcaaagcagtatgctcccgatcaagtagatttttaaaaaatcagagtgggccgggcgcggtggctcacgcctgtaatcccagcactttggaggccaaggcgggtggatcacgaggtcaggagatcgagaccatcctggctaacacggtgaaaccctgtctctactaaaaatacaaaaaattagccaggcgtggtggcgggcgcctgtagtcccagctactctggaggctgaggcaggagagtagcgtgaacccgggaggcagagcttgcggtgagccgagattgcgctactgcactccagcctgggcgacagtaccagactccatctcaaaaaaaaaaaaaccagactgaattaattttaactgaaaatttctcttatgttccaagtacacaatagtaagattatgctcaatattctcagaataattttcaatgtattaatgaaatgaaatgataatttggcttcatatctagactaacacaaaattaagaatcttccataattgcttttgctcagtaactgtgtcatgaattgcaagagtttccacaaacact

SEQ ID NO: 2204 - DNA, 1533 bp, Homo sapiens
  source 1..1533: mol_type = unassigned DNA
caaaaaaagagcgggacagggacaagcgtatctaagaggctgaacatgaatccacagatcagaaatccgatggagcggatgtatcgagacacattctacgacaactttgaaaacgaacccatcctctatggtcggagctacacttggctgtgctatgaagtgaaaataaagaggggccgctcaaatctcctttgggacacaggggtctttcgaggccaggtgtatttcaagcctcagtaccacgcagaaatgtgcttcctctcttggttctgtggcaaccagctgcctgcttacaagtgtttccagatcacctggtttgtatcctggaccccctgcccggactgtgtggcgaagctggccgaattcctgtctgagcaccccaatgtcaccctgaccatctctgccgcccgcctctactactactgggaaagagattaccgaagggcgctctgcaggctgagtcaggcaggagcccgcgtgacgatcatggactatgaagaatttgcatactgctgggaaaactttgtgtacaatgaaggtcagcaattcatgccttggtacaaattcgatgaaaattatgcattcctgcaccgcacgctaaaggagattctcagatacctgatggatccagacacattcactttcaactttaataatgaccctttggtccttcgacggcgccagacctacttgtgctatgaggtggagcgcctggacaatggcacctgggtcctgatggaccagcacatgggctttctatgcaacgaggctaagaatcttctctgtggcttttacggccgccatgcggagctgcgcttcttggacctggttccttctttgcagttggacccggcccagatctacagggtcacttggttcatctcctggagcccctgcttctcctggggctgtgccggggaagtgcgtgcgttccttcaggagaacacacacgtgagactgcgcatcttcgctgcccgcatctatgattacgaccccctatataaggaggcgctgcaaatgctgcgggatgctggggcccaagtctccatcatgacctacgatgagtttgagtactgctgggacacctttgtgtaccgccagggatgtcccttccagccctgggatggactagaggagcacagccaagccctgagtgggaggctgcgggccattctccagaatcagggaaactgaaggatgggcctcagtctctaaggaaggcagagacctgggttgagcagcagaataaaagatcttcttccaagaaatgcaaacagaccgttcaccaccatctccagctgctcacagacaccagcaaagcaatgtgctcctgatcaagtagattttttaaaaatcagagtcaattaattttaattgaaaatttctcttatgttccaagtgtacaagagtaagattatgctcaatattcccagaatagttttcaatgtattaatgaagtgattaattggctccatatttagactaataaaacattaagaatcttccataattgtttccacaaacactagcaaa

SEQ ID NO: 2205 - DNA, 1309 bp, Homo sapiens
  source 1..1309: mol_type = unassigned DNA
agataaagacagagcagcctgtctttatcggaggttcctctgccagtaggaggggcccggagaaaaccagaaagagggccagagccagagaaacatgaagcaccccggggcctcccacaccagtgcctgagcaggaatggggaggggccatgattcacaaggccctgggaggtcactttaaagagggctgctcaactgcaaggacgctgtaagcaggaagagaagccacagcgcttcagaaaagagtgggacagggacaagcatatctaagaggctgaacatgaatccacagatcagaaacccgatgaaggcaatgtatccaggcacattctacttccaatttaaaaacctatgggaagccaacgatcggaacgaaacttggctgtgcttcaccgtggaaggtataaagcgccgctcagttgtctcctggaagacgggcgtcttccgaaaccaggtggattctgagacccattgtcatgcagaaaggtgcttcctctcttggttctgcgacgacatactgtctcctaacacaaagtaccaggtcacctggtacacatcttggagcccttgcccagactgtgcaggggaggtggccgagttcctggccaggcacagcaacgtgaatctcaccatcttcaccgcccgcctctactacttccagtatccatgttaccaggaggggctccgcagcctgagtcaggaaggggtcgctgtggagatcatggactatgaagattttaaatattgttgggaaaactttgtgtacaatgataatgagccattcaagccttggaagggattaaaaaccaactttcgacttctgaaaagaaggctacgggagagtctccagtgaggggtctccctgggcctcatggtctgtctcctctagcctcctgctcatgctgcacgggcctcccctccaccctggacccgctctgtttctgcctggtcatcctgagcccctcctggcctcagggccattccacagtgctcccctgcctcaccgcttcctcctcgctcttccagactcttcctgcagaggctcctttctgcctccatggctatccatccacccccacagaccccgttcctccagcctgcgtgcccctaacctggcttttcccatctccccagcataaccaaatcttactaaactcatcctaggctgggcatggtgactcacgcctgtaatcccccagcaatttgggaggcaaaggtgggagaatcgcgtgagcccaggagttccagaccaggctgggtcacatgacaaagccccatctctacaaaaaaaaaaaaaaaaaaaaaaaaa

SEQ ID NO: 2206 - DNA, 2694 bp, Homo sapiens
  source 1..2694: mol_type = unassigned DNA
gtgctctgctggctcagcctggtgtggacccacctcgcgggcgctggctgcaatgactttctctttccctttgcaattgccttgggtcctgccgcacagagcggcctgtctttatcagaggtccctctgccagggggagggccccagagaaaaccagaaagagggtgagagactgaggaagataaagcgtcccagggcctcctacaccagcgcctgagcaggaagggggaggggccatgactacgaggccctgggaggtcactttagggagggctgtcctgaaacctggagcctggagcagaaagtgaaaccctggtgctccagacaaagatcttagtcgggactagccggccaaggatgaagcctcacttcagaaacacagtggagcgaatgtatcgagacacattctcctacaacttttataatagacccatcctttctcgtcggaataccgtctggctgtgctacgaagtgaaaacaaagggtccctcaaggccccgtttggacgcaaagatctttcgaggccaggtgtattcccagcctgagcaccacgcagaaatgtgcttcctctcttggttctgtggcaaccagctgcctgcttacaagtgtttccagatcacctggtttgtatcctggaccccctgcccggactgtgtggcgaagctggccgaattcctggctgagcaccccaatgtcaccctgaccatctccgccgcccgcctctactactactgggaaagagattaccgaagggcgctctgcaggctgagtcaggcaggggcccgcgtgaagattatggacgatgaagaatttgcatactgctgggaaaactttgtgtacagtgaaggtcagccattcatgccttggtacaaattcgatgacaattatgcattcctgcaccgcacgctaaaggagattctcagaaacccgatggaggcaatgtatccacacatattctacttccactttaaaaacctacgcaaagcctatggtcggaacgaaagctggctgtgcttcaccatggaagttgtaaagcaccactcacctgtctcctggaagaggggcgtcttccgaaaccaggtggatcctgagacccattgtcatgcagaaaggtgcttcctctcttggttctgtgacgacatactgtctcctaacacaaactacgaggtcacctggtacacatcttggagcccttgcccagagtgtgcaggggaggtggccgagttcctggccaggcacagcaacgtgaatctcaccatcttcaccgcccgcctctactacttctgggatacagattaccaggaggggctccgcagcctgagtcaggaaggggcctccgtggagatcatgggctacaaagattttaaatattgttgggaaaactttgtgtacaatgatgatgagccattcaagccttggaaaggactaaaatacaactttctattcctggacagcaagctgcaggagattctcgagtgaggggtctccccgggcctcatggtctgtctcctctagcctcctgctcatgttgtgcaggcctcccctccatcctggaccagctgtgcttttgcctggtcatcctgagcccctcctggcctcagggccattccatagtgctcccctgcctcaccacctcctctccgctctcccaggctcttcctgcagaggcctctttctgcctccatggctatccatccacccaccaagaccctgttccctgagcctgcatgcccctaacctgccttttcccatctccccagcataacctaatattttttttttttttttgagacggaatttcgctctgtcacccagactggagtgcaatggcttgatcttggctcactgcaaactctgcctaccaggttcaagcgattctcctgcctccgcctcccgagtagctggaattacagacgcctgccaccacgcacagctaactttttttttttttgtatttttagtagtgactgggtttcaccatgttggccaggctggtcttgaactcctgacctcaggtgatccgcctatctcagcctcccaaagtgctgggattacaggcgtgagccactggcccggcggcacaaccaaatcttattaaactcaccctaggctggccgcggtgactcatgcctataatcccccagcaatttgggaggcagaggtgagagaatcgcttgagcccaggaattcgagaccagcctgggccacatgacaaagccccatctctacaaaaaaattacaaaaaaaaaaaaaacaggtgtggtggcatgcacctgtagttgaagctacttggaaggatgaagtgggaggattgcttgagccggggaggtggaggctgcagtgaactgagatcacgtcactgaactccagtctgagcaacagatcgagaccctgcctgaaaataaatcaataaataaactcaaccgaaatgggtatgaaagttgaaatgggtatgtaagttgaaaaccagaagttttgagaaacatcctttgttaactttcatcctacaaattgggtcattcatgtcctacgcagctaaaacagagcccaggagccagggaggaaaagcagtcaggccacacaccattgctcccaaaatggacttctctgcaagcctgactcctgaaactgtgcattgtaccctgaaaccagctttatccatagcttctgcaataaatggctgtaagtcttgga

SEQ ID NO: 2207 - DNA, 1834 bp, Homo sapiens
  source 1..1834: mol_type = unassigned DNA
gtgctctgctggctcagcctggtgtggacccacctcccgggcgctggctgcaatgactttctctttccctttgcaattgccttgggtcctgccgcacagagcggcctgtctttatcagaggtccctctgccagggggagggccccagagaaaaccagaaagagggtgagagactgaggaagataaagcgtcccagggcctcctacaccagcgcctgagcaggaagcgggaggggccatgactacgaggccctgggaggtcactttagggagggctgtcctaaaaccagaagcttggagcagaaagtgaaaccctggtgctccagacaaagatcttagtcgggactagccggccaaggatgaagcctcacttcagaaacacagtggagcgaatgtatcgagacacattctcctacaacttttataatagacccatcctttctcgtcggaataccgtctggctgtgctacgaagtgaaaacaaagggtccctcaaggccccctttggacgcaaagatctttcgaggccaggtgtattccgaacttaagtaccacccagagatgagattcttccactggttcagcaagtggaggaagctgcatcgtgaccaggagtatgaggtcacctggtacatatcctggagcccctgcacaaagtgtacaagggatatggccacgttcctggccgaggacccgaaggttaccctgaccatctttgttgcccgcctctactacttctgggacccagattaccaggaggcgcttcgcagcctgtgtcagaaaagagacggtccgcgtgccaccatgaagatcatgaattatgacgaatttcagcactgttggagcaagttcgtgtacagccaaagagagctatttgagccttggaataatctgcctaaatattatatattactgcacatcatgctgggggagattctcagacactcgatggatccacccacattcactttcaactttaacaatgaaccttgggtcagaggacggcatgagacttacctgtgttatgaggtggagcgcatgcacaatgacacctgggtcctgctgaaccagcgcaggggctttctatgcaaccaggctccacataaacacggtttccttgaaggccgccatgcagagctgtgcttcctggacgtgattcccttttggaagctggacctggaccaggactacagggttacctgcttcacctcctggagcccctgcttcagctgtgcccaggaaatggctaaattcatttcaaaaaacaaacacgtgagcctgtgcatcttcactgcccgcatctatgatgatcaaggaagatgtcaggaggggctgcgcaccctggccgaggctggggccaaaatttcaataatgacatacagtgaatttaagcactgctgggacacctttgtggaccaccagggatgtcccttccagccctgggatggactagatgagcacagccaagacctgagtgggaggctgcgggccattctccagaatcaggaaaactgaaggatgggcctcagtctctaaggaaggcagagacctgggttgagcctcagaataaaagatcttcttccaagaaatgcaaacaggctgttcaccaccatctccagctgatcacagacaccagcaaagcaatgcactcctgaccaagtagattcttttaaaaattagagtgcattactttgaatcaaaaatttatttatatttcaagaataaagtactaagattgtgctcaatacacagaaaagtttcaaacctactaatccagcgacaatttgaatcggttttgtaggtagaggaataaaatgaaatactaaatctttctgta

SEQ ID NO: 2208 - DNA, 1506 bp, Homo sapiens
  source 1..1506: mol_type = unassigned DNA
gtgctccagacaaagatcttagtcgggactagccggccaaggatgaagcctcacttcagaaacacagtggagcgaatgtatcgagacacattctcctacaacttttataatagacccatcctttctcgtcggaataccgtctggctgtgctacgaagtgaaaacaaagggtccctcaaggccccctttggacgcaaagatctttcgaggccaggtgtattccgaacttaagtaccacccagagatgagattcttccactggttcagcaagtggaggaagctgcatcgtgaccaggagtatgaggtcacctggtacatatcctggagcccctgcacaaagtgtacaagggatatggccacgttcctggccgaggacccgaaggttaccctgaccatctttgttgcccgcctctactacttctgggacccagattaccaggaggcgcttcgcagcctgtgtcagaaaagagacggtccgcgtgccaccatgaagatcatgaattatgacgaatttcagcactgttggagcaagttcgtgtacagccaaagagagctatttgagccttggaataatctgcctaaatattatatattactgcacatcatgctgggggagattctcagacactcgatggatccacccacattcactttcaactttaacaatgaaccttgggtcagaggacggcatgagacttacctgtgttatgaggtggagcgcatgcacaatgacacctgggtcctgctgaaccagcgcaggggctttctatgcaaccaggctccacataaacacggtttccttgaaggccgccatgcagagctgtgcttcctggacgtgattcccttttggaagctggacctggaccaggactacagggttacctgcttcacctcctggagcccctgcttcagctgtgcccaggaaatggctaaattcatttcaaaaaacaaacacgtgagcctgtgcatcttcactgcccgcatctatgatgatcaaggaagatgtcaggaggggctgcgcaccctggccgaggctggggccaaaatttcaataatgacatacagtgaatttaagcactgctgggacacctttgtggaccaccagggatgtcccttccagccctgggatggactagatgagcacagccaagacctgagtgggaggctgcgggccattctccagaatcaggaaaactgaaggatgggcctcagtctctaaggaaggcagagacctgggttgagcctcagaataaaagatcttcttccaagaaatgcaaacaggctgttcaccaccatctccagctgatcacagacaccagcaaagcaatgcactcctgaccaagtagattcttttaaaaattagagtgcattactttgaatcaaaaatttatttatatttcaagaataaagtactaagattgtgctcaatacacagaaaagtttcaaacctactaatccagcgacaatttgaatcggttttgtaggtagaggaataaaatgaaatact

SEQ ID NO: 2209 - DNA, 1046 bp, Homo sapiens
  source 1..1046: mol_type = unassigned DNA
tgacttttgggagagctgaccttttgtgacttttgggagagctgccaaaagtgaaacttagtgcctcagacaagcaggggcaagtctgctaaggaagctgtggccagaagcacagatcagaaacacgatggctctgttaacagccgaaacattccgcttacagtttaacaacaagcgccgcctcagaaggccttactacccgaggaaggccctcttgtgttaccagctgacgccgcagaatggctccacgcccacgagaggctactttgaaaacaagaaaaagtgccatgcagaaatttgctttattaacgagatcaagtccatgggactggacgaaacgcagtgctaccaagtcacctgttacctcacgtggagcccctgctcctcctgtgcctgggagctggttgacttcatcaaggctcacgaccatctgaacctgggcatcttcgcctcccgcctgtactaccactggtgcaagccccagcagaaggggctgcggcttctgtgtggatcccaggtcccggtggaggtcatgggcttcccaaagtttgctgactgctgggaaaactttgtggaccacgagaaaccgctttccttcaacccctataagatgttagaggagctagataaaaacagtcgagccataaagcgacggcttgagaggataaagtcctgaagtgtggatgttttagagaatgacttaagaagtttgcagcttggacccgtatcccactcattatcaagaagcaactcaagatgactttccctggggcatgtcagttgcctcatagcctgctggtcctgtaagcaagcactaagctccacagtgccagttccttgccccaacctggccccatccaagtacagaagaccttcctttcctcctttttccatattgctttctgttctaagtgggtgaataattttataattgaaaaaataaagataaagtctgtaaatccagccgggtacggtggctcacgcctgtaatcctagcactttgggaggctgagatgctcggccaataaatttctattgtttatgaa

SEQ ID NO: 2210 - DNA, 1023 bp, Homo sapiens
  source 1..1023: mol_type = unassigned DNA
tgaaacttagtgcctcagacaagcaggggcaagtctgctaaggaagctgtggccagaagcacagatcagaaacacgatggctctgttaacagccgaaacattccgcttacagtttaacaacaagcgccgcctcagaaggccttactacccgaggaaggccctcttgtgttaccagctgacgccgcagaatggctccacgcccacgagaggctactttgaaaacaagaaaaagtgccatgcagaaatttgctttattaacgagatcaagtccatgggactggacgaaacgcagtgctaccaagtcacctgttacctcacgtggagcccctgctcctcctgtgcctgggagctggttgacttcatcaaggctcacgaccatctgaacctgggcatcttcgcctcccgcctgtactaccactggtgcaagccccagcagaaggggctgcggcttctgtgtggatcccaggtcccggtggaggtcatgggcttcccaaagtttgctgactgctgggaaaactttgtggaccacgagaaaccgctttccttcaacccctataagatgttagaggagctagataaaaacagtcgagccataaagcgacggcttgagaggataaagattccaggggtacgtgcgcagggtcgttacatggatatattgtgtgatgctgaggtctgagtcacccaatctactggaacatagcacccaatagcagtcctgaagtgtggatgttttagagaatgacttaagaagtttgcagcttggacccgtatcccactcattatcaagaagcaactcaagatgactttccctggggcatgtcagttgcctcatagcctgctggtcctgtaagcaagcactaagctccacagtgccagttccttgccccaacctggccccatccaagtacagaagaccttcctttcctcctttttccatattgctttctgttctaagtgggtgaataattttataattgaaaaaataaagataaagtctgtaaatccagccgggtacggtgg

SEQ ID NO: 2211 - DNA, 639 bp, Homo sapiens
  source 1..639: mol_type = unassigned DNA
tgacttttgggagagctgaccttttgtgacttttgggagagctgccaaaagtgaaacttagtgcctcagacaagcaggggcaagtctgctaaggaagctgtggccagaagcacagatcagaaacacgatggctctgttaacagccgaaacattccgcttacagtttaacaacaagcgccgcctcagaaggccttactacccgaggaaggccctcttgtgttaccagctgacgccgcagaatggctccacgcccacgagaggctactttgaaaacaagaaaaagtgccatgcagaaatttgctttattaacgagatcaagtccatgggactggacgaaacgcagtgctaccaagtcacctgttacctcacgtggagcccctgctcctcctgtgcctgggagctggttgacttcatcaaggctcacgaccatctgaacctgggcatcttcgcctcccgcctgtactaccactggtgcaagccccagcagaaggggctgcggcttctgtgtggatcccaggtcccggtggaggtcatgggcttcccaaattccaggggtacgtgcgcagggtcgttacatggatatattgtgtgatgctgaggtctgagtcacccaatctactggaacatagcacccaatag

SEQ ID NO: 2212 - DNA, 1047 bp, Homo sapiens
  source 1..1047: mol_type = unassigned DNA
tgacttttgggagagctgaccttttgtgacttttgggagagctgccaaaagtgaaacttagtgcctcagacaagcaggggcaagtctgctaaggaagctgtggccagaagcacagatcagaaacacgatggctctgttaacagccgaaacattccgcttacagtttaacaacaagcgccgcctcagaaggccttactacccgaggaaggccctcttgtgttaccagctgacgccgcagaatggctccacgcccacgagaggctactttgaaaacaagaaaaagtgccatgcagaaatttgctttattaacgagatcaagtccatgggactggacgaaacgcagtgctaccaagtcacctgttacctcacgtggagcccctgctcctcctgtgcctgggagctggttgacttcatcaaggctcacgaccatctgaacctgggcatcttcgcctcccgcctgtactaccactggtgcaagccccagcagaaggggctgcggcttctgtgtggatcccaggtcccggtggaggtcatgggcttcccaaagtttgctgactgctgggaaaactttgtggaccacgagaaaccgctttccttcaacccctataagatgttagaggagctagataaaaacagtcgagccataaagcgacggcttgagaggataaagcagtcctgaagtgtggatgttttagagaatgacttaagaagtttgcagcttggacccgtatcccactcattatcaagaagcaactcaagatgactttccctggggcatgtcagttgcctcatagcctgctggtcctgtaagcaagcactaagctccacagtgccagttccttgccccaacctggccccatccaagtacagaagaccttcctttcctcctttttccatattgctttctgttctaagtgggtgaataattttataattgaaaaaataaagataaagtctgtaaatccagccgggtacggtggctcacgcctgtaatcctagcactttgggaggctgagatgctcggccaataaatttctattgtttatg

SEQ ID NO: 2213 - DNA, 2648 bp, Homo sapiens
  source 1..2648: mol_type = unassigned DNA
agtgttcttagaggtagccacacctcagcaagggctttctaacttggaacagcaaagttcaaatgaacgaatagacacaaactgtgaaagagtcctgaacccattacaaggtgaatctttacagcacaattgccttctgaagctacttgaaacagggcatgggacttaaaggagaaaaaaaaggaaatggaccatctcttctaacacctggaatgtgatccaagcctggagacaaattgatggtttgcagctagaagacagtaaatctagcaatggagcccatatatgaggagtacctagcaaatcatggaacaatagtaaaaccatattactggctaagcttctctctcgattgctctaattgtccttaccatattcgaacaggtgaagaagcaagagtttccctcacagaattttgtcagatttttggattcccttatgggacaacatttcctcaaacaaaacacctcacattttatgaactaaaaacttcttctggtagcctggtgcaaaagggccatgctagcagttgcactgggaattatatccatccagaatcaatgctctttgaaatgaatggttatcttgactcagccatatacaataatgacagcatcaggcatatcattctgtattccaacaactccccttgtaatgaagctaaccactgctgcatcagcaaaatgtataatttcctgattacgtatccaggcatcactcttagtatttatttttctcagctctatcatactgagatggactttcctgcctcagcatggaaccgcgaagctctccggagcctggccagcttatggccgcgggttgttttgagtccaataagtggtgggatctggcattctgttctccacagctttataagtggtgtctcaggatcacatgtttttcagcccattttaactgggagagcactggctgacaggcacaacgcatatgaaatcaatgccataacaggcgtaaaaccttacttcactgatgttcttctccagacaaaaaggaatccaaacacaaaagctcaggaggctttagagagctaccccttaaacaatgcctttcctggacagttttttcaaatgccgagtggacaactccaacccaacctacctccagacctcagggctcctgttgtttttgtgctagtgcctctcagggacttaccaccaatgcatatgggccaaaacccaaataaacccaggaatatcgtaaggcacttaaatatgcctcaaatgtcattccaggaaaccaaggaccttggaaggcttcccactggaaggtcagtggagatagtggaaatcacagaacagtttgcaagtagcaaggaggcagatgaaaagaagaagaagaaagggaagaaataaaatctacattcctacagcatgaaaccaattaccaagggacttattagataggcaataaaaatctggaaactttctctctcagggctgagccaagatggagataaactgatgcactaaaagcaaaccttgaattatttaccatatcaactattataaagttacactattttaaacataatccaaaatgtttccataagcaacttgatctctctcctttattttgaaagtggcagtatcaaaatggaaccattagcagcttgctaatattttgatgcagaaaaggaatctcattattctattttactcacatcatctttccactacaaaagcccatggacaaaatagctacctaaatttgtttcggtaaaaaatttactgtaaaattgaaaaacagcctgaagctactgacattaagtgctgtttgcaggagcaaaccagtgattttctattaattgttaatcatggacagaagattttaggcagctcatttttttctaaagtgattcaaaatagttttgtgtgggaaaaagctcttctgctgattacatatagctataaagattaaaacctagccacctgctcagtttgatcttccccagctcagacctctcccttctgagcagatgatagaggtaagatgatacatgagaacctccaatggctcctgtcatcacatactgtataaaatccaagttcctcttactggctttcaaggatcctcctttaacttcctgttgccttgtctcatcagcaagatcataagtacctacaggtcaagcactgtctctcccttctctttagcttttcccttaggatctagcacattacccagcaaaatgtgagtagcaaggctgaaatgacatctcaataacttcaccaatgattgtaactcagcatcccttctccatcccagctgaaagcctgcttcaccatcctgcaagagatgttttttctttttgttagcatccattcccctttctaatgcagctcccaatgcataatgtgtgttttacttccctctttctgactccatcctcgtcaccagtgaatatttgtaccttctcttaaaatcttcaaaacacacttctaggaagtgctccttgattaatcctctaagcacttaaatgaaagcactttgcttatgcttatttcacatttgctgccacttgcctctttgaaatatgtaaagatacattacaagaaaaatgtacattttctcgtaacttgctattaatttttttctttatatatatatataaagtaatcctaagc

SEQ ID NO: 2214 - DNA, 461 bp, Homo sapiens
  source 1..461: mol_type = unassigned DNA
ctccccagcctgataaaggtcctgcgggcaggacaggacctcccaaccaagccctccagcaaggattcagagtgcccctccggcctcgccatgaggctcttcctgtcgctcccggtcctggtggtggttctgtcgatcgtcttggaaggcccagccccagcccaggggaccccagacgtctccagtgccttggataagctgaaggagtttggaaacacactggaggacaaggctcgggaactcatcagccgcatcaaacagagtgaactttctgccaagatgcgggagtggttttcagagacatttcagaaagtgaaggagaaactcaagattgactcatgaggacctgaagggtgacatcccaggaggggcctctgaaatttcccacaccccagcgcctgtgctgaggactccctccatgtggccccaggtgccaccaataaaaatcctacagaaaattc

SEQ ID NO: 2215 - DNA, 717 bp, Homo sapiens
  source 1..717: mol_type = unassigned DNA
gttgtggctgtggagcggaagtgggtctcaaccactataaatcctctctgtgcccgtccggagctggtgaggacagcctgccagagtctggtctctggacactatgggcacacgactcctcccagctctgtttcttgtcctcctggtattgggatttgaggtccaggggacccaacagccccagcaagatgagatgcctagcccgaccttcctcacccaggtgaaggaatctctctccagttactgggagtcagcaaagacagccgcccagaacctgtacgagaagacatacctgcccgctgtagatgagaaactcagggacttgtacagcaaaagcacagcagccatgagcacttacacaggcatttttactgaccaagttctttctgtgctgaagggagaggagtaacagccagaccccccatcagtggacaaggggagagtcccctactcccctgatcccccaggttcagactgagctcccccttcccagtagctcttgcatcctcctcccaactctagcctgaattcttttcaataaaaaatacaattcaagttgcttctcatggatggcactgcttttctgaggactcaagggccaagatggaggggctgactcagtccagccaacatttaatgagcacctactttatgtatggagctctaacccatgggtccatgggaataaagcagtgaatagtaacaataaataatcgt

SEQ ID NO: 2216 - DNA, 1829 bp, Homo sapiens
  source 1..1829: mol_type = unassigned DNA
gagttgagcacagagggacagaggcacggaacccccagaaatgtccctcctcagaaacaggctccaggccctgcctgccctgtgcctctgcgtgctggtcctggcctgcattggggcatgccagccagaggcccaggaaggaaccctgagccccccaccaaagctaaagatgagtcgctggagcctggtgaggggcaggatgaaggagctgctggagacagtggtgaacaggaccagagacgggtggcaatggttctggagcccgagcaccttccggggcttcatgcagacctactatgacgaccacctgagggacctgggtccgctcaccaaggcctggttcctcgaatccaaagacagcctcttgaagaagacccacagcctgtgccccaggcttgtctgtggggacaaggaccagggttaaaatgttcataaaagccaggtgtggttgtggcgggtgcctgtagtcccagctactcaggaggctgaggtaggatgatggcttgagcccaggagttcgagaccagcctgggcaacacagcgagatctcttgggggtaaaacaaaaagaaaaaaaaaagttcatacttctccaataaataaagtctcacctgtgtccctgtctggatccttccccagtgtggccagaaaaaaacccaccccactgcctcccaggaatcaatgagtagaagaggtgacacctgatggggaaggaagagtagggaggtcgggaagggtatcaaggaataacaccctattgtgggcttgcggagaatgggggacttcaaggcgtgtcagtttcaggagggtgagggcaggagcgtgggtggagtcagcaggtccccatgatggccctcactgagagcttcgcccttgtctcctacaagctctgactccattcccagtgggcacccagcacctccaacccctccacagcccccaacccagcctctgtcggaggcgaattctcagagtgagggttccctgtcacttgagagaaggttccctgtgacgtgaccttgggggacgtcattgccctttctgtccccacccaccccctccgcagttctgttggccaggactttggcctagacaaaggatgggggttgtggctgtggagcggaagtgggtctcaaccactataaatcctctctgtgcccgtccggagctggtgaggacagcctgccagagtctggtctctggacactatgggcacacgactcctcccagctctgtttcttgtcctcctggtattgggatttgaggtccaggggacccaacagccccagcaagatgagatgcctagcccgaccttcctcacccaggtgaaggaatctctctccagttactgggagtcagcaaagacagccgcccagaacctgtacgagaagacatacctgcccgctgtagatgagaaactcagggacttgtacagcaaaagcacagcagccatgagcacttacacaggcatttttactgaccaagttctttctgtgctgaagggagaggagtaacagccagaccccccatcagtggacaaggggagagtcccctactcccctgatcccccaggttcagactgagctcccccttcccagtagctcttgcatcctcctcccaactctagcctgaattcttttcaataaaaaatacaattcaagttgcttctcatggatggcactgcttttctgaggactcaagggccaagatggaggggctgactcagtccagccaacatttaatgagcacctactttatgtatggagctctaacccatgggtccatgggaataaagcagtgaatagtaacaataaataatcgtaacagcaa

SEQ ID NO: 2217 - DNA, 550 bp, Homo sapiens
  source 1..550: mol_type = unassigned DNA
aaccctcctgcctgtctgctcagttcatccctagaggcagctgctccaggaacagaggtgccatgcagccccgggtactccttgttgttgccctcctggcgctcctggcctctgcccgagcttcagaggccgaggatgcctcccttctcagcttcatgcagggttacatgaagcacgccaccaagaccgccaaggatgcactgagcagcgtgcaggagtcccaggtggcccagcaggccaggggctgggtgaccgatggcttcagttccctgaaagactactggagcaccgttaaggacaagttctctgagttctgggatttggaccctgaggtcagaccaacttcagccgtggctgcctgagacctcaataccccaagtccacctgcctatccatcctgcgagctccttgggtcctgcaatctccagggctgcccctgtaggttgcttaaaagggacagtattctcagtgctctcctaccccacctcatgcctggcccccctccaggcatgctggcctcccaataaagctggacaagaagctgctatga

SEQ ID NO: 2218 - DNA, 604 bp, Homo sapiens
  source 1..604: mol_type = unassigned DNA
ttcatccctagaggcagctgctccaggggccacgccacctccccagggaggggtccagaggcatggggacctggggtgcccctcacaggacacttccttgcaggaacagaggtgccatgcagccccgggtactccttgttgttgccctcctggcgctcctggcctctgcccgagcttcagaggccgaggatgcctcccttctcagcttcatgcagggttacatgaagcacgccaccaagaccgccaaggatgcactgagcagcgtgcaggagtcccaggtggcccagcaggccaggggctgggtgaccgatggcttcagttccctgaaagactactggagcaccgttaaggacaagttctctgagttctgggatttggaccctgaggtcagaccaacttcagccgtggctgcctgagacctcaataccccaagtccacctgcctatccatcctgcgagctccttgggtcctgcaatctccagggctgcccctgtaggttgcttaaaagggacagtattctcagtgctctcctaccccacctcatgcctggcccccctccaggcatgctggcctcccaataaagctggacaagaagctgctatga

SEQ ID NO: 2219 - DNA, 359 bp, Homo sapiens
  source 1..359: mol_type = unassigned DNA
ggctgcagggctggcgggacagcagcgtggactcagtctcctagggatttcccaactctcccgcccgcttgctgcatctggacaccctgcctcaggccctcatctccactggtcagcaggtgacctttgcccagcgccctgggtcctcagtgcctgctgccctggagatgatataaaacaggaacagaggtgccatgcagccccgggtactccttgttgttgccctcctggcgctcctggcctctgcccgagcttcagaggccgaggatgcctcccttctcagcttcatgcagggttacatgaagcacgccaccaagaccgccaaggatgcactgagcagcgtgcaggagtcccaggtg

SEQ ID NO: 2220 - DNA, 1761 bp, Homo sapiens
  source 1..1761: mol_type = unassigned DNA
gagttgagcacagagggacagaggcacggaacccccagaaatgtccctcctcagaaacaggctccaggccctgcctgccctgtgcctctgcgtgctggtcctggcctgcattggggcatgccagccagaggcccaggaaggaaccctgagccccccaccaaagctaaagatgagtcgctggagcctggtgaggggcaggatgaaggagctgctggagacagtggtgaacaggaccagagacgggtggcaatggttctggagcccgagcaccttccggggcttcatgcagacctactatgacgaccacctgagggacctgggtccgctcaccaaggcctggttcctcgaatccaaagacagcctcttgaagaagacccacagcctgtgccccaggcttgtctgtggggacaaggaccagggttaaaatgttcataaaagccaggtgtggttgtggcgggtgcctgtagtcccagctactcaggaggctgaggtaaaacaaaaagaaaaaaaaaagttcatacttctccaataaataaagtctcacctgtgtccctgtctggatccttccccagtgtggccagaaaaaaacccaccccactgcctcccaggaatcaatgagtagaagaggtgacacctgatggggaaggaagagtagggaggtcgggaagggtatcaaggaataacaccctattgtgggcttgcggagaatgggggacttcaaggcgtgtcagtttcaggagggtgagggcaggagcgtgggtggagtcagcaggtccccatgatggccctcactgagagcttcgcccttgtctcctacaagctctgactccattcccagtgggcacccagcacctccaacccctccacagcccccaacccagcctctgtcggaggcgaattctcagagtgagggttccctgtcacttgagagaaggttccctgtgacgtgaccttgggggacgtcattgccctttctgtccccacccaccccctccgcagttctgttggccaggactttggcctagacaaaggatgggggttgtggctgtggagcggaagtgggtctcaaccactataaatcctctctgtgcccgtccggagctggtgaggacagcctgccagagtctggtctctggacactatgggcacacgactcctcccagctctgtttcttgtcctcctggtattgggatttgaggtccaggggacccaacagccccagcaagatgagatgcctagcccgaccttcctcacccaggtgaaggaatctctctccagttactgggagtcagcaaagacagccgcccagaacctgtacgagaagacatacctgcccgctgtagatgagaaactcagggacttgtacagcaaaagcacagcagccatgagcacttacacaggcatttttactgaccaagttctttctgtgctgaagggagaggagtaacagccagaccccccatcagtggacaaggggagagtcccctactcccctgatcccccaggttcagactgagctcccccttcccagtagctcttgcatcctcctcccaactctagcctgaattcttttcaataaaaaatacaattcaagttgcttctcatggatggcactgcttttctgaggactcaagggccaagatggaggggctgactcagtccagccaacatttaatgagcacctactttatgtatggagctctaacccatgggtccatgggaataaagcagtgaatagtaacaataaataatcgtaacagc

SEQ ID NO: 2221 - DNA, 613 bp, Homo sapiens
  source 1..613: mol_type = unassigned DNA
gagttgagcacagagggacagaggcacggaacccccagaaatgtccctcctcagaaacaggctccaggccctgcctgccctgtgcctctgcgtgctggtcctggcctgcattggggcatgccagccagaggcccaggaaggaaccctgagccccccaccaaagctaaagatgagtcgctggagcctggtgaggggcaggatgaaggagctgctggagacagtggtgaacaggaccagagacgggtggcaatggttctggagcccgagcaccttccggggcttcatgcagacctactatgacgaccacctgagggacctgggtccgctcaccaaggcctggttcctcgaatccaaagacagcctcttgaagaagacccacagcctgtgccccaggcttgtctgtggggacaaggaccagggttaaaatgttcataaaagccaggtgtggttgtggcgggtgcctgtagtcccagctactcaggaggctgaggtaggatgatggcttgagcccaggagttcgagaccagcctgggcaacacagcgagatctcttgggggtaaaacaaaaagaaaaaaaaaagttcatacttctccaataaataaagtctcacctg

SEQ ID NO: 2222 - DNA, 1130 bp, Homo sapiens
  source 1..1130: mol_type = unassigned DNA
tctctctcgcacacatacccacacacacacacacacacacacacgcgcgcgcgaaaacaatatctcatttcttcttcagggagcagctgtgaaggaaatcgggggaggaggatggacacaacatcccatctttgtgtttcgatacagactaagcttttaggccaaccctcctgactggatgggggcggcgggcgtggcatgcatgaaaagtaaacatcagagacctgaagaagcttataaaatagcttgggagaggccagtcaccaagacaggcatctcaaatcggctgattctgcatctggaaactgccttcatcttgaaagaaaagctccaggtcccttctccagccacccagccccaagatggtgatgctgctgctgctgctttccgcactggctggcctcttcggtgcggcagagggacaagcatttcatcttgggaagtgccccaatcctccggtgcaggagaattttgacgtgaataagtatctcggaagatggtacgaaattgagaagatcccaacaacctttgagaatggacgctgcatccaggccaactactcactaatggaaaacggaaagatcaaagtgttaaaccaggagttgagagctgatggaactgtgaatcaaatcgaaggtgaagccaccccagttaacctcacagagcctgccaagctggaagttaagttttcctggtttatgccatcggcaccgtactggatcctggccaccgactatgagaactatgccctcgtgtattcctgtacctgcatcatccaactttttcacgtggattttgcttggatcttggcaagaaaccctaatctccctccagaaacagtggactctctaaaaaatatcctgacttctaataacattgatgtcaagaaaatgacggtcacagaccaggtgaactgccccaagctctcgtaaccaggttctacagggaggctgcacccactccatgttacttctgcttcgctttcccctaccccccccccataaagacaaaccaatcaaccacgacaaaggaagttgacctgaacatgtaaccatgccctaccctgttaccttgctagctgcaaaataaacttgttgctgacctgctgtgctcgcagtagattccaagtt

SEQ ID NO: 2223 - DNA, 681 bp, Homo sapiens
  source 1..681: mol_type = unassigned DNA
aagacaggcatctcaaatcggctgattctgcatctggaaactgccttcatcttgaaagaaaagtttaccaggaagtaacccgggcaaattcacctcgttggtatgaagagagtgtcagcagaggtcgcctccagaggaggtgctgtggagactgagcgcatagcacccttaaaatcctgggaccagggcttctccacggctccaggtcccttctccagccacccagccccaagatggtgatgctgctgctgctgctttccgcactggctggcctcttcggtgcggcagagggacaagcatttcatcttgggaagtgccccaatcctccggtgcaggagaattttgacgtgaataagtatctcggaagatggtacgaaattgagaagatcccaacaacctttgagaatggacgctgcatccaggccaactactcactaatggaaaacggaaagatcaaagtgttaaaccaggagttgagagctgatggaactgtgaatcaaatcgaaggtgaagccaccccagttaacctcacagagcctgccaagctggaagttaagttttcctggtttatgccatcggcaccgtactggatcctggccaccgactatgagaactatgccctcgtgtattcctgtacctgcatcatccaactttttcacgtggattttgcttggatcttgg

SEQ ID NO: 2224 - DNA, 1263 bp, Homo sapiens
  source 1..1263: mol_type = unassigned DNA
cctcgtgactgggggctggcccagcccgccctatccctgggggagggggcgggacagggggagccctataattggacaagtctgggatccttgagtcctactcagccccagcggaggtgaaggacgtccttccccaggagccgactggccaatcacaggcaggaagatgaaggttctgtgggctgcgttgctggtcacattcctggcaggatgccaggccaaggtggagcaagcggtggagacagagccggagcccgagctgcgccagcagaccgagtggcagagcggccagcgctgggaactggcactgggtcgcttttgggattacctgcgctgggtgcagacactgtctgagcaggtgcaggaggagctgctcagctcccaggtcacccaggaactgagggcgctgatggacgagaccatgaaggagttgaaggcctacaaatcggaactggaggaacaactgaccccggtggcggaggagacgcgggcacggctgtccaaggagctgcaggcggcgcaggcccggctgggcgcggacatggaggacgtgtgcggccgcctggtgcagtaccgcggcgaggtgcaggccatgctcggccagagcaccgaggagctgcgggtgcgcctcgcctcccacctgcgcaagctgcgtaagcggctcctccgcgatgccgatgacctgcagaagcgcctggcagtgtaccaggccggggcccgcgagggcgccgagcgcggcctcagcgccatccgcgagcgcctggggcccctggtggaacagggccgcgtgcgggccgccactgtgggctccctggccggccagccgctacaggagcgggcccaggcctggggcgagcggctgcgcgcgcggatggaggagatgggcagccggacccgcgaccgcctggacgaggtgaaggagcaggtggcggaggtgcgcgccaagctggaggagcaggcccagcagatacgcctgcaggccgaggccttccaggcccgcctcaagagctggttcgagcccctggtggaagacatgcagcgccagtgggccgggctggtggagaaggtgcaggctgccgtgggcaccagcgccgcccctgtgcccagcgacaatcactgaacgccgaagcctgcagccatgcgaccccacgccaccccgtgcctcctgcctccgcgcagcctgcagcgggagaccctgtccccgccccagccgtcctcctggggtggaccctagtttaataaagattcaccaagtttcacgca

SEQ ID NO: 2225 - DNA, 923 bp, Homo sapiens
  source 1..923: mol_type = unassigned DNA
ccgggagaggaagatggaattttctatggaggccgacctggggatggggagataagagaagaccaggagggagttaaatagggaatgggttgggggcggcttggtaaatgtgctgggattaggctgttgcagataatgcaacaaggcttggaaggctaacctggggtgaggccgggttggggccgggctgggggtgggaggagtcctcactggcggttgattgacagtttctccttccccagactggccaatcacaggcaggaagatgaaggttctgtgggctgcgttgctggtcacattcctggcaggatgccaggccaaggtggagcaagcggtggagacagagccggagcccgagctgcgccagcagaccgagtggcagagcggccagcgctgggaactggcactgggtcgcttttgggattacctgcgctgggtgcagacactgtctgagcaggtgcaggaggagctgctcagctcccaggtcacccaggaactgagggcgctgatggacgagaccatgaaggagttgaaggcctacaaatcggaactggaggaacaactgaccccggtggcggaggagacgcgggcacggctgtccaaggagctgcaggcggcgcaggcccggctgggcgcggacatggaggacgtgtgcggccgcctggtgcagtaccgcggcgaggtgcaggccatgctcggccagagcaccgaggagctgcgggtgcgcctcgcctcccacctgcgcaagctgcgtaagcggctcctccgcgatgccgatgacctgcagaagcgcctggcagtgtaccaggccggggcccgcgagggcgccgagcgcggcctcagcgccatccgcgagcgcctggggcccctggtggaacagggccgcgtgcgggccgccactgtgggctccctggccggccagc

SEQ ID NO: 2226 - DNA, 864 bp, Homo sapiens
  source 1..864: mol_type = unassigned DNA
gaggtgaaggacgtccttccccaggagccggtgagaagcgcagtcgggggcacggggatgagctcaggggcctctagaaagagctgggaccctgggaacccctggcctccagactggccaatcacaggcaggaagatgaaggttctgtgggctgcgttgctggtcacattcctggcaggatgccaggccaaggtggagcaagcggtggagacagagccggagcccgagctgcgccagcagaccgagtggcagagcggccagcgctgggaactggcactgggtcgcttttgggattacctgcgctgggtgcagacactgtctgagcaggtgcaggaggagctgctcagctcccaggtcacccaggaactgagggcgctgatggacgagaccatgaaggagttgaaggcctacaaatcggaactggaggaacaactgaccccggtggcggaggagacgcgggcacggctgtccaaggagctgcaggcggcgcaggcccggctgggcgcggacatggaggacgtgtgcggccgcctggtgcagtaccgcggcgaggtgcaggccatgctcggccagagcaccgaggagctgcgggtgcgcctcgcctcccacctgcgcaagctgcgtaagcggctcctccgcgatgccgatgacctgcagaagcgcctggcagtgtaccaggccggggcccgcgagggcgccgagcgcggcctcagcgccatccgcgagcgcctggggcccctggtggaacagggccgcgtgcgggccgccactgtgggctccctggccggccagccgctacaggagcgggcccaggcctggggcgagcggctgcgcgcgcggatggaggagatgggcagccggacc

SEQ ID NO: 2227 - DNA, 737 bp, Homo sapiens
  source 1..737: mol_type = unassigned DNA
gagtcctactcagccccagcggaggtgaaggacgtccttccccaggagccgtttctccttccccagactggccaatcacaggcaggaagatgaaggttctgtgggctgcgttgctggtcacattcctggcaggatgccaggccaaggtggagcaagcggtggagacagagccggagcccgagctgcgccagcagaccgagtggcagagcggccagcgctgggaactggcactgggtcgcttttgggattacctgcgctgggtgcagacactgtctgagcaggtgcaggaggagctgctcagctcccaggtcacccaggaactgagggcgctgatggacgagaccatgaaggagttgaaggcctacaaatcggaactggaggaacaactgaccccggtggcggaggagacgcgggcacggctgtccaaggagctgcaggcggcgcaggcccggctgggcgcggacatggaggacgtgtgcggccgcctggtgcagtaccgcggcgaggtgcaggccatgctcggccagagcaccgaggagctgcgggtgcgcctcgcctcccacctgcgcaagctgcgtaagcggctcctccgcgatgccgatgacctgcagaagcgcctggcagtgtaccaggccggggcccgcgagggcgccgagcgcggcctcagcgccatccgcgagcgcctggggcccctggtggaacagggccgcgtgcgggccgccactgtgggctccctg

SEQ ID NO: 2228 - DNA, 1200 bp, Homo sapiens
  source 1..1200: mol_type = unassigned DNA
ggctctgtctttttagcagacgaaaaccactttggtagtgccagtgtgactcatccacaatgatttctccagtgctcatcttgttctcgagttttctctgccatgttgctattgcaggacggacctgtcccaagccagatgatttaccattttccacagtggtcccgttaaaaacattctatgagccaggagaagagattacgtattcctgcaagccgggctatgtgtcccgaggagggatgagaaagtttatctgccctctcacaggactgtggcccatcaacactctgaaatgtacacccagagtatgtccttttgctggaatcttagaaaatggagccgtacgctatacgacttttgaatatcccaacacgatcagtttttcttgtaacactgggttttatctgaatggcgctgattctgccaagtgcactgaggaaggaaaatggagcccggagcttcctgtctgtgctcccatcatctgccctccaccatccatacctacgtttgcaacacttcgtgtttataagccatcagctggaaacaattccctctatcgggacacagcagtttttgaatgtttgccacaacatgcgatgtttggaaatgatacaattacctgcacgacacatggaaattggactaaattaccagaatgcagggaagtaaaatgcccattcccatcaagaccagacaatggatttgtgaactatcctgcaaaaccaacactttattacaaggataaagccacatttggctgccatgatggatattctctggatggcccggaagaaatagaatgtaccaaactgggaaactggtctgccatgccaagttgtaaagcatcttgtaaagtacctgtgaaaaaagccactgtggtgtaccaaggagagagagtaaagattcaggaaaaatttaagaatggaatgctacatggtgataaagtttctttcttctgcaaaaataaggaaaagaagtgtagctatacagaggatgctcagtgtatagatggcactatcgaagtccccaaatgcttcaaggaacacagttctctggctttttggaaaactgatgcatccgatgtaaagccatgctaaggtggttttcagattccacacaaaatgtcacacttgtttcttgttcatccaaggaacctaattgaaatttaaaaataaagctactgaatttattgccgcaccc

SEQ ID NO: 2229 - DNA, 4640 bp, Homo sapiens
  source 1..4640: mol_type = unassigned DNA
cgggggtgcgcggggcggtcagcgatctgcagcttcgcggggacagagatgtaacccaactcgttcacggatgttccgcgcgccgtgtcaccggctgcgggccaggggtactcggaaggcgcgggcaggagcctggcgaggatgcaccttcccctgccttggaaagggaatggagaggccggcggcccgggagccgcatgggcccgacgcgctgcggcgcttccagggactgctgctggaccgccgaggccggctgcacggccaggtgctgcgcctgcgcgaggtggcccggcgcctggagcgcctgcgcaggcgctccctcgtagccaacgtggccggcagctcgctgagcgcaacgggcgccctcgccgccatcgtggggctctcgctcagcccggtcaccctggggacctcgctgctggtgtcggccgtggggctgggggtggccacagccggaggggccgtcaccatcacgtccgatctctcgctgatcttctgcaactcccgggagctgcggagggtgcaggagatcgcggccacctgccaggaccagatgcgagagatcctgagctgcctcgagtttttctgccgctggcagggctgcggggaccgccagctgctgcagtgcgggaggaacgcctccatcgccctgtacaattctgtctacttcatcgtcttctttggctcacgtggcttcctcatccccaggcgggcggagggggacaccaaggttagccaggccgtgctgaaggccaagattcagaaactggccgagagcctggagtcctgcaccggggctctggacgaactcagcgagcagctggagtctcgggttcagctctgcaccaagtccagtcgtggccacgacctcaagatctctgctgaccagcgtgcagggctgtttttctgagaacatcctttccccctaatgaccgaggccagcaaatcatcctcatgggatgctccagaatttgtagctcccttaggaaaacaccaagctgggttaggagccgaaggcaaaggatgagaaaaactgtttttgaagtgggcaggtccccaaagcccttcttttcccatcactgtgacatctgcctgggcttgagtgctacggacttttcagtcttcctagtggaaaaatgtgacccaaaaactctttttcctttatcaaaaactttctgtctaaacacagctgggcaggcactcctgttttaaagttatttcggggtccctgaccctgccctggtggcttggcctgagactggagagagtgccatcctctgggtcctctccaagtcctactagtctttgaagtcctcaaaatgtgcgtgaggaaggcgtttgcctctattccagaatttctgatacaaagaactccagaatccagagcaaatcagcccttctctgaacgttgtaggatggttcagaacccagagaggaccctggtgctgatatctcctcctcttccctttcccctcagcttacttactcccagatgcggcctgggtatgaagtaggcctttcctgagtggctcccaatccagtcctccaagtactcagaggggaagcccgtgaagccgtcatctaagtcctgctccctcacatgaagctgagggccagatagatggagcgactgccaacttcatttcccgacatcattgtgttcagaagagagtgatgggttttgagttagacagtcctgggcttgagacaggctttgtcactactgtgtgagtgtagccacctaatctctctgagactgtgtaaaacaaagatgataaaatctcaccctgttgtgagatattaaatgagccaaagtgcctagcatgatggtgctggctcatatagtgtagtccctggaatggcaaattaacatcacccaggaacttgttagaaaggcaaattcttggacacaaccctcctgatttatggaatcagaaactctggctgtggggcccagcaacctgagtttaaacaatttctctgggtggttctgcggcacactaaggtttgaaaatcactgcaacaaatgctaacttctaatccccttgatgagctttcacgaagtctcacggcttctctagggactccatggtcttcagagtcgttcacagatgaccaaggacagactgtgtcccagaagccaaaatgagagagagagagagagagcacgcgtacgtgcaccctggggcagtgtctcaccgtatgaacaagggatgtaacactaaaagcccattagggggcagtgtttcccgcctgttgtagaaactggtacagaaaggaatatgaagttcctgaaactgacctttgtctattattaccttctctgaaaagtgccagtccatgtattttttatttattttaagtttgtaatttaatttttaattattgtttagtgtttgcatttaattttatttaatcaccacatttagaaaataataagagcaagtttctaaatgggagactgctgaggctctttgcaagagatgagattaagtttgagtttctaaggcagggcatgagctggaaatagcattgctttccttgattgtctctctccttcagggagattctttttctctagtgttttaagtgatcctttgaagtaagtgtggagagtcttgaatggcaagaccaggagctgagtttaagcttgtaatggaagcttgcattgtgggatatataactgaggaagcatatttatcctgaaggtattttgccagaaggtatcacttgacctggaaaaggaatctatttagttcaggaaagataaaaagtttagaggtatgtgaaggaagcacttagaacttgcaagcctgatgtcctatcaagttatgtcttctgggtgacagacaaaatcgcttgtcttatggtggtgatgtgttgcattttcactttggggtctgtaagaaactgtcagtgaaaatatgtacaattccttcaatttccattcttaacaactgtaatgttgaaaaataagttgaaaagtctttgggaccatacatgcaaaaacggtgcctctgttacttaattatttaatattctataaatgtacccaatctgtccgcacccttcccagtgatggggcagtatgtctgaggaagtataatttcagtactggggtcggggagaggaggtgatgtttctacatttttattttttctataaattgcaattggtctgtatgctggtttattttgaaatttatattggtttcttttcaagctggtgtcatctcctagactgtttcacccagatgctagcattttttttttttttttgagacagagtctcactctgtcacctaggctggagttgcagtggtttgatctcggctcactgcaacctccgactcctgggttcaagcaattcttctgcctcagcctcctgagtagctgggattacagatgtgcaccagcacacccggctaattttttgtatttttagtagagacagggtttcgccatgttggccaggctggtcttgaactcctggccttatgtgatccgcccaccttggcttcccaaagtgctgggattacaggcatgagccacctcgcctggccagatgctagcattttagatcaaacaattcattttagatgaattgttttgtttcacaatcattttaaatcattttagaatgtacttcacattattagttgtgttatggcataaaggtacaaccattccctaactccatcttttattaatgcttaagtttaaattatattcttccaatgcctaagctattccctagaattaaactgggcacttttggaagcagcaacagtaacagcagcagcaaacttttcctctcatattttgggtgtatcaaaagttctagacttttgaagttatgatttcagtggcccactttatttctaaggaagagtgtctactttggaacgatactttgcacatagtaggaactcaagaaatacatttgaataattataattaactgtttagctatcttaatgagaatttgttgacaacaaaagatcatccatcgccttatgtgtgagtaagattggagcctctatcaagatttagtcaagttcagttagattgattctagaaacaaatatttatttctttcttttacggggatgtgaataaggcttttccttaaggccttcattctttaaacaaacaggttgaaatggtatgttgtaaaagagaagacgggagagaggtatttagatgataagtgtacttcacaaaaatgccaaagtttgaaaaataggtatgtttgttctaaatgtttaagtgcttctctgttaggttctggggcttgcaatcatttgaattgttctgtttcacaataaaggagattcactgggttctgcattttcaggattcaatagaactgctccattaaaaaaataatccttagcaagcattcgaatcctaactgctttgatgcacttgccctcgggcacctgtcatttccaatatggtaggtgtcaaagtcaaaagtatttactgggagaaaaaagagaggagtggttgtagaagtctccctaaatcagacatgtcaagcaatcagccaacgtggtgtatttctcattcaatattttagtgtgaattgagacactgagataaagacatcgtgcagagataaatggggatacagttaaa

SEQ ID NO: 2230 - DNA, 4646 bp, Homo sapiens
  source 1..4646: mol_type = unassigned DNA
gcagccattggttctctggaactataaagcacactcatccagaaacagcctcagattttactttcctggaggcagacagaagtgaatgggaatggagaggccggcggcccgggagccgcatgggcccgacgcgctgcggcgcttccagggactgctgctggaccgccgaggccggctgcacggccaggtgctgcgcctgcgcgaggtggcccggcgcctggagcgcctgcgcaggcgctccctcgtagccaacgtggccggcagctcgctgagcgcaacgggcgccctcgccgccatcgtggggctctcgctcagcccggtcaccctggggacctcgctgctggtgtcggccgtggggctgggggtggccacagccggaggggccgtcaccatcacgtccgatctctcgctgatcttctgcaactcccgggagctgcggagggtgcaggagatcgcggccacctgccaggaccagatgcgagagatcctgagctgcctcgagtttttctgccgctggcagggctgcggggaccgccagctgctgcagtgcgggaggaacgcctccatcgccctgtacaattctgtctacttcatcgtcttctttggctcacgtggcttcctcatccccaggcgggcggagggggacaccaaggttagccaggccgtgctgaaggccaagattcagaaactggccgagagcctggagtcctgcaccggggctctggacgaactcagcgagcagctggagtctcgggttcagctctgcaccaagtccagtcgtggccacgacctcaagatctctgctgaccagcgtgcagggctgtttttctgagaacatcctttccccctaatgaccgaggccagcaaatcatcctcatgggatgctccagaatttgtagctcccttaggaaaacaccaagctgggttaggagccgaaggcaaaggatgagaaaaactgtttttgaagtgggcaggtccccaaagcccttcttttcccatcactgtgacatctgcctgggcttgagtgctacggacttttcagtcttcctagtggaaaaatgtgacccaaaaactctttttcctttatcaaaaactttctgtctaaacacagctgggcaggcactcctgttttaaagttatttcggggtccctgaccctgccctggtggcttggcctgagactggagagagtgccatcctctgggtcctctccaagtcctactagtctttgaagtcctcaaaatgtgcgtgaggaaggcgtttgcctctattccagaatttctgatacaaagaactccagaatccagagcaaatcagcccttctctgaacgttgtaggatggttcagaacccagagaggaccctggtgctgatatctcctcctcttccctttcccctcagcttacttactcccagatgcggcctgggtatgaagtaggcctttcctgagtggctcccaatccagtcctccaagtactcagaggggaagcccgtgaagccgtcatctaagtcctgctccctcacatgaagctgagggccagatagatggagcgactgccaacttcatttcccgacatcattgtgttcagaagagagtgatgggttttgagttagacagtcctgggcttgagacaggctttgtcactactgtgtgagtgtagccacctaatctctctgagactgtgtaaaacaaagatgataaaatctcaccctgttgtgagatattaaatgagccaaagtgcctagcatgatggtgctggctcatatagtgtagtccctggaatggcaaattaacatcacccaggaacttgttagaaaggcaaattcttggacacaaccctcctgatttatggaatcagaaactctggctgtggggcccagcaacctgagtttaaacaatttctctgggtggttctgcggcacactaaggtttgaaaatcactgcaacaaatgctaacttctaatccccttgatgagctttcacgaagtctcacggcttctctagggactccatggtcttcagagtcgttcacagatgaccaaggacagactgtgtcccagaagccaaaatgagagagagagagagagagcacgcgtacgtgcaccctggggcagtgtctcaccgtatgaacaagggatgtaacactaaaagcccattagggggcagtgtttcccgcctgttgtagaaactggtacagaaaggaatatgaagttcctgaaactgacctttgtctattattaccttctctgaaaagtgccagtccatgtattttttatttattttaagtttgtaatttaatttttaattattgtttagtgtttgcatttaattttatttaatcaccacatttagaaaataataagagcaagtttctaaatgggagactgctgaggctctttgcaagagatgagattaagtttgagtttctaaggcagggcatgagctggaaatagcattgctttccttgattgtctctctccttcagggagattctttttctctagtgttttaagtgatcctttgaagtaagtgtggagagtcttgaatggcaagaccaggagctgagtttaagcttgtaatggaagcttgcattgtgggatatataactgaggaagcatatttatcctgaaggtattttgccagaaggtatcacttgacctggaaaaggaatctatttagttcaggaaagataaaaagtttagaggtatgtgaaggaagcacttagaacttgcaagcctgatgtcctatcaagttatgtcttctgggtgacagacaaaatcgcttgtcttatggtggtgatgtgttgcattttcactttggggtctgtaagaaactgtcagtgaaaatatgtacaattccttcaatttccattcttaacaactgtaatgttgaaaaataagttgaaaagtctttgggaccatacatgcaaaaacggtgcctctgttacttaattatttaatattctataaatgtacccaatctgtccgcacccttcccagtgatggggcagtatgtctgaggaagtataatttcagtactggggtcggggagaggaggtgatgtttctacatttttattttttctataaattgcaattggtctgtatgctggtttattttgaaatttatattggtttcttttcaagctggtgtcatctcctagactgtttcacccagatgctagcattttttttttttttttgagacagagtctcactctgtcacctaggctggagttgcagtggtttgatctcggctcactgcaacctccgactcctgggttcaagcaattcttctgcctcagcctcctgagtagctgggattacagatgtgcaccagcacacccggctaattttttgtatttttagtagagacagggtttcgccatgttggccaggctggtcttgaactcctggccttatgtgatccgcccaccttggcttcccaaagtgctgggattacaggcatgagccacctcgcctggccagatgctagcattttagatcaaacaattcattttagatgaattgttttgtttcacaatcattttaaatcattttagaatgtacttcacattattagttgtgttatggcataaaggtacaaccattccctaactccatcttttattaatgcttaagtttaaattatattcttccaatgcctaagctattccctagaattaaactgggcacttttggaagcagcaacagtaacagcagcagcaaacttttcctctcatattttgggtgtatcaaaagttctagacttttgaagttatgatttcagtggcccactttatttctaaggaagagtgtctactttggaacgatactttgcacatagtaggaactcaagaaatacatttgaataattataattaactgtttagctatcttaatgagaatttgttgacaacaaaagatcatccatcgccttatgtgtgagtaagattggagcctctatcaagatttagtcaagttcagttagattgattctagaaacaaatatttatttctttcttttacggggatgtgaataaggcttttccttaaggccttcattctttaaacaaacaggttgaaatggtatgttgtaaaagagaagacgggagagaggtatttagatgataagtgtacttcacaaaaatgccaaagtttgaaaaataggtatgtttgttctaaatgtttaagtgcttctctgttaggttctggggcttgcaatcatttgaattgttctgtttcacaataaaggagattcactgggttctgcattttcaggattcaatagaactgctccattaaaaaaataatccttagcaagcattcgaatcctaactgctttgatgcacttgccctcgggcacctgtcatttccaatatggtaggtgtcaaagtcaaaagtatttactgggagaaaaaagagaggagtggttgtagaagtctccctaaatcagacatgtcaagcaatcagccaacgtggtgtatttctcattcaatattttagtgtgaattgagacactgagataaagacatcgtgcagagataaatggggatacagttaaatgtagcaactcttgagttcattttttcccactgtagcaaaattaatgctttctctttattgaaataaattgctcattcctcaaa

SEQ ID NO: 2231 - DNA, 3000 bp, Homo sapiens
  source 1..3000: mol_type = unassigned DNA
actttccctttcgaattcctcggtatatcttggggactggaggacctgtctggttattatacagacgcataactggaggtgggatccacacagctcagaacagctggatcttgctcagtctctgccaggggaagattccttgacttctggggtgatggagaagaaacaggctgtgctgtgtccctaatgggaaacgtggctgagacaggggagtgagaagggtgcgttgcagaatggtgcctgtggcatgatgccagctttgcaatcatgagattcaaaagccacactgtggaattgaggaggccctgcagcgacatggagggagctgctttgctgagagtctctgtcctctgcatctggatgagtgcacttttccttggtgtgggagtgagggcagaggaagctggagcgagggtgcaacaaaacgttccaagtgggacagatactggagatcctcaaagtaagcccctcggtgactgggctgctggcaccatggacccagagagcagtatctttattgaggatgccattaagtatttcaaggaaaaagtgagcacacagaatctgctactcctgctgactgataatgaggcctggaacggattcgtggctgctgctgaactgcccaggaatgaggcagatgagctccgtaaagctctggacaaccttgcaagacaaatgatcatgaaagacaaaaactggcacgataaaggccagcagtacagaaactggtttctgaaagagtttcctcggttgaaaagtgagcttgaggataacataagaaggctccgtgcccttgcagatggggttcagaaggtccacaaaggcaccaccatcgccaatgtggtgtctggctctctcagcatttcctctggcatcctgaccctcgtcggcatgggtctggcacccttcacagagggaggcagccttgtactcttggaacctgggatggagttgggaatcacagccgctttgaccgggattaccagcagtaccatggactacggaaagaagtggtggacacaagcccaagcccacgacctggtcatcaaaagccttgacaaattgaaggaggtgagggagtttttgggtgagaacatatccaactttctttccttagctggcaatacttaccaactcacacgaggcattgggaaggacatccgtgccctcagacgagccagagccaatcttcagtcagtaccgcatgcctcagcctcacgcccccgggtcactgagccaatctcagctgaaagcggtgaacaggtggagagggttaatgaacccagcatcctggaaatgagcagaggagtcaagctcacggatgtggcccctgtaagcttctttcttgtgctggatgtagtctacctcgtgtacgaatcaaagcacttacatgagggggcaaagtcagagacagctgaggagctgaagaaggtggctcaggagctggaggagaagctaaacattctcaacaataattataagattctgcaggcggaccaagaactgtgaccacagggcagggcagccaccaggagagatatgcctggcaggggccaggacaaaatgcaaacttttttttttttctgagacagagtcttgctctgtcgccaagttggagtgcaatggtgcgatctcagctcactgcaagctctgcctcccgtgttcaagcgattctcctgccttggcctcccaagtagctgggactacaggcgcctaccaccatgcccagctaatttttgtatttttaatagagatggggtttcaccatgttggccaggatggtctcgatctcctgacctcttgatctgcccaccttggcctcccaaagtgctgggattacaggcgtgagccatcgcttttgacccaaatgcaaacattttattagggggataaagagggtgaggtaaagtttatggaactgagtgttagggactttggcatttccatagctgagcacagcaggggaggggttaatgcagatggcagtgcagcaaggagaaggcaggaacattggagcctgcaataagggaaaaatgggaactggagagtgtggggaatgggaagaagcagtttactttagactaaagaatatattggggggccgggtgtagtggctcatgcctgtaatccgagcactttgggaggccaaggcgggcggatcacgaggtcaggagatcgagaccatcctggctaacacagtgaaaccccgtctctactaaaaatacaaaaaattagccgggcatggtggcgggcgcctgtagttccagctaactgggcggctgaggcaggagaatggcgtgaacctgggaggtggagcttgcagtgagccgagatatcgccactgcactccagcctgggtgacagagcgagactccatctcaaaaaaaaaaaaaaaaagaatatattgacggaagaatagagaggaggcttgaaggaaccagcaatgagaaggccaggaaaagaaagagctgaaaatggagaaagcccaagagttagaacagttggatacaggagaagaaacagcggctccactacagacccagccccaggttcaatgtcctccgaagaatgaagtctttccctggtgatggtcccctgccctgtctttccagcatccactctcccttgtcctcctgggggcatatctcagtcaggcagcggcttcctgatgatggtcattggggtggttgtcatgtgatgggtcccctccaggttactaaagggtgcatgtcccctgcttgaacactgaagggcaggtggtgggccatggccatggtccccagctgaggagcaggtgtccctgagaacccaaacttcccagagagtatgtgagaaccaaccaatgaaaacagtcccatcgctcttacccggtaagtaaacagtcagaaaattagcatgaaagcagtttagcattgggaggaagctcagatctctagagctgtcttgtcgccgcccaggattgacctgtgtgtaagtcccaataaactcacctactca

SEQ ID NO: 2232 - DNA, 1223 bp, Homo sapiens
  source 1..1223: mol_type = unassigned DNA
tatacagacgcataactggaggtgggatccacacagctcagaacagctggatcttgctcagtctctgccaggggaagattccttgagagcagtatctttattgaggatgccattaagtatttcaaggaaaaagtgagcacacagaatctgctactcctgctgactgataatgaggcctggaacggattcgtggctgctgctgaactgcccaggaatgaggcagatgagctccgtaaagctctggacaaccttgcaagacaaatgatcatgaaagacaaaaactggcacgataaaggccagcagtacagaaactggtttctgaaagagtttcctcggttgaaaagtgagcttgaggataacataagaaggctccgtgcccttgcagatggggttcagaaggtccacaaaggcaccaccatcgccaatgtggtgtctggctctctcagcatttcctctggcatcctgaccctcgtcggcatgggtctggcacccttcacagagggaggcagccttgtactcttggaacctgggatggagttgggaatcacagccgctttgaccgggattaccagcagtaccatggactacggaaagaagtggtggacacaagcccaagcccacgacctggtcatcaaaagccttgacaaattgaaggaggtgagggagtttttgggtgagaacatatccaactttctttccttagctggcaatacttaccaactcacacgaggcattgggaaggacatccgtgccctcagacgagccagagccaatcttcagtcagtaccgcatgcctcagcctcacgcccccgggtcactgagccaatctcagctgaaagcggtgaacaggtggagagggttaatgaacccagcatcctggaaatgagcagaggagtcaagctcacggatgtggcccctgtaagcttctttcttgtgctggatgtagtctacctcgtgtacgaatcaaagcacttacatgagggggcaaagtcagagacagctgaggagctgaagaaggtggctcaggagctggaggagaagctaaacattctcaacaataattataagattctgcaggcggaccaagaactgtgaccacagggcagggcagccaccaggagagatatgcctggcaggggccaggacaaaatgcaaacttttttttttttctgagacagagtcttgctctgtcgccaagttggagtgcaatggtgcgatctcag

SEQ ID NO: 2233 - DNA, 2918 bp, Homo sapiens
  source 1..2918: mol_type = unassigned DNA
tggactgaaggtggaggggagcgtgtttgctgtgcttggtcatgagctgctgggaagttgtgactttcactttccctttcgaattcctcggtatatcttggggactggaggacctgtctggttattatacagacgcataactggaggtgggatccacacagctcagaacagctggatcttgctcagtctctgccaggggaagattccttggaggaggccctgcagcgacatggagggagctgctttgctgagagtctctgtcctctgcatctggatgagtgcacttttccttggtgtgggagtgagggcagaggaagctggagcgagggtgcaacaaaacgttccaagtgggacagatactggagatcctcaaagtaagcccctcggtgactgggctgctggcaccatggacccagagagcagtatctttattgaggatgccattaagtatttcaaggaaaaagtgagcacacagaatctgctactcctgctgactgataatgaggcctggaacggattcgtggctgctgctgaactgcccaggaatgaggcagatgagctccgtaaagctctggacaaccttgcaagacaaatgatcatgaaagacaaaaactggcacgataaaggccagcagtacagaaactggtttctgaaagagtttcctcggttgaaaagtgagcttgaggataacataagaaggctccgtgcccttgcagatggggttcagaaggtccacaaaggcaccaccatcgccaatgtggtgtctggctctctcagcatttcctctggcatcctgaccctcgtcggcatgggtctggcacccttcacagagggaggcagccttgtactcttggaacctgggatggagttgggaatcacagccgctttgaccgggattaccagcagtaccatggactacggaaagaagtggtggacacaagcccaagcccacgacctggtcatcaaaagccttgacaaattgaaggaggtgagggagtttttgggtgagaacatatccaactttctttccttagctggcaatacttaccaactcacacgaggcattgggaaggacatccgtgccctcagacgagccagagccaatcttcagtcagtaccgcatgcctcagcctcacgcccccgggtcactgagccaatctcagctgaaagcggtgaacaggtggagagggttaatgaacccagcatcctggaaatgagcagaggagtcaagctcacggatgtggcccctgtaagcttctttcttgtgctggatgtagtctacctcgtgtacgaatcaaagcacttacatgagggggcaaagtcagagacagctgaggagctgaagaaggtggctcaggagctggaggagaagctaaacattctcaacaataattataagattctgcaggcggaccaagaactgtgaccacagggcagggcagccaccaggagagatatgcctggcaggggccaggacaaaatgcaaacttttttttttttctgagacagagtcttgctctgtcgccaagttggagtgcaatggtgcgatctcagctcactgcaagctctgcctcccgtgttcaagcgattctcctgccttggcctcccaagtagctgggactacaggcgcctaccaccatgcccagctaatttttgtatttttaatagagatggggtttcaccatgttggccaggatggtctcgatctcctgacctcttgatctgcccaccttggcctcccaaagtgctgggattacaggcgtgagccatcgcttttgacccaaatgcaaacattttattagggggataaagagggtgaggtaaagtttatggaactgagtgttagggactttggcatttccatagctgagcacagcaggggaggggttaatgcagatggcagtgcagcaaggagaaggcaggaacattggagcctgcaataagggaaaaatgggaactggagagtgtggggaatgggaagaagcagtttactttagactaaagaatatattggggggccgggtgtagtggctcatgcctgtaatccgagcactttgggaggccaaggcgggcggatcacgaggtcaggagatcgagaccatcctggctaacacagtgaaaccccgtctctactaaaaatacaaaaaattagccgggcatggtggcgggcgcctgtagttccagctaactgggcggctgaggcaggagaatggcgtgaacctgggaggtggagcttgcagtgagccgagatatcgccactgcactccagcctgggtgacagagcgagactccatctcaaaaaaaaaaaaaaaaagaatatattgacggaagaatagagaggaggcttgaaggaaccagcaatgagaaggccaggaaaagaaagagctgaaaatggagaaagcccaagagttagaacagttggatacaggagaagaaacagcggctccactacagacccagccccaggttcaatgtcctccgaagaatgaagtctttccctggtgatggtcccctgccctgtctttccagcatccactctcccttgtcctcctgggggcatatctcagtcaggcagcggcttcctgatgatggtcattggggtggttgtcatgtgatgggtcccctccaggttactaaagggtgcatgtcccctgcttgaacactgaagggcaggtggtgggccatggccatggtccccagctgaggagcaggtgtccctgagaacccaaacttcccagagagtatgtgagaaccaaccaatgaaaacagtcccatcgctcttacccggtaagtaaacagtcagaaaattagcatgaaagcagtttagcattgggaggaagctcagatctctagagctgtcttgtcgccgcccaggattgacctgtgtgtaagtcccaataaactcacctactcatcaa

SEQ ID NO: 2234 - DNA, 1564 bp, Homo sapiens
  source 1..1564: mol_type = unassigned DNA
gacgcataactggaggtgggatccacacagctcagaacagctggatcttgctcagtctctgccaggggaagattccttggaggaggccctgcagcgacatggagggagctgctttgctgagagtctctgtcctctgcatctggatgagtgcacttttccttggtgtgggagtgagggcagaggaagctggagcgagggtgcaacaaaacgttccaagtgggacagatactggagatcctcaaagtaagcccctcggtgactgggctgctggcaccatggacccagagagcagtatctttattgaggatgccattaagtatttcaaggaaaaagtgagcacacagaatctgctactcctgctgactgataatgaggcctggaacggattcgtggctgctgctgaactgcccaggaatgaggcagatgagctccgtaaagctctggacaaccttgcaagacaaatgatcatgaaagacaaaaactggcacgataaaggccagcagtacagaaactggtttctgaaagagtttcctcggttgaaaagtgagcttgaggataacataagaaggctccgtgcccttgcagatggggttcagaaggtccacaaaggcaccaccatcgccaatgtggtgtctggctctctcagcatttcctctggcatcctgaccctcgtcggcatgggtctggcacccttcacagagggaggcagccttgtactcttggaacctgggatggagttgggaatcacagccgctttgaccgggattaccagcagtaccatggactacggaaagaagtggtggacacaagcccaagcccacgacctggtcatcaaaagccttgacaaattgaaggaggtgagggagtttttgggtgagaacatatccaactttctttccttagctggcaatacttaccaactcacacgaggcattgggaaggacatccgtgccctcagacgagccagagccaatcttcagtcagtaccgcatgcctcagcctcacgcccccgggtcactgagccaatctcagctgaaagcggtgaacaggtggagagggttaatgaacccagcatcctggaaatgagcagaggagtcaagctcacggatgtggcccctgtaagcttctttcttgtgctggatgtagtctacctcgtgtacgaatcaaagcacttacatgagggggcaaagtcagagacagctgaggagctgaagaaggtggctcaggagctggaggagaagctaaacattctcaacaataattataagattctgcaggcggaccaagaactgtgaccacagggcagggcagccaccaggagagatatgcctggcaggggccaggacaaaatgcaaacttttttttttttagcgagactccatctcaaaaaaaaaaaaaaaaagaatatattgacggaagaatagagaggaggcttgaaggaaccagcaatgagaaggccaggaaaagaaagagctgaaaatggagaaagcccaagagttagaacagttggatacaggagaagaaacagcggctccactacagacccagccccaggttcaatgtc

SEQ ID NO: 2235 - DNA, 2040 bp, Homo sapiens
  source 1..2040: mol_type = unassigned DNA
ctggaggtgggatccacacagctcagaacagctggatcttgctcagtctctgccaggggaagattccttggaggaggccctgcagcgacatggagggagctgctttgctgagagtctctgtcctctgcatctggatgagtgcacttttccttggtgtgggagtgagggcagaggaagctggagcgagggtgcaacaaaacgttccaagtgggacagatactggagatcctcaaagtaagcccctcggtgactgggctgctggcaccatggacccagagagcagtatctttattgaggatgccattaagtatttcaaggaaaaagtgagcacacagaatctgctactcctgctgactgataatgaggcctggaacggattcgtggctgctgctgaactgcccaggaatgaggcagatgagctccgtaaagctctggacaaccttgcaagacaaatgatcatgaaagacaaaaactggcacgataaaggccagcagtacagaaactggtttctgaaagagtttcctcggttgaaaagtgagcttgaggataacataagaaggctccgtgcccttgcagatggggttcagaaggtccacaaaggcaccaccatcgccaatgtggtgtctggctctctcagcatttcctctggcatcctgaccctcgtcggcatgggtctggcacccttcacagagggaggcagccttgtactcttggaacctgggatggagttgggaatcacagccgctttgaccgggattaccagcagtaccatggactacggaaagaagtggtggacacaagcccaagcccacgacctggtcatcaaaagccttgacaaattgaaggaggtgagggagtttttgggtgagaacatatccaactttctttccttagctggcaatacttaccaactcacacgaggcattgggaaggacatccgtgccctcagacgagccagagccaatcttcagtcagtaccgcatgcctcagcctcacgcccccgggtcactgagccaatctcagctgaaagcggtgaacaggtggagagggttaatgaacccagcatcctggaaatgagcagaggagtcaagctcacggatgtggcccctgtaagcttctttcttgtgctggatgtagtctacctcgtgtacgaatcaaagcacttacatgagggggcaaagtcagagacagctgaggagctgaagaaggtggctcaggagctggaggagaagctaaacattctcaacaataattataagattctgcaggcggaccaagaactgtgaccacagggcagggcagccaccaggagagatatgcctggcaggggccaggacaaaatgcaaacttttttttttttctgagacagagtcttgctctgtcgccaacttgcagtgagccgagatatcgccactgcactccagcctgggtgacagagcgagactccatctcaaaaaaaaaaaaaaaaagaatatattgacggaagaatagagaggaggcttgaaggaaccagcaatgagaaggccaggaaaagaaagagctgaaaatggagaaagcccaagagttagaacagttggatacaggagaagaaacagcggctccactacagacccagccccaggttcaatgtcctccgaagaatgaagtctttccctggtgatggtcccctgccctgtctttccagcatccactctcccttgtcctcctgggggcatatctcagtcaggcagcggcttcctgatgatggtcattggggtggttgtcatgtgatgggtcccctccaggttactaaagggtgcatgtcccctgcttgaacactgaagggcaggtggtgggccatggccatggtccccagctgaggagcaggtgtccctgagaacccaaacttcccagagagtatgtgagaaccaaccaatgaaaacagtcccatcgctcttacccggtaagtaaacagtcagaaaattagcatgaaagcagtttagcattgggaggaagctcagatctctagagctgtcttgtcgccgcccaggattgacctgt

SEQ ID NO: 2236 - DNA, 2901 bp, Homo sapiens
  source 1..2901: mol_type = unassigned DNA
gactttcactttccctttcgaattcctcggtatatcttggggactggaggacctgtctggttattatacagacgcataactggaggtgggatccacacagctcagaacagctggatcttgctcagtctctgccaggggaagattccttggaggagcacactgtctcaacccctcttttcctgctcaaggaggaggccctgcagcgacatggagggagctgctttgctgagagtctctgtcctctgcatctggatgagtgcacttttccttggtgtgggagtgagggcagaggaagctggagcgagggtgcaacaaaacgttccaagtgggacagatactggagatcctcaaagtaagcccctcggtgactgggctgctggcaccatggacccagagagcagtatctttattgaggatgccattaagtatttcaaggaaaaagtgagcacacagaatctgctactcctgctgactgataatgaggcctggaacggattcgtggctgctgctgaactgcccaggaatgaggcagatgagctccgtaaagctctggacaaccttgcaagacaaatgatcatgaaagacaaaaactggcacgataaaggccagcagtacagaaactggtttctgaaagagtttcctcggttgaaaagtgagcttgaggataacataagaaggctccgtgcccttgcagatggggttcagaaggtccacaaaggcaccaccatcgccaatgtggtgtctggctctctcagcatttcctctggcatcctgaccctcgtcggcatgggtctggcacccttcacagagggaggcagccttgtactcttggaacctgggatggagttgggaatcacagccgctttgaccgggattaccagcagtaccatggactacggaaagaagtggtggacacaagcccaagcccacgacctggtcatcaaaagccttgacaaattgaaggaggtgagggagtttttgggtgagaacatatccaactttctttccttagctggcaatacttaccaactcacacgaggcattgggaaggacatccgtgccctcagacgagccagagccaatcttcagtcagtaccgcatgcctcagcctcacgcccccgggtcactgagccaatctcagctgaaagcggtgaacaggtggagagggttaatgaacccagcatcctggaaatgagcagaggagtcaagctcacggatgtggcccctgtaagcttctttcttgtgctggatgtagtctacctcgtgtacgaatcaaagcacttacatgagggggcaaagtcagagacagctgaggagctgaagaaggtggctcaggagctggaggagaagctaaacattctcaacaataattataagattctgcaggcggaccaagaactgtgaccacagggcagggcagccaccaggagagatatgcctggcaggggccaggacaaaatgcaaacttttttttttttctgagacagagtcttgctctgtcgccaagttggagtgcaatggtgcgatctcagctcactgcaagctctgcctcccgtgttcaagcgattctcctgccttggcctcccaagtagctgggactacaggcgcctaccaccatgcccagctaatttttgtatttttaatagagatggggtttcaccatgttggccaggatggtctcgatctcctgacctcttgatctgcccaccttggcctcccaaagtgctgggattacaggcgtgagccatcgcttttgacccaaatgcaaacattttattagggggataaagagggtgaggtaaagtttatggaactgagtgttagggactttggcatttccatagctgagcacagcaggggaggggttaatgcagatggcagtgcagcaaggagaaggcaggaacattggagcctgcaataagggaaaaatgggaactggagagtgtggggaatgggaagaagcagtttactttagactaaagaatatattggggggccgggtgtagtggctcatgcctgtaatccgagcactttgggaggccaaggcgggcggatcacgaggtcaggagatcgagaccatcctggctaacacagtgaaaccccgtctctactaaaaatacaaaaaattagccgggcatggtggcgggcgcctgtagttccagctaactgggcggctgaggcaggagaatggcgtgaacctgggaggtggagcttgcagtgagccgagatatcgccactgcactccagcctgggtgacagagcgagactccatctcaaaaaaaaaaaaaaaaagaatatattgacggaagaatagagaggaggcttgaaggaaccagcaatgagaaggccaggaaaagaaagagctgaaaatggagaaagcccaagagttagaacagttggatacaggagaagaaacagcggctccactacagacccagccccaggttcaatgtcctccgaagaatgaagtctttccctggtgatggtcccctgccctgtctttccagcatccactctcccttgtcctcctgggggcatatctcagtcaggcagcggcttcctgatgatggtcattggggtggttgtcatgtgatgggtcccctccaggttactaaagggtgcatgtcccctgcttgaacactgaagggcaggtggtgggccatggccatggtccccagctgaggagcaggtgtccctgagaacccaaacttcccagagagtatgtgagaaccaaccaatgaaaacagtcccatcgctcttacccggtaagtaaacagtcagaaaattagcatgaaagcagtttagcattgggaggaagctcagatctctagagctgtcttgtcgccgcccaggattgacctgtgtgtaagtcccaataaactcacctactcatcaagctgg

SEQ ID NO: 2237 - DNA, 2808 bp, Homo sapiens
  source 1..2808: mol_type = unassigned DNA
gactttcactttccctttcgaattcctcggtatatcttggggactggaggacctgtctggttattatacagacgcataactggaggtgggatccacacagctcagaacagctggatcttgctcagtctctgccaggggaagattccttggaggaggccctgcagcgacatggagggagctgctttgctgagagtctctgtcctctgcatctgggtgcaacaaaacgttccaagtgggacagatactggagatcctcaaagtaagcccctcggtgactgggctgctggcaccatggacccagagagcagtatctttattgaggatgccattaagtatttcaaggaaaaagtgagcacacagaatctgctactcctgctgactgataatgaggcctggaacggattcgtggctgctgctgaactgcccaggaatgaggcagatgagctccgtaaagctctggacaaccttgcaagacaaatgatcatgaaagacaaaaactggcacgataaaggccagcagtacagaaactggtttctgaaagagtttcctcggttgaaaagtgagcttgaggataacataagaaggctccgtgcccttgcagatggggttcagaaggtccacaaaggcaccaccatcgccaatgtggtgtctggctctctcagcatttcctctggcatcctgaccctcgtcggcatgggtctggcacccttcacagagggaggcagccttgtactcttggaacctgggatggagttgggaatcacagccgctttgaccgggattaccagcagtaccatggactacggaaagaagtggtggacacaagcccaagcccacgacctggtcatcaaaagccttgacaaattgaaggaggtgagggagtttttgggtgagaacatatccaactttctttccttagctggcaatacttaccaactcacacgaggcattgggaaggacatccgtgccctcagacgagccagagccaatcttcagtcagtaccgcatgcctcagcctcacgcccccgggtcactgagccaatctcagctgaaagcggtgaacaggtggagagggttaatgaacccagcatcctggaaatgagcagaggagtcaagctcacggatgtggcccctgtaagcttctttcttgtgctggatgtagtctacctcgtgtacgaatcaaagcacttacatgagggggcaaagtcagagacagctgaggagctgaagaaggtggctcaggagctggaggagaagctaaacattctcaacaataattataagattctgcaggcggaccaagaactgtgaccacagggcagggcagccaccaggagagatatgcctggcaggggccaggacaaaatgcaaacttttttttttttctgagacagagtcttgctctgtcgccaagttggagtgcaatggtgcgatctcagctcactgcaagctctgcctcccgtgttcaagcgattctcctgccttggcctcccaagtagctgggactacaggcgcctaccaccatgcccagctaatttttgtatttttaatagagatggggtttcaccatgttggccaggatggtctcgatctcctgacctcttgatctgcccaccttggcctcccaaagtgctgggattacaggcgtgagccatcgcttttgacccaaatgcaaacattttattagggggataaagagggtgaggtaaagtttatggaactgagtgttagggactttggcatttccatagctgagcacagcaggggaggggttaatgcagatggcagtgcagcaaggagaaggcaggaacattggagcctgcaataagggaaaaatgggaactggagagtgtggggaatgggaagaagcagtttactttagactaaagaatatattggggggccgggtgtagtggctcatgcctgtaatccgagcactttgggaggccaaggcgggcggatcacgaggtcaggagatcgagaccatcctggctaacacagtgaaaccccgtctctactaaaaatacaaaaaattagccgggcatggtggcgggcgcctgtagttccagctaactgggcggctgaggcaggagaatggcgtgaacctgggaggtggagcttgcagtgagccgagatatcgccactgcactccagcctgggtgacagagcgagactccatctcaaaaaaaaaaaaaaaaagaatatattgacggaagaatagagaggaggcttgaaggaaccagcaatgagaaggccaggaaaagaaagagctgaaaatggagaaagcccaagagttagaacagttggatacaggagaagaaacagcggctccactacagacccagccccaggttcaatgtcctccgaagaatgaagtctttccctggtgatggtcccctgccctgtctttccagcatccactctcccttgtcctcctgggggcatatctcagtcaggcagcggcttcctgatgatggtcattggggtggttgtcatgtgatgggtcccctccaggttactaaagggtgcatgtcccctgcttgaacactgaagggcaggtggtgggccatggccatggtccccagctgaggagcaggtgtccctgagaacccaaacttcccagagagtatgtgagaaccaaccaatgaaaacagtcccatcgctcttacccggtaagtaaacagtcagaaaattagcatgaaagcagtttagcattgggaggaagctcagatctctagagctgtcttgtcgccgcccaggattgacctgtgtgtaagtcccaataaactcacctactcatcaagctgg

SEQ ID NO: 2238 - DNA, 624 bp, Homo sapiens
  source 1..624: mol_type = unassigned DNA
attatacagacgcataactggaggtgggatccacacagctcagaacagctggatcttgctcagtctctgccaggggaagattccttggaggagcacactgtctcaacccctcttttcctgctcaaggaggaggccctgcagcgacatggagggagctgctttgctgagagtctctgtcctctgcatctggatgagtgcacttttccttggtgtgggagtgagggcagaggaagctggagcgagggtgcaacaaaacgttccaagtgggacagatactggagatcctcaaagtaagcccctcggtgactgggctgctggcaccatggacccagagagcagtatctttattgaggatgccattaagtatttcaaggaaaaagtgagcacacagaatctgctactcctgctgactgataatgaggcctggaacggattcgtggctgctgctgaactgcccaggaatgaggcagatgagctccgtaaagctctggacaaccttgcaagacaaatgatcatgaaagacaaaaactggcacgataaaggccagcagtacagaaactggtttctgaaagagtttcctcggttgaaaagtgagcttgaggataacataagaaggctccgtgc

SEQ ID NO: 2239 - DNA, 541 bp, Homo sapiens
  source 1..541: mol_type = unassigned DNA
atccacacagctcagaacagctggatcttgctcagtctctgccaggggaagattccttggaggagcacactgtctcaacccctcttttcctgctcaaggaggaggccctgcagcgacatggagggagctgctttgctgagagtctctgtcctctgcatctggatgagtgcacttttccttggtgtgggagtgagggcagaggaagctggagcgagggtgcaacaaaacgttccaagtgggacagatactggagatcctcaaagtaagcccctcggtgactgggctgctggcaccatggacccaggcccagctgggtccagaggtgacagtggagagccgtgtaccctgagaccagcctgcagaggacagaggcaacatggaggtgcctcaaggatcagtgctgagggtcccgcccccatgccccgtcgaagaaccccctccactgcccatctgagagtgcccaagaccagcaggaggaatctcctttgcatgagagcagtatctttattgaggatgccattaagtatttcaaggaaaaagt

SEQ ID NO: 2240 - DNA, 566 bp, Homo sapiens
  source 1..566: mol_type = unassigned DNA
attatacagacgcataactggaggtgggatccacacagctcagaacagctggatcttgctcagtctctgccaggggaagattccttgacttctggggtgatggagaagaaacaggctgtgctgtgtccctaatgggaaacgtggctgagacaggggagtgagaagggtgcgttgcagaatggtgcctgtggcatgatgccagctttgcaatcatgagattcaaaagccacactgtggaattgaggagcacactgtctcaacccctcttttcctgctcaaggaggaggccctgcagcgacatggagggagctgctttgctgagagtctctgtcctctgcatctggatgagtgcacttttccttggtgtgggagtgagggcagaggaagctggagcgagggtgcaacaaaacgttccaagtgggacagatactggagatcctcaaagtaagcccctcggtgactgggctgctggcaccatggacccagagagcagtatctttattgaggatgccattaagtatttcaaggaaaaagtgagcacacagaatctgctactcctgctgact

SEQ ID NO: 2241 - DNA, 1033 bp, Homo sapiens
  source 1..1033: mol_type = unassigned DNA
atccacacagctcagaacagctggatcttgctcagtctctgccaggggaagattccttggaggagcacactgtctcaacccctcttttcctgctcaaggaggaggccctgcagcgacatggagggagctgctttgctgagagtctctgtcctctgcatctggatgagtgcacttttccttggtgtgggagtgagggcagaggaagctggagcgagggtgcaacaaaacgttccaagtgggacagatactggagatcctcaaagtaagcccctcggtgactgggctgctggcaccatggacccaggcccagctgggtccagaggtgacagtggagagccgtgtaccctgagaccagcctgcagaggacagaggcaacatggaggtgcctcaaggatcagtgctgagggtcccgcccccatgccccgtcgaagaaccccctccactgcccatctgagagtgcccaagaccagcaggaggaatctcctttgcatgagagcagtatctttattgaggatgccattaagtatttcaaggaaaaagtgagcacacagaatctgctactcctgctgactgataatgaggcctggaacggattcgtggctgctgctgaactgcccaggaatgaggcagatgagctccgtaaagctctggacaaccttgcaagacaaatgatcatgaaagacaaaaactggcacgataaaggccagcagtacagaaactggtttctgaaagagtttcctcggttgaaaagtgagcttgaggataacataagaaggctccgtgcccttgcagatggggttcagaaggtccacaaaggcaccaccatcgccaatgtggtgtctggctctctcagcatttcctctggcatcctgaccctcgtcggcatgggtctggcacccttcacagagggaggcagccttgtactcttggaacctgggatggagttgggaatcacagccgctttgaccgggattaccagcagtaccatggactacggaaagaagtggtggacacaagcccaagcccacgacct

SEQ ID NO: 2242 - DNA, 2685 bp, Homo sapiens
  source 1..2685: mol_type = unassigned DNA
atcagacagtaaaacaggggcagagcctggaattgcactgaggcttgagtctgacttctctcccccacctgctgtgcccttaaactgcagagatcggggcgggggttggggggcaagcggctcagatgggttcaaaaaactccccaggctcaactctggttctgactgcctgagacatgggcagctgacacagcagaccttgaatcctgaggatgtgaggcagggtatatctgggaggccggaggacgtgtctggttattacacagatgcacagctggacgtgggatccacacagctcagaacagttggatcttgctcagtctctgtcagaggaagatcccttggacaagaggaccctgccttggtgtgagagtgagggaagaggaagctggaacgagggttaaggaaaaccttccagtctggacagtgactggagagctccaaggaaagcccctcggtaacccagccgctggcaccatgaacccagagagcagtatctttattgaggattaccttaagtatttccaggaccaagtgagcagagagaatctgctacaactgctgactgatgatgaagcctggaatggattcgtggctgctgctgaactgcccagggatgaggcagatgagctccgtaaagctctgaacaagcttgcaagtcacatggtcatgaaggacaaaaaccgccacgataaagaccagcagcacaggcagtggtttttgaaagagtttcctcggttgaaaagggagcttgaggatcacataaggaagctccgtgcccttgcagaggaggttgagcaggtccacagaggcaccaccattgccaatgtggtgtccaactctgttggcactacctctggcatcctgaccctcctcggcctgggtctggcacccttcacagaaggaatcagttttgtgctcttggacactggcatgggtctgggagcagcagctgctgtggctgggattacctgcagtgtggtagaactagtaaacaaattgcgggcacgagcccaagcccgcaacttggaccaaagcggcaccaatgtagcaaaggtgatgaaggagtttgtgggtgggaacacacccaatgttcttaccttagttgacaattggtaccaagtcacacaagggattgggaggaacatccgtgccatcagacgagccagagccaaccctcagttaggagcgtatgccccacccccgcatatcattgggcgaatctcagctgaaggcggtgaacaggttgagagggttgttgaaggccccgcccaggcaatgagcagaggaaccatgatcgtgggtgcagccactggaggcatcttgcttctgctggatgtggtcagccttgcatatgagtcaaagcacttgcttgagggggcaaagtcagagtcagctgaggagctgaagaagcgggctcaggagctggaggggaagctcaactttctcaccaagatccatgagatgctgcagccaggccaagaccaatgaccccagagcagtgcagccaccagggcagaaatgccgggcacaggccaggacaaaatgcagacttttttttttttttttttttttttttgagatggagtctcgctctatcgcccaggatggagtgcagtggctcaatctcggctcactgcaaactccgcctcccgggttcacaccattctccggcctcagtctcccgagtagctgggactacaggcacctgccaccacgcccggctaatttttttgtattttcactggagacggggtttcactgtgttagccacgatggtctccatctcctgacctcgtgatctgcccacctcggcctcccaaagtgctgggattacaggcgtgagccaccgcgcctggccaaaatgcagacattttattagggggataaggagggcaaggtaaagcttatggaactgagtgttagtgactttggcatttgtgtagctgagcacagcaagggaggggttaatgcagatggcaagtgcaccaaggagaaggcaggaacactggagcctgcaataagggaggagagaggactggagagtgtggggaatgggaagaagtagtttactttggactaaagaatatattgggcgaagaatagagggggagcttgcaggaaccagcaatgagaaggccaggaaaagaaagagctgaaaatggagaaaaccagagttagaactgttggatacaggagaagaaacagcagctccactaccgacccccccccaggtttgatgtccttccaagaataaagtctttccctggtgatggtctctcgctctgtctttccagcatccactctcccttgtccttctgggggtgtatcacagtcagccagtggcttcttcatgatggtggttggggtggttgtcatgtgacgggtcccctccaggttactaaagggtgcatgtcccctgcttgaaccctgagaggcaggtggtaggccatggccacaatccccagctgaggagcaggtgtccctgagaacccaaacttcccagagagtatctgagaaccaaccaatgaaaacagtcccatcgctcttagccggtaagtaaacagtcagaagattagcatgaaagcagtttagcattgggaggaagcacagatctctagagctgtcctgtcgctgcccaggattgacctgtgtgtaagtcccaataaactcacctactcacca

SEQ ID NO: 2243 - DNA, 2544 bp, Homo sapiens
  source 1..2544: mol_type = unassigned DNA
gtgctggggagcagcgtgtttactgtgcttggtcatgagctgctgggaagttgtgactttcactttccctttcgaattccagggtatatctgggaggccggaggacgtgtctggttattacacagatgcacagctggacgtgggatccacacagctcagaacagttggatcttgctcagtctctgtcagaggaagatcccttggacaagaggaccctgccttggtgtgagagtgagggaagaggaagctggaacgagggttaaggaaaaccttccagtctggacagtgactggagagctccaaggaaagcccctcggtaacccagccgctggcaccatgaacccagagagcagtatctttattgaggattaccttaagtatttccaggaccaagtgagcagagagaatctgctacaactgctgactgatgatgaagcctggaatggattcgtggctgctgctgaactgcccagggatgaggcagatgagctccgtaaagctctgaacaagcttgcaagtcacatggtcatgaaggacaaaaaccgccacgataaagaccagcagcacaggcagtggtttttgaaagagtttcctcggttgaaaagggagcttgaggatcacataaggaagctccgtgcccttgcagaggaggttgagcaggtccacagaggcaccaccattgccaatgtggtgtccaactctgttggcactacctctggcatcctgaccctcctcggcctgggtctggcacccttcacagaaggaatcagttttgtgctcttggacactggcatgggtctgggagcagcagctgctgtggctgggattacctgcagtgtggtagaactagtaaacaaattgcgggcacgagcccaagcccgcaacttggaccaaagcggcaccaatgtagcaaaggtgatgaaggagtttgtgggtgggaacacacccaatgttcttaccttagttgacaattggtaccaagtcacacaagggattgggaggaacatccgtgccatcagacgagccagagccaaccctcagttaggagcgtatgccccacccccgcatatcattgggcgaatctcagctgaaggcggtgaacaggttgagagggttgttgaaggccccgcccaggcaatgagcagaggaaccatgatcgtgggtgcagccactggaggcatcttgcttctgctggatgtggtcagccttgcatatgagtcaaagcacttgcttgagggggcaaagtcagagtcagctgaggagctgaagaagcgggctcaggagctggaggggaagctcaactttctcaccaagatccatgagatgctgcagccaggccaagaccaatgaccccagagcagtgcagccaccagggcagaaatgccgggcacaggccaggacaaaatgcagacttttttttttttttttttttttttttgagatggagtctcgctctatcgcccaggatggagtgcagtggctcaatctcggctcactgcaaactccgcctcccgggttcacaccattctccggcctcagtctcccgagtagctgggactacaggcacctgccaccacgcccggctaatttttttgtattttcactggagacggggtttcactgtgttagccacgatggtctccatctcctgacctcgtgatctgcccacctcggcctcccaaagtgctgggattacaggcgtgagccaccgcgcctggccaaaatgcagacattttattagggggataaggagggcaaggtaaagcttatggaactgagtgttagtgactttggcatttgtgtagctgagcacagcaagggaggggttaatgcagatggcaagtgcaccaaggagaaggcaggaacactggagcctgcaataagggaggagagaggactggagagtgtggggaatgggaagaagtagtttactttggactaaagaatatattgggcgaagaatagagggggagcttgcaggaaccagcaatgagaaggccaggaaaagaaagagctgaaaatggagaaaaccagagttagaactgttggatacaggagaagaaacagcagctccactaccgacccccccccaggtttgatgtccttccaagaataaagtctttccctggtgatggtctctcgctctgtctttccagcatccactctcccttgtccttctgggggtgtatcacagtcagccagtggcttcttcatgatggtggttggggtggttgtcatgtgacgggtcccctccaggttactaaagggtgcatgtcccctgcttgaaccctgagaggcaggtggtaggccatggccacaatccccagctgaggagcaggtgtccctgagaacccaaacttcccagagagtatctgagaaccaaccaatgaaaacagtcccatcgctcttagccggtaagtaaacagtcagaagattagcatgaaagcagtttagcattgggaggaagcacagatctctagagctgtcctgtcgctgcccaggattgacctgtgtgtaagtcccaataaactcacctactcacca

SEQ ID NO: 2244 - DNA, 1421 bp, Homo sapiens
  source 1..1421: mol_type = unassigned DNA
attacacagatgcacagctggacgtgggatccacacagctcagaacagttggatcttgctcagtctctgtcagaggaagatcccttgtcaagcctgaggggcagtatccagcctcaacccccagcagaggctccagacaaaggtgggagccaggccaacaatgacccaggaggatgggatcctggatgcagctcctcacaagtattgggcaggacaagaggaccctgccttggtgtgagagtgagggaagaggaagctggaacgagggttaaggaaaaccttccagtctggacagtgactggagagctccaaggaaagcccctcggtaacccagccgctggcaccatgaacccagagagcagtatctttattgaggattaccttaagtatttccaggaccaagtgagcagagagaatctgctacaactgctgactgatgatgaagcctggaatggattcgtggctgctgctgaactgcccagggatgaggcagatgagctccgtaaagctctgaacaagcttgcaagtcacatggtcatgaaggacaaaaaccgccacgataaagaccagcagcacaggcagtggtttttgaaagagtttcctcggttgaaaagggagcttgaggatcacataaggaagctccgtgcccttgcagaggaggttgagcaggtccacagaggcaccaccattgccaatgtggtgtccaactctgttggcactacctctggcatcctgaccctcctcggcctgggtctggcacccttcacagaaggaatcagttttgtgctcttggacactggcatgggtctgggagcagcagctgctgtggctgggattacctgcagtgtggtagaactagtaaacaaattgcgggcacgagcccaagcccgcaacttggaccaaagcggcaccaatgtagcaaaggtgatgaaggagtttgtgggtgggaacacacccaatgttcttaccttagttgacaattggtaccaagtcacacaagggattgggaggaacatccgtgccatcagacgagccagagccaaccctcagttaggagcgtatgccccacccccgcatatcattgggcgaatctcagctgaaggcggtgaacaggttgagagggttgttgaaggccccgcccaggcaatgagcagaggaaccatgatcgtgggtgcagccactggaggcatcttgcttctgctggatgtggtcagccttgcatatgagtcaaagcacttgcttgagggggcaaagtcagagtcagctgaggagctgaagaagcgggctcaggagctggaggggaagctcaactttctcaccaagatccatgagatgctgcagccaggccaagaccaatgaccccagagcagtgcagccaccagggcagaaatgccgggcacaggccaggacaaaatgcagac

SEQ ID NO: 2245 - DNA, 577 bp, Homo sapiens
  source 1..577: mol_type = unassigned DNA
ggtatatctgggaggccggaggacgtgtctggttattacacagatgcacagctggacgtgggatccacacagctcagaacagttggatcttgctcagtctctgtcagaggaagatcccttgaaaagactactgagagccagtaagactgaaagaatggacatcttcatatcctgttagtttgagtgtgaatttgtacagttttcatacagagtggctctaggacaagaggaccctgccttggtgtgagagtgagggaagaggaagctggaacgagggttaaggaaaaccttccagtctggacagtgactggagagctccaaggaaagcccctcggtaacccagccgctggcaccatgaacccagagagcagtatctttattgaggattaccttaagtatttccaggaccaagtgagcagagagaatctgctacaactgctgactgatgatgaagcctggaatggattcgtggctgctgctgaactgcccagggatgaggcagatgagctccgtaaagctctgaacaagcttgcaagtcacatggtcatgaaggacaaaaaccgccacgataaagacc

SEQ ID NO: 2246 - DNA, 611 bp, Homo sapiens
  source 1..611: mol_type = unassigned DNA
ggggaaaacagcttagatgggttcacaaagctccccgggctcagctctggttctgacaccctcagacacggccagctgaccccagaagaaaggacaagaggaccctgccttggtgtgagagtgagggaagaggaagctggaacgagggttaaggaaaaccttccagtctggacagtgactggagagctccaaggaaagcccctcggtaacccagccgctggcaccatgaacccagagagcagtatctttattgaggattaccttaagtatttccaggaccaagtgagcagagagaatctgctacaactgctgactgatgatgaagcctggaatggattcgtggctgctgctgaactgcccagggatgaggcagatgagctccgtaaagctctgaacaagcttgcaagtcacatggtcatgaaggacaaaaaccgccacgataaagaccagcagcacaggcagtggtttttgaaagagtttcctcggttgaaaagggagcttgaggatcacataaggaagctccgtgcccttgcagaggaggttgagcaggtccacagaggcaccaccattgccaatgtggtgtccaactctgttggcactacctctggcat

SEQ ID NO: 2247 - DNA, 2117 bp, Homo sapiens
  source 1..2117: mol_type = unassigned DNA
agcaggagggtgggaccaagggtgctgctggaccaaggatgggactgggccaagggtggggctgggaagcatcctgttttgcatgtttgatcaggagctgctgccaagttgtgactttcactttcccttttgggttccagggtatatctcagagcctggagaacgtgtctggttattatgcagatgcacggctggaggtgggatccacacagctcagaacagctggatcttgctcacactctttcaagagaagcttccttgaaaagaaacgctttactgaagaggccaccaaatacttccgggagagagtcagcccagtgcatctgcaaatcctgctgactaacaatgaagcctggaagagattcgtgactgcggctgaattgcccagggatgaggcagatgctctctacgaagctctgaagaagcttagaacatatgcagctattgaggacgaatatgtgcagcagaaagatgagcagtttagggaatggtttttgaaagagtttccccaagtcaagaggaagatccaggagtccatagaaaagcttcgtgcccttgcaaatggtattgaagaggtccacagaggctgcaccatctccaatgtggtgtccagctccactggcgctgcctctggcatcatgtcccttgctggtcttgttttggcaccatttacagcagggacgagtctggcccttactgcagctggggtagggctgggagcagcgtctgctgtgactgggatcaccaccagcatcgtggagcactcatacacatcatcagcagaagctgaagccagcaggctgactgcaaccagcattgaccgattgaaggtatttaaggaagttatgcgtgacatcacacccaacttactttcccttcttaataattattacgaagccacacaaaccattgggagtgaaatccgtgccatcaggcaagccagagccagggcccgactccctgtgaccacctggcgaatctcagctggaagtggtggtcaagcagagagaacgattgcaggcaccacccgggcagtgagcagaggagcccggatcctgagtgcgaccacttcaggcatcttccttgcactggatgtggtcaaccttgtatacgagtcaaagcacttgcatgagggggcaaagtctgcatctgctgaggagctgaggcggcaggctcaggagctggaggagaatctaatggagctcactcagatctatcagcgtctgaatccatgccatacccactgaccccagaccagtgcagccagcaggggaggtgagccatacacaggccacgacaaaatgcaggcattttattagggggataaagagggcaaggtaaagtttatggagctgagtgttagtgactttggcatttctgtagctgagcacagcaggggaggggttaatgcagatggcaagtgcaccaaggagaaggcaggaatgctggagcctggaataagggaggagaggggactggagagtgtggggaataggaagaagaaatttcctttagactaacgaatatattggggggaggaatagaggggaggtgtgcaggaaccagcaatgagaaggccaggaaaagaaagagctgaaaatgcagaaagccgaagagttagaacttttggatacagcagaagaaacagcggctccactaccgacctgcccccggttcgatgtccttccaagaatgaagtctttccctggtgatggtcccctgccctgtctttccagcatccactctgtcttgtcctcctggaagtgtatctcagtcagccagtggcttcttgatgatggcggtggaggtggtggttgtagtgtgatggatcccctttaggttatttaggggtatatgtcccctgcttgaaccctgaaggccaggtaatgagccatggccattgtccccagctgaggaccaggtgtctctaaaaacccaaacatcctggagagtatgcgagaacctaccaagaaaaacagtctcattactcatatacagcaggcaaagagacagaaaattaactgaaaagcagtttagagactgggggaggccggatctctagagccatcctgctgagtgccctgtgtgtaagtcctaataaactcacctactcacca

SEQ ID NO: 2248 - DNA, 3563 bp, Homo sapiens
  source 1..3563: mol_type = unassigned DNA
actctggggaaaggagggtacaaccacatgtaaattttattataatgatggtataatgaacttggggtgacctgagggcatgtttttgtgttactgggcatgtgcccctttaggagacttccacctgtgccttactttctctttctttgggatgtgctggccacagactttaccaaaaactccatccattaggatggcattaggacggttctggggctaaacttaggtgggccaggggctgtttcactgtcagcctttctactctcttttcttacccactcctagctgctaatgtctatttaactacctaatatttccccctttagagaaaaaaagccaaatttttgggtagatcggtgacaattaatctggctacttcctgctgacaagaggcagtggtaataattgggttctcttttttgctctcttgtagctggtaggttgggcagagaaaagtggtggccatccaaggggcccacgtagatatcagacatggttgagacctcgcggtaaccttgtgtagaatcatttggagttttatggattctaggtgggaagaaacaaaacaaccttgtaaatcaaatgagcatcgtttgaaagctataagttgtataaagctgttttaggaccaagaaagggggctaaccaggaaaaccaggaccagttgttaaatttccaccagtcaaagcctcctgaaactctgttttccattaacttgttggccctgtctgtaatttttttaagttggtttgcactttacctgattggttgatgaaaacagcaatgtttatcaagtgttgcacaagctcccccttgattggctgtgagcaaattaaaagctcatcaatttcataagactatgcttgctaatgaagcaatttgttctgaaagggtattgacctggttagttagattaataatttgttgagtaatttttaagaagagtttctgggcagtaaaaatggagttaaggaggtcctccagttcccgtgccaataccagccagaacgccaattatagtcagtgctgttaaaactcctctttcagttttaccagattgagcgtgtatagggaggggaatgctatcgataagagtgagtttggggatgatgtaaactagggccaaatccccgtttaattagcagacaagcagagatatgccttgtttctatacaaaaatgtgatttgtcatgttaagacaaatatcaacagtgatactaaagtagggtttttccatgctgtgtaagtctgctttaataccctcagaagtggaagtcaaggctagttcatgtaatgggggaacacaggcagtacttgacagaatgaaagaggaatcaaaagcccaattagaggaaggagtgatgggatcccaaccaatattgtgaaattatggggagctgcagttttttgcaatgattttgcccgaagttgtgagactgaaaccagaagttgttatgtttaaaatgatattctggtgtgggtctggggaaaagggtagatccagaatagctggcttctttccacatagtggttctgttggggggcttgggaaatgaataaaacacaaagaagaattagaatatcagggtatatctcagagcctggagaacgtgtctggttattatgcagatgcacggctggaggtgggatccacacagctcagaacagctggatcttgctcacactctttcaagagaagcttccttgaaaagaaacgctttactgaagaggccaccaaatacttccgggagagagtcagcccagtgcatctgcaaatcctgctgactaacaatgaagcctggaagagattcgtgactgcggctgaattgcccagggatgaggcagatgctctctacgaagctctgaagaagcttagaacatatgcagctattgaggacgaatatgtgcagcagaaagatgagcagtttagggaatggtttttgaaagagtttccccaagtcaagaggaagatccaggagtccatagaaaagcttcgtgcccttgcaaatggtattgaagaggtccacagaggctgcaccatctccaatgtggtgtccagctccactggcgctgcctctggcatcatgtcccttgctggtcttgttttggcaccatttacagcagggacgagtctggcccttactgcagctggggtagggctgggagcagcgtctgctgtgactgggatcaccaccagcatcgtggagcactcatacacatcatcagcagaagctgaagccagcaggctgactgcaaccagcattgaccgattgaaggtatttaaggaagttatgcgtgacatcacacccaacttactttcccttcttaataattattacgaagccacacaaaccattgggagtgaaatccgtgccatcaggcaagccagagccagggcccgactccctgtgaccacctggcgaatctcagctggaagtggtggtcaagcagagagaacgattgcaggcaccacccgggcagtgagcagaggagcccggatcctgagtgcgaccacttcaggcatcttccttgcactggatgtggtcaaccttgtatacgagtcaaagcacttgcatgagggggcaaagtctgcatctgctgaggagctgaggcggcaggctcaggagctggaggagaatctaatggagctcactcagatctatcagcgtctgaatccatgccatacccactgaccccagaccagtgcagccagcaggggaggtgagccatacacaggccacgacaaaatgcaggcattttattagggggataaagagggcaaggtaaagtttatggagctgagtgttagtgactttggcatttctgtagctgagcacagcaggggaggggttaatgcagatggcaagtgcaccaaggagaaggcaggaatgctggagcctggaataagggaggagaggggactggagagtgtggggaataggaagaagaaatttcctttagactaacgaatatattggggggaggaatagaggggaggtgtgcaggaaccagcaatgagaaggccaggaaaagaaagagctgaaaatgcagaaagccgaagagttagaacttttggatacagcagaagaaacagcggctccactaccgacctgcccccggttcgatgtccttccaagaatgaagtctttccctggtgatggtcccctgccctgtctttccagcatccactctgtcttgtcctcctggaagtgtatctcagtcagccagtggcttcttgatgatggcggtggaggtggtggttgtagtgtgatggatcccctttaggttatttaggggtatatgtcccctgcttgaaccctgaaggccaggtaatgagccatggccattgtccccagctgaggaccaggtgtctctaaaaacccaaacatcctggagagtatgcgagaacctaccaagaaaaacagtctcattactcatatacagcaggcaaagagacagaaaattaactgaaaagcagtttagagactgggggaggccggatctctagagccatcctgctgagtgccctgtgtgtaagtcctaataaactcacctactcacca

SEQ ID NO: 2249 - DNA, 3626 bp, Homo sapiens
  source 1..3626: mol_type = unassigned DNA
actctggggaaaggagggtacaaccacatgtaaattttattataatgatggtataatgaacttggggtgacctgagggcatgtttttgtgttactgggcatgtgcccctttaggagacttccacctgtgccttactttctctttctttgggatgtgctggccacagactttaccaaaaactccatccattaggatggcattaggacggttctggggctaaacttaggtgggccaggggctgtttcactgtcagcctttctactctcttttcttacccactcctagctgctaatgtctatttaactacctaatatttccccctttagagaaaaaaagccaaatttttgggtagatcggtgacaattaatctggctacttcctgctgacaagaggcagtggtaataattgggttctcttttttgctctcttgtagctggtaggttgggcagagaaaagtggtggccatccaaggggcccacgtagatatcagacatggttgagacctcgcggtaaccttgtgtagaatcatttggagttttatggattctaggtgggaagaaacaaaacaaccttgtaaatcaaatgagcatcgtttgaaagctataagttgtataaagctgttttaggaccaagaaagggggctaaccaggaaaaccaggaccagttgttaaatttccaccagtcaaagcctcctgaaactctgttttccattaacttgttggccctgtctgtaatttttttaagttggtttgcactttacctgattggttgatgaaaacagcaatgtttatcaagtgttgcacaagctcccccttgattggctgtgagcaaattaaaagctcatcaatttcataagactatgcttgctaatgaagcaatttgttctgaaagggtattgacctggttagttagattaataatttgttgagtaatttttaagaagagtttctgggcagtaaaaatggagttaaggaggtcctccagttcccgtgccaataccagccagaacgccaattatagtcagtgctgttaaaactcctctttcagttttaccagattgagcgtgtatagggaggggaatgctatcgataagagtgagtttggggatgatgtaaactagggccaaatccccgtttaattagcagacaagcagagatatgccttgtttctatacaaaaatgtgatttgtcatgttaagacaaatatcaacagtgatactaaagtagggtttttccatgctgtgtaagtctgctttaataccctcagaagtggaagtcaaggctagttcatgtaatgggggaacacaggcagtacttgacagaatgaaagaggaatcaaaagcccaattagaggaaggagtgatgggatcccaaccaatattgtgaaattatggggagctgcagttttttgcaatgattttgcccgaagttgtgagactgaaaccagaagttgttatgtttaaaatgatattctggtgtgggtctggggaaaagggtagatccagaatagctggcttctttccacatagtggttctgttggggggcttgggaaatgaataaaacacaaagaagaattagaatatcaggtgaaggtagcaggtgctcctggcagaagaacccacataaggaagtgtccagaagccacacagggtatatctcagagcctggagaacgtgtctggttattatgcagatgcacggctggaggtgggatccacacagctcagaacagctggatcttgctcacactctttcaagagaagcttccttgaaaagaaacgctttactgaagaggccaccaaatacttccgggagagagtcagcccagtgcatctgcaaatcctgctgactaacaatgaagcctggaagagattcgtgactgcggctgaattgcccagggatgaggcagatgctctctacgaagctctgaagaagcttagaacatatgcagctattgaggacgaatatgtgcagcagaaagatgagcagtttagggaatggtttttgaaagagtttccccaagtcaagaggaagatccaggagtccatagaaaagcttcgtgcccttgcaaatggtattgaagaggtccacagaggctgcaccatctccaatgtggtgtccagctccactggcgctgcctctggcatcatgtcccttgctggtcttgttttggcaccatttacagcagggacgagtctggcccttactgcagctggggtagggctgggagcagcgtctgctgtgactgggatcaccaccagcatcgtggagcactcatacacatcatcagcagaagctgaagccagcaggctgactgcaaccagcattgaccgattgaaggtatttaaggaagttatgcgtgacatcacacccaacttactttcccttcttaataattattacgaagccacacaaaccattgggagtgaaatccgtgccatcaggcaagccagagccagggcccgactccctgtgaccacctggcgaatctcagctggaagtggtggtcaagcagagagaacgattgcaggcaccacccgggcagtgagcagaggagcccggatcctgagtgcgaccacttcaggcatcttccttgcactggatgtggtcaaccttgtatacgagtcaaagcacttgcatgagggggcaaagtctgcatctgctgaggagctgaggcggcaggctcaggagctggaggagaatctaatggagctcactcagatctatcagcgtctgaatccatgccatacccactgaccccagaccagtgcagccagcaggggaggtgagccatacacaggccacgacaaaatgcaggcattttattagggggataaagagggcaaggtaaagtttatggagctgagtgttagtgactttggcatttctgtagctgagcacagcaggggaggggttaatgcagatggcaagtgcaccaaggagaaggcaggaatgctggagcctggaataagggaggagaggggactggagagtgtggggaataggaagaagaaatttcctttagactaacgaatatattggggggaggaatagaggggaggtgtgcaggaaccagcaatgagaaggccaggaaaagaaagagctgaaaatgcagaaagccgaagagttagaacttttggatacagcagaagaaacagcggctccactaccgacctgcccccggttcgatgtccttccaagaatgaagtctttccctggtgatggtcccctgccctgtctttccagcatccactctgtcttgtcctcctggaagtgtatctcagtcagccagtggcttcttgatgatggcggtggaggtggtggttgtagtgtgatggatcccctttaggttatttaggggtatatgtcccctgcttgaaccctgaaggccaggtaatgagccatggccattgtccccagctgaggaccaggtgtctctaaaaacccaaacatcctggagagtatgcgagaacctaccaagaaaaacagtctcattactcatatacagcaggcaaagagacagaaaattaactgaaaagcagtttagagactgggggaggccggatctctagagccatcctgctgagtgccctgtgtgtaagtcctaataaactcacctactcacca

SEQ ID NO: 2250 - DNA, 2220 bp, Homo sapiens
  source 1..2220: mol_type = unassigned DNA
agcaggagggtgggaccaagggtgctgctggaccaaggatgggactgggccaagggtggggctgggaagcatcctgttttgcatgtttgatcaggagctgctgccaagttgtgactttcactttcccttttgggttccagggtatatctcagagcctggagaacgtgtctggttattatgcagatgcacggctggaggtgggatccacacagctcagaacagctggatcttgctcacactctttcaagagaagcttccttgggttaagaaaaaaaacgaacccttccagtcaggtcagtgactggagagctccatggaaagtctctcagtgacctggctgctggcaccatggactcagaaaagaaacgctttactgaagaggccaccaaatacttccgggagagagtcagcccagtgcatctgcaaatcctgctgactaacaatgaagcctggaagagattcgtgactgcggctgaattgcccagggatgaggcagatgctctctacgaagctctgaagaagcttagaacatatgcagctattgaggacgaatatgtgcagcagaaagatgagcagtttagggaatggtttttgaaagagtttccccaagtcaagaggaagatccaggagtccatagaaaagcttcgtgcccttgcaaatggtattgaagaggtccacagaggctgcaccatctccaatgtggtgtccagctccactggcgctgcctctggcatcatgtcccttgctggtcttgttttggcaccatttacagcagggacgagtctggcccttactgcagctggggtagggctgggagcagcgtctgctgtgactgggatcaccaccagcatcgtggagcactcatacacatcatcagcagaagctgaagccagcaggctgactgcaaccagcattgaccgattgaaggtatttaaggaagttatgcgtgacatcacacccaacttactttcccttcttaataattattacgaagccacacaaaccattgggagtgaaatccgtgccatcaggcaagccagagccagggcccgactccctgtgaccacctggcgaatctcagctggaagtggtggtcaagcagagagaacgattgcaggcaccacccgggcagtgagcagaggagcccggatcctgagtgcgaccacttcaggcatcttccttgcactggatgtggtcaaccttgtatacgagtcaaagcacttgcatgagggggcaaagtctgcatctgctgaggagctgaggcggcaggctcaggagctggaggagaatctaatggagctcactcagatctatcagcgtctgaatccatgccatacccactgaccccagaccagtgcagccagcaggggaggtgagccatacacaggccacgacaaaatgcaggcattttattagggggataaagagggcaaggtaaagtttatggagctgagtgttagtgactttggcatttctgtagctgagcacagcaggggaggggttaatgcagatggcaagtgcaccaaggagaaggcaggaatgctggagcctggaataagggaggagaggggactggagagtgtggggaataggaagaagaaatttcctttagactaacgaatatattggggggaggaatagaggggaggtgtgcaggaaccagcaatgagaaggccaggaaaagaaagagctgaaaatgcagaaagccgaagagttagaacttttggatacagcagaagaaacagcggctccactaccgacctgcccccggttcgatgtccttccaagaatgaagtctttccctggtgatggtcccctgccctgtctttccagcatccactctgtcttgtcctcctggaagtgtatctcagtcagccagtggcttcttgatgatggcggtggaggtggtggttgtagtgtgatggatcccctttaggttatttaggggtatatgtcccctgcttgaaccctgaaggccaggtaatgagccatggccattgtccccagctgaggaccaggtgtctctaaaaacccaaacatcctggagagtatgcgagaacctaccaagaaaaacagtctcattactcatatacagcaggcaaagagacagaaaattaactgaaaagcagtttagagactgggggaggccggatctctagagccatcctgctgagtgccctgtgtgtaagtcctaataaactcacctactcaccaagctgg

SEQ ID NO: 2251 - DNA, 3634 bp, Homo sapiens
  source 1..3634: mol_type = unassigned DNA
actctggggaaaggagggtacaaccacatgtaaattttattataatgatggtataatgaacttggggtgacctgagggcatgtttttgtgttactgggcatgtgcccctttaggagacttccacctgtgccttactttctctttctttgggatgtgctggccacagactttaccaaaaactccatccattaggatggcattaggacggttctggggctaaacttaggtgggccaggggctgtttcactgtcagcctttctactctcttttcttacccactcctagctgctaatgtctatttaactacctaatatttccccctttagagaaaaaaagccaaatttttgggtagatcggtgacaattaatctggctacttcctgctgacaagaggcagtggtaataattgggttctcttttttgctctcttgtagctggtaggttgggcagagaaaagtggtggccatccaaggggcccacgtagatatcagacatggttgagacctcgcggtaaccttgtgtagaatcatttggagttttatggattctaggtgggaagaaacaaaacaaccttgtaaatcaaatgagcatcgtttgaaagctataagttgtataaagctgttttaggaccaagaaagggggctaaccaggaaaaccaggaccagttgttaaatttccaccagtcaaagcctcctgaaactctgttttccattaacttgttggccctgtctgtaatttttttaagttggtttgcactttacctgattggttgatgaaaacagcaatgtttatcaagtgttgcacaagctcccccttgattggctgtgagcaaattaaaagctcatcaatttcataagactatgcttgctaatgaagcaatttgttctgaaagggtattgacctggttagttagattaataatttgttgagtaatttttaagaagagtttctgggcagtaaaaatggagttaaggaggtcctccagttcccgtgccaataccagccagaacgccaattatagtcagtgctgttaaaactcctctttcagttttaccagattgagcgtgtatagggaggggaatgctatcgataagagtgagtttggggatgatgtaaactagggccaaatccccgtttaattagcagacaagcagagatatgccttgtttctatacaaaaatgtgatttgtcatgttaagacaaatatcaacagtgatactaaagtagggtttttccatgctgtgtaagtctgctttaataccctcagaagtggaagtcaaggctagttcatgtaatgggggaacacaggcagtacttgacagaatgaaagaggaatcaaaagcccaattagaggaaggagtgatgggatcccaaccaatattgtgaaattatggggagctgcagttttttgcaatgattttgcccgaagttgtgagactgaaaccagaagttgttatgtttaaaatgatattctggtgtgggtctggggaaaagggtagatccagaatagctggcttctttccacatagtggttctgttggggggcttgggaaatgaataaaacacaaagaagaattagaatatcaggtatgtttgcattttttgttgtcagtgactaagctgacacataattgggtggaaaatagggtacaagtgtgattgcaagccttgagaacgtgtctggttattatgcagatgcacggctggaggtgggatccacacagctcagaacagctggatcttgctcacactctttcaagagaagcttccttgaaaagaaacgctttactgaagaggccaccaaatacttccgggagagagtcagcccagtgcatctgcaaatcctgctgactaacaatgaagcctggaagagattcgtgactgcggctgaattgcccagggatgaggcagatgctctctacgaagctctgaagaagcttagaacatatgcagctattgaggacgaatatgtgcagcagaaagatgagcagtttagggaatggtttttgaaagagtttccccaagtcaagaggaagatccaggagtccatagaaaagcttcgtgcccttgcaaatggtattgaagaggtccacagaggctgcaccatctccaatgtggtgtccagctccactggcgctgcctctggcatcatgtcccttgctggtcttgttttggcaccatttacagcagggacgagtctggcccttactgcagctggggtagggctgggagcagcgtctgctgtgactgggatcaccaccagcatcgtggagcactcatacacatcatcagcagaagctgaagccagcaggctgactgcaaccagcattgaccgattgaaggtatttaaggaagttatgcgtgacatcacacccaacttactttcccttcttaataattattacgaagccacacaaaccattgggagtgaaatccgtgccatcaggcaagccagagccagggcccgactccctgtgaccacctggcgaatctcagctggaagtggtggtcaagcagagagaacgattgcaggcaccacccgggcagtgagcagaggagcccggatcctgagtgcgaccacttcaggcatcttccttgcactggatgtggtcaaccttgtatacgagtcaaagcacttgcatgagggggcaaagtctgcatctgctgaggagctgaggcggcaggctcaggagctggaggagaatctaatggagctcactcagatctatcagcgtctgaatccatgccatacccactgaccccagaccagtgcagccagcaggggaggtgagccatacacaggccacgacaaaatgcaggcattttattagggggataaagagggcaaggtaaagtttatggagctgagtgttagtgactttggcatttctgtagctgagcacagcaggggaggggttaatgcagatggcaagtgcaccaaggagaaggcaggaatgctggagcctggaataagggaggagaggggactggagagtgtggggaataggaagaagaaatttcctttagactaacgaatatattggggggaggaatagaggggaggtgtgcaggaaccagcaatgagaaggccaggaaaagaaagagctgaaaatgcagaaagccgaagagttagaacttttggatacagcagaagaaacagcggctccactaccgacctgcccccggttcgatgtccttccaagaatgaagtctttccctggtgatggtcccctgccctgtctttccagcatccactctgtcttgtcctcctggaagtgtatctcagtcagccagtggcttcttgatgatggcggtggaggtggtggttgtagtgtgatggatcccctttaggttatttaggggtatatgtcccctgcttgaaccctgaaggccaggtaatgagccatggccattgtccccagctgaggaccaggtgtctctaaaaacccaaacatcctggagagtatgcgagaacctaccaagaaaaacagtctcattactcatatacagcaggcaaagagacagaaaattaactgaaaagcagtttagagactgggggaggccggatctctagagccatcctgctgagtgccctgtgtgtaagtcctaataaactcacctactcaccaagctgg

SEQ ID NO: 2252 - DNA, 844 bp, Homo sapiens
  source 1..844: mol_type = unassigned DNA
atcttgggggctggaggacgtgtctggttattatataggtgcacagctggaggtgagatccacacagctcagaccagctggatcttgctcagtctctgtcagaggaagatcccttggaggaggccccgcagcgacatggagggagctgctttgctgaaaatctttgtcgtctgcatctggaaccaaaatcacttcccggaattgaccaactggtagactcgcctagaggggacgcactgtgtcctagttgaggctaacagtcagtatccagcctcaacattcagcagaggccccagatcagcgtctgagccaggccaacaatgaccaaggaggatgggatcctgggtgcagctcatcacaagcgtcgggacaagcggacttttccttggtgtgagagtgagggaagagggagctggaatgaggtgcagcaaaaccatccaggctggacagtggctggacagttccaagggtcctctgggcccatcccctccccctgtccctacagctggttacagcagctccttctgtgtccattatgtgaacctgctgcctggagttcttgttctttctgtgacctcccagtatccacatctcagcatggccctctgtcagctggctgctcatgactggccgaggttaagctgtgtttgtgtctgacagaagcgcccatctgatatgaccccagttcagattcatagcttgcagtttcatggggggttacagctgttctgaaggtctggttggttttgtttgcccgggaatgtttcaggtctggtttttattttaattttgctttaatattcaccatccccaccccatcaataaaacacaaatttagtgctgg

SEQ ID NO: 2253 - DNA, 1467 bp, Homo sapiens
  source 1..1467: mol_type = unassigned DNA
gaggtgctggggagcagcgtgtttgctgtgcttgattgtgagctgctgggaagttgtgactttcattttacctttcgaattcctgggtatatcttgggggctggaggacgtgtctggttattatataggtgcacagctggaggtgagatccacacagctcagaccagctggatcttgctcagtctctgtcagaggaagatcccttggaggaggccccgcagcgacatggagggagctgctttgctgaaaatctttgtcgtctgcatctggaaccaaaatcacttcccggaattgaccaactggtagactcgcctagaggggacgcactgtgtcctagttgaggctaacagtcagtatccagcctcaacattcagcagaggccccagatcagcgtctgagccaggccaacaatgaccaaggaggatgggatcctgggtgcagctcatcacaagcgtcggggtgcagcaaaaccatccaggctggacagtggctggacagttccaagaaaagaaacgcttcactgaagaagtcattgaatacttccagaagaaagttagcccagtgcatctgaaaatcctgctgactagcgatgaagcctggaagagatttgtgcgtgtggctgaattgcccagggaagaggcagatgctctctatgaagctctgaagaatcttacaccatatgtggctattgaggacaaagacatgcagcaaaaagaacagcagtttagggagtggtttttgaaatttcctcaaatcagatggaagattcaggagtccatagaaaggcttcgtgtcattgcaaatgagattgaaaaggtccacagaggctgcgtcatcgccaatgtggtgtctggctccactggcatcctgtctgtcattggcgttatgttggcaccatttacagcagggctgagcctgagcattactgcagctggggtagggctgggaatagcatctgccacggctgggatcgcctccagcatcgtggagaacacatacacaaggtcagcagaactcacagccagcaggctgactgcaaccagcactgaccaattggaggcattaagggacattctgcgtgacatcacacccaatgtgctttcttttgcacttgattttgacgaagccacaaaaatgattgcgaatgatgtccatacactcaggagatctaaagccactgttggacgccctttgattgcttggcgatatgtacctataaatgttgttgagacactgagaacacgtggggcccccacccggatagtgagaaaagtagcccggaacctgggcaaggccacttcaggtgtccttgttgtgctggatgtagtcaaccttgtgcaagactcactggacttgcacaagggggcaaaatccgagtctgctgagtcgctgaggcagtgggctcaggagctggaggagaatctcaatgagctcacccatatccatcagagtctaaaagcaggctag

SEQ ID NO: 2254 - DNA, 1278 bp, Homo sapiens
  source 1..1278: mol_type = unassigned DNA
gaggtgctggggagcagcgtgtttgctgtgcttgattgtgagctgctgggaagttgtgactttcattttacctttcgaattcctgggtatatcttgggggctggaggacgtgtctggttattatataggtgcacagctggaggtgagatccacacagctcagaccagctggatcttgctcagtctctgtcagaggaagatcccttggaggaggccccgcagcgacatggagggagctgctttgctgaaaatctttgtcgtctgcatctgggtgcagcaaaaccatccaggctggacagtggctggacagttccaagaaaagaaacgcttcactgaagaagtcattgaatacttccagaagaaagttagcccagtgcatctgaaaatcctgctgactagcgatgaagcctggaagagatttgtgcgtgtggctgaattgcccagggaagaggcagatgctctctatgaagctctgaagaatcttacaccatatgtggctattgaggacaaagacatgcagcaaaaagaacagcagtttagggagtggtttttgaaatttcctcaaatcagatggaagattcaggagtccatagaaaggcttcgtgtcattgcaaatgagattgaaaaggtccacagaggctgcgtcatcgccaatgtggtgtctggctccactggcatcctgtctgtcattggcgttatgttggcaccatttacagcagggctgagcctgagcattactgcagctggggtagggctgggaatagcatctgccacggctgggatcgcctccagcatcgtggagaacacatacacaaggtcagcagaactcacagccagcaggctgactgcaaccagcactgaccaattggaggcattaagggacattctgcgtgacatcacacccaatgtgctttcttttgcacttgattttgacgaagccacaaaaatgattgcgaatgatgtccatacactcaggagatctaaagccactgttggacgccctttgattgcttggcgatatgtacctataaatgttgttgagacactgagaacacgtggggcccccacccggatagtgagaaaagtagcccggaacctgggcaaggccacttcaggtgtccttgttgtgctggatgtagtcaaccttgtgcaagactcactggacttgcacaagggggcaaaatccgagtctgctgagtcgctgaggcagtgggctcaggagctggaggagaatctcaatgagctcacccatatccatcagagtctaaaagcaggctag

SEQ ID NO: 2255 - DNA, 3225 bp, Homo sapiens
  source 1..3225: mol_type = unassigned DNA
gaggtgctggggagcagcgtgtttgctgtgcttgattgtgagctgctgggaagttgtgactttcattttacctttcgaattcctgggtatatcttgggggctggaggacgtgtctggttattatataggtgcacagctggaggtgagatccacacagctcagaccagctggatcttgctcagtctctgtcagaggaagatcccttggaggaggccccgcagcgacatggagggagctgctttgctgaaaatctttgtcgtctgcatctgggtgcagcaaaaccatccaggctggacagtggctggacagttccaagaaaagaaacgcttcactgaagaagtcattgaatacttccagaagaaagttagcccagtgcatctgaaaatcctgctgactagcgatgaagcctggaagagatttgtgcgtgtggctgaattgcccagggaagaggcagatgctctctatgaagctctgaagaatcttacaccatatgtggctattgaggacaaagacatgcagcaaaaagaacagcagtttagggagtggtttttgaaagtttcctcaaatcagatggaagattcaggagtccatagaaaggcttcgtgtcattgcaaatgagattgaaaaggtccacagaggctgcgtcatcgccaatgtggtgtctggctccactggcatcctgtctgtcattggcgttatgttggcaccatttacagcagggctgagcctgagcattactgcagctggggtagggctgggaatagcatctgccacggctgggatcgcctccagcatcgtggagaacacatacacaaggtcagcagaactcacagccagcaggctgactgcaaccagcactgaccaattggaggcattaagggacattctgcgtgacatcacacccaatgtgctttcttttgcacttgattttgacgaagccacaaaaatgattgcgaatgatgtccatacactcaggagatctaaagccactgttggacgccctttgattgcttggcgatatgtacctataaatgttgttgagacactgagaacacgtggggcccccacccggatagtgagaaaagtagcccggaacctgggcaaggccacttcaggtgtccttgttgtgctggatgtagtcaaccttgtgcaagactcactggacttgcacaagggggcaaaatccgagtctgctgagtcgctgaggcagtgggctcaggagctggaggagaatctcaatgagctcacccatatccatcagagtctaaaagcaggctaggcccaattgttgcgggaagtcagggaccccaaacggagggactggctgaagccatggcagaagaacgtggattgtgaagatttcatggacatttattagttccccaaattaatacttttataatttcctatgcctgtctttaccgcaatctctaaacacaaattgtgaagatttcatggacactgatcacttccccaatcaatacccttgtgatttcttatgcctgtctttactttaatctcctaatcctgtcagctgaggaggatgtatgtcacctcaggaccatgtgataattgcgttaactgcacaaattgtagagcatgtgtgtttgaacaatatgaaatctgggcaccttgaaaaaagaacaggataacagcaattgttcagggaataagagagataaccttaaactctgaccaacagtgagcctggtggaacagagtcatatttctcttctttcaaaagcaaatgggagaaatatcgctgaattctttttctcagcaaggaacatccctgagaaagagaatgcacccctgagggtgggtctataaatggcctccttgggtgtggccatcttctatggtcgagactgtagggatgaaataaaccccagtctcccatagcgctcccaggcttattaggaagaggaaattcccgcctaataaattttggtcagaccggttgctctcaaaaccctgtctcctgataagatgttatcaatgacaatggtgcccgaaacctcattagcaattttaatttctccccggtcctgtgttcctgtgatctcgccctgcctccacttgccttgtgatattctattaccttgtgaagtaggtgatctttgtgacccacacccacaccctattcatacactccctccccttttgaaagtccctaataaaaacttgctggttttgcggcttgtgaggcatcacggaacctaccgatgtgtgatgtctcccctggacacctagctttaaaatttctctcttttgtactctgtgcctttatttctcaaaccggccaacacttagggaaaatagaaaagaacctacgtgaccatcggggcaggttccccgatacccaatgaccccagagcagtgcagccaccagggaaggtgagccagacacaggccgggacaaaacgcagacattttttaggggaataaagagggcgaggtaaagtttatggaactcagtgttaggaactttggcatctgtagctgagcacagcaggggaggggttactcaagatggcaagtgcgccaaggagaaggcagaaatgctggggcctggaataagggaggagaggggactggagagtgtggggaatggaaagaagcagtttactctagactaaagagtatattgggggaggaagagagggaggcacgtaggaacaagcaatgagaagaccaggaaaagaaagagctgaaaatggagaaagccacagttagaactgttggatacaggagaagaaacagcggctccactaaagacccgccccccggttggatgtccttccaagaatggaatccttccctggtgatggtctctcaccctgtcttaccagcatccactctcccttgtcctcccgggggtgtatctgagtcagccagtggcttcttgatgatggtggtggtggttgtagtgtgacaggtcccctttaggttatttaagggtgcatgtcccctgcttgaaccctgaaggccgggtaatgagccatttccatggtgcccagctgaggaccaggtgtctctgagaatccaaacatcctggagagtatctgagaaccaaccaagtaaaagtctcgttgctcatatatagtagacaaagagccagaaaattaactgaaaagcagtttagacattgggggaggctggatctctcgagctgtcttgctgagtgccctgtgtgtaagtcctaataaacttagctactcgcca

SEQ ID NO: 2256 - DNA, 3414 bp, Homo sapiens
  source 1..3414: mol_type = unassigned DNA
gaggtgctggggagcagcgtgtttgctgtgcttgattgtgagctgctgggaagttgtgactttcattttacctttcgaattcctgggtatatcttgggggctggaggacgtgtctggttattatataggtgcacagctggaggtgagatccacacagctcagaccagctggatcttgctcagtctctgtcagaggaagatcccttggaggaggccccgcagcgacatggagggagctgctttgctgaaaatctttgtcgtctgcatctggaaccaaaatcacttcccggaattgaccaactggtagactcgcctagaggggacgcactgtgtcctagttgaggctaacagtcagtatccagcctcaacattcagcagaggccccagatcagcgtctgagccaggccaacaatgaccaaggaggatgggatcctgggtgcagctcatcacaagcgtcggggtgcagcaaaaccatccaggctggacagtggctggacagttccaagaaaagaaacgcttcactgaagaagtcattgaatacttccagaagaaagttagcccagtgcatctgaaaatcctgctgactagcgatgaagcctggaagagatttgtgcgtgtggctgaattgcccagggaagaggcagatgctctctatgaagctctgaagaatcttacaccatatgtggctattgaggacaaagacatgcagcaaaaagaacagcagtttagggagtggtttttgaaagtttcctcaaatcagatggaagattcaggagtccatagaaaggcttcgtgtcattgcaaatgagattgaaaaggtccacagaggctgcgtcatcgccaatgtggtgtctggctccactggcatcctgtctgtcattggcgttatgttggcaccatttacagcagggctgagcctgagcattactgcagctggggtagggctgggaatagcatctgccacggctgggatcgcctccagcatcgtggagaacacatacacaaggtcagcagaactcacagccagcaggctgactgcaaccagcactgaccaattggaggcattaagggacattctgcgtgacatcacacccaatgtgctttcttttgcacttgattttgacgaagccacaaaaatgattgcgaatgatgtccatacactcaggagatctaaagccactgttggacgccctttgattgcttggcgatatgtacctataaatgttgttgagacactgagaacacgtggggcccccacccggatagtgagaaaagtagcccggaacctgggcaaggccacttcaggtgtccttgttgtgctggatgtagtcaaccttgtgcaagactcactggacttgcacaagggggcaaaatccgagtctgctgagtcgctgaggcagtgggctcaggagctggaggagaatctcaatgagctcacccatatccatcagagtctaaaagcaggctaggcccaattgttgcgggaagtcagggaccccaaacggagggactggctgaagccatggcagaagaacgtggattgtgaagatttcatggacatttattagttccccaaattaatacttttataatttcctatgcctgtctttaccgcaatctctaaacacaaattgtgaagatttcatggacactgatcacttccccaatcaatacccttgtgatttcttatgcctgtctttactttaatctcctaatcctgtcagctgaggaggatgtatgtcacctcaggaccatgtgataattgcgttaactgcacaaattgtagagcatgtgtgtttgaacaatatgaaatctgggcaccttgaaaaaagaacaggataacagcaattgttcagggaataagagagataaccttaaactctgaccaacagtgagcctggtggaacagagtcatatttctcttctttcaaaagcaaatgggagaaatatcgctgaattctttttctcagcaaggaacatccctgagaaagagaatgcacccctgagggtgggtctataaatggcctccttgggtgtggccatcttctatggtcgagactgtagggatgaaataaaccccagtctcccatagcgctcccaggcttattaggaagaggaaattcccgcctaataaattttggtcagaccggttgctctcaaaaccctgtctcctgataagatgttatcaatgacaatggtgcccgaaacctcattagcaattttaatttctccccggtcctgtgttcctgtgatctcgccctgcctccacttgccttgtgatattctattaccttgtgaagtaggtgatctttgtgacccacacccacaccctattcatacactccctccccttttgaaagtccctaataaaaacttgctggttttgcggcttgtgaggcatcacggaacctaccgatgtgtgatgtctcccctggacacctagctttaaaatttctctcttttgtactctgtgcctttatttctcaaaccggccaacacttagggaaaatagaaaagaacctacgtgaccatcggggcaggttccccgatacccaatgaccccagagcagtgcagccaccagggaaggtgagccagacacaggccgggacaaaacgcagacattttttaggggaataaagagggcgaggtaaagtttatggaactcagtgttaggaactttggcatctgtagctgagcacagcaggggaggggttactcaagatggcaagtgcgccaaggagaaggcagaaatgctggggcctggaataagggaggagaggggactggagagtgtggggaatggaaagaagcagtttactctagactaaagagtatattgggggaggaagagagggaggcacgtaggaacaagcaatgagaagaccaggaaaagaaagagctgaaaatggagaaagccacagttagaactgttggatacaggagaagaaacagcggctccactaaagacccgccccccggttggatgtccttccaagaatggaatccttccctggtgatggtctctcaccctgtcttaccagcatccactctcccttgtcctcccgggggtgtatctgagtcagccagtggcttcttgatgatggtggtggtggttgtagtgtgacaggtcccctttaggttatttaagggtgcatgtcccctgcttgaaccctgaaggccgggtaatgagccatttccatggtgcccagctgaggaccaggtgtctctgagaatccaaacatcctggagagtatctgagaaccaaccaagtaaaagtctcgttgctcatatatagtagacaaagagccagaaaattaactgaaaagcagtttagacattgggggaggctggatctctcgagctgtcttgctgagtgccctgtgtgtaagtcctaataaacttagctactcgcca

SEQ ID NO: 2257 - DNA, 543 bp, Homo sapiens
  source 1..543: mol_type = unassigned DNA
gtgcttgattgtgagctgctgggaagttgtgactttcattttacctttcgaattcctgggtatatcttgggggctggaggacgtgtctggttattatataggtgcacagctggaggtgagatccacacagctcagaccagctggatcttgctcagtctctgtcagaggaagatcccttggaggaggccccgcagcgacatggagggagctgctttgctgaaaatctttgtcgtctgcatctgaggggacgcactgtgtcctagttgaggctaacagtcagtatccagcctcaacattcagcagaggccccagatcagcgtctgagccaggccaacaatgaccaaggaggatgggatcctgggtgcagctcatcacaagcgtcggggtgcagcaaaaccatccaggctggacagtggctggacagttccaagaaaagaaacgcttcactgaagaagtcattgaatacttccagaagaaagttagcccagtgcatctgaaaatcctgctgactagcgatgaagcctggaagagatttgtgcgtgt

SEQ ID NO: 2258 - DNA, 1823 bp, Homo sapiens
  source 1..1823: mol_type = unassigned DNA
gtgcttgattgtgagctgctgggaagttgtgactttcattttacctttcgaattcctgggtatatcttgggggctggaggacgtgtctggttattatataggtgcacagctggaggtgagatccacacagctcagaccagctggatcttgctcagtctctgtcagaggaagatcccttggaggaggccccgcagcgacatggagggagctgctttgctgaaaatctttgtcgtctgcatctggtgagcttggctcagagccctgaggtgggagggagggctccctgtctgggctgcacaattgggcagggcttgggctgggccaggagccatgtgggtttttctaggaaccaaaatcacttcccggaattgaccaactggtagactcgcctagaggggacgcactgtgtcctagttgaggctaacagtcagtatccagcctcaacattcagcagaggccccagatcagcgtctgagccaggccaacaatgaccaaggaggatgggatcctgggtgcagctcatcacaagcgtcggggtgcagcaaaaccatccaggctggacagtggctggacagttccaagaaaagaaacgcttcactgaagaagtcattgaatacttccagaagaaagttagcccagtgcatctgaaaatcctgctgactagcgatgaagcctggaagagatttgtgcgtgtggctgaattgcccagggaagaggcagatgctctctatgaagctctgaagaatcttacaccatatgtggctattgaggacaaagacatgcagcaaaaagaacagcagtttagggagtggtttttgaaagtttcctcaaatcagatggaagattcaggagtccatagaaaggcttcgtgtcattgcaaatgagattgaaaaggtccacagaggctgcgtcatcgccaatgtggtgtctggctccactggcatcctgtctgtcattggcgttatgttggcaccatttacagcagggctgagcctgagcattactgcagctggggtagggctgggaatagcatctgccacggctgggatcgcctccagcatcgtggagaacacatacacaaggtcagcagaactcacagccagcaggctgactgcaaccagcactgaccaattggaggcattaagggacattctgcgtgacatcacacccaatgtgctttcttttgcacttgattttgacgaagccacaaaaatgattgcgaatgatgtccatacactcaggagatctaaagccactgttggacgccctttgattgcttggcgatatgtacctataaatgttgttgagacactgagaacacgtggggcccccacccggatagtgagaaaagtagcccggaacctgggcaaggccacttcaggtgtccttgttgtgctggatgtagtcaaccttgtgcaagactcactggacttgcacaagggggcaaaatccgagtctgctgagtcgctgaggcagtgggctcaggagctggaggagaatctcaatgagctcacccatatccatcagagtctaaaagcaggctaggcccaattgttgcgggaagtcagggaccccaaacggagggactggctgaagccatggcagaagaacgtggattgtgaagatttcatggacatttattagttccccaaattaatacttttataatttcctatgcctgtctttaccgcaatctctaaacacaaattgtgaagatttcatggacactgatcacttccccaatcaatacccttgtgatttcttatgcctgtctttactttaatctcctaatcctgtcagctgaggaggatgtatgtcacctc

SEQ ID NO: 2259 - DNA, 575 bp, Homo sapiens
  source 1..575: mol_type = unassigned DNA
actgcaggaggtgctggggagcagcgtgtttgctgtgcttgattgtgagctgctgggaagttgtgactttcattttacctttcgaattcctgggtatatcttgggggctggaggacgtgtctggttattatataggtgcacagctggaggtgagatccacacagctcagaccagctggatcttgctcagtctctgtcagaggaagatcccttggaggaggccccgcagcgacatggagggagctgctttgctgaaaatctttgtcgtctgcatctgactcgcctagaggggacgcactgtgtcctagttgaggctaacagtcagtatccagcctcaacattcagcagaggccccagatcagcgtctgagccaggccaacaatgaccaaggaggatgggatcctgggtgcagctcatcacaagcgtcggggtgcagcaaaaccatccaggctggacagtggctggacagttccaagaaaagaaacgcttcactgaagaagtcattgaatacttccagaagaaagttagcccagtgcatctgaaaatcctgctgactagcgatgaagcctggaagag

SEQ ID NO: 2260 - DNA, 520 bp, Homo sapiens
  source 1..520: mol_type = unassigned DNA
gtgcttgattgtgagctgctgggaagttgtgactttcattttacctttcgaattcctgggtatatcttgggggctggaggacgtgtctggttattatataggtgcacagctggaggtgagatccacacagctcagaccagctggatcttgctcagtctctgtcagaggaagatcccttggaggaggccccgcagcgacatggagggagctgctttgctgaaaatctttgtcgtctgcatctgcctcaacattcagcagaggccccagatcagcgtctgagccaggccaacaatgaccaaggaggatgggatcctgggtgcagctcatcacaagcgtcggggtgcagcaaaaccatccaggctggacagtggctggacagttccaagaaaagaaacgcttcactgaagaagtcattgaatacttccagaagaaagttagcccagtgcatctgaaaatcctgctgactagcgatgaagcctggaagagatttgtgcgtgtggctgaattgcccagggaagag

SEQ ID NO: 2261 - DNA, 616 bp, Homo sapiens
  source 1..616: mol_type = unassigned DNA
acttcccggaattgaccaactggtagactcgcctagaggggacgcactgtgtcctagttgaggctaacagtcagtatccagcctcaacattcagcagaggccccagatcagcgtctgagccaggccaacaatgaccaaggaggatgggatcctgggtgcagctcatcacaagcgtcggggtgcagcaaaaccatccaggctggacagtggctggacagttccaagaaaagaaacgcttcactgaagaagtcattgaatacttccagaagaaagttagcccagtgcatctgaaaatcctgctgactagcgatgaagcctggaagagatttgtgcgtgtggctgaattgcccaggtaacctccatggggttacctccttggggcaccccggtgatgccacccagatctccccgggctagttttctctggcaggcacacctcctccaggcagccccctctgctgggcttgaggatgtccctctcagcagtgcaggaagaatatttcctccaagtgcttcgctggcagtgagtgacctcaggctgaggggagaagaagcccacaagggcaggggaagaggcagatgctctctatgaagctctgaagaatcttacaccata

SEQ ID NO: 2262 - DNA, 1438 bp, Homo sapiens
  source 1..1438: mol_type = unassigned DNA
atgccatgtggcaaacaaggaaatttgcaagttcccggttccaaggtgttacctggcttgggagaaggttgtaaagaaatgtggcttcgaaaggtaatctacggaggtgaggtctgggggaagtccccagaacctgagttcccctcactcgtgaacctgtgccagagttggaaaattaacaatttgatgtcaactgtccacagtgatgaggctggtatgctgtcctactttctgtttgaagagctgatgcgatgtgacaaagattccatgccagatggaaatctgtcagaggaggaaaaattgtttctctcatattttcctttgcacaagtttgagctagaacagaacatcaaagaacttaacacccttgcggaccaagttgacaccactcacgagttgcttaccaagaccagcctggtggccagctcttccggggctgtttctggggtcatgaacatcctgggtttggccctagcacctgtgacagcaggaggcagtctcatgctctcagcaactgggacagggttgggggcagcagctgccatcaccaacatagtaacaaatgtcttagaaaatagaagcaattcagcagcaagagacaaagccagccgactggggcctctgacaacatcacatgaggctttcggaggaataaattggtctgaaatcgaggctgctggcttttgtgttaataagtgtgtaaaagctatccagggcatcaaggatcttcatgcctaccagatggccaaatccaactctggcttcatggctatggtcaagaattttgtggccaagagacacatccctttctggacggctagaggggtgcagagagcctttgagggcacaactctggccatgaccaatggtgcctgggtgatgggtgctgctggggctggcttcttacttatgaaagacatgagcagcttcctgcagagctggaagcacctggaggatggggcaaggacggagacagcagaggaactgagagcacttgctaagaagctggagcaggagctggaccggctcacccagcaccaccggcacctgccgcagaaggcgagccagacctgttccagctcccggggcagggctgttcgaggatcccgtgtggttaaaccagaagggtctcgctcacctctcccctggcctgttgtggagcaccagcctaggctgggccctggcgtggcactgaggacaccaaagaggacagtctctgccccaaggatgcttggccaccagccagccccaccagcaccagcaagaaaggggagacaggccccgggaagacaccgacaatgagaagagttggtcaccctgtcaccactgaaccttgatttaacagaggcaaaatgcaagtcttccctgaagaatactgggggtagggaaacttctagtggcaatgataaaaccagcagcaatgataatagaaggcaaa

SEQ ID NO: 2263 - DNA, 3069 bp, Homo sapiens
  source 1..3069: mol_type = unassigned DNA
gaagagccctagagctttgctttttctctcctgcagcacttaaccgaaaccagttttgcaatcaattcctgttcaaaggccaccctactcttcctatccgtctttctccagcccagacactcacagccccctgccagaccaggggacctcggagaggcaaggacagaggttcaggatcttcctctccctcgggacccaaggccacaaaggagagctccgtggagagaagaaaatcatttgactcctggggacacagatttgctgccacagaggctgatggacaaccaggcggagagagaaagtgaggctggtgttggtttgcaaagggatgaggatgacgctcctctgtgtgaagacgtggagctacaagacggagatctgtcccccgaagaaaaaatatttttgagagaatttcccagattgaaagaagatctgaaagggaacattgacaagctccgtgccctcgcagacgatattgacaaaacccacaagaaattcaccaaggctaacatggtggccacctctactgctgtcatctctggagtgatgagcctcctgggtttagcccttgccccagcaacaggaggaggaagcctgctgctctccaccgctggtcaaggtttggcaacagcagctggggtcaccagcatcgtgagtggtacgttggaacgctccaaaaataaagaagcccaagcacgggcggaagacatactgcccacctacgaccaagaggacagggaggatgaggaagagaaggcagactatgtcacagctgctggaaagattatctataatcttagaaacaccttgaagtatgccaagaaaaacgtccgtgcattttggaaactcagagccaacccacgcttggccaatgctaccaagcgtcttctgaccactggccaagtctcctcccggagccgcgtgcaggtgcaaaaggcctttgcgggaacaacactggcgatgaccaaaaatgctcgcgtgctgggaggtgtgatgtccgccttctcccttggctatgacttggccactctctcaaaggaatggaagcacctgaaggaaggagcaaggacaaagtttgcggaagagttgagagccaaggccttggagctggagaggaaactcacagaactcacccagctctacaagagcttgcagcagaaagtgaggtcaagggccagaggggtggggaaggatttaactgggacctgcgaaaccgaggcttactggaaggagttaagggagcatgtgtggatgtggctgtggctgtgtgtgtgtctgtgtgtctgtgtgtatgtacagtttacatgaatgttcctcaggacatggcatacaatggccttggaggtccaaataatatcaagtacatcttggagatgagggtgcctgtcctggacagacctcggcatgccttctgtttctccttcaatgctccttaaggcctatgtgctgggaaaagggtcttccctgtttgtttgtttgtttgtttgtttgtttgttttgagacagggtctctgttgcccaggctggagtgcagtggcgtaatctcggctcactgcaacctctgcctcctgagtgcaagcaagtctcctgcctcagcctcccaagtagctgggattacaggcacgcaccaccacgcccagctaattttggtatttttttgtagagacagggtttcaccattttggccaggctggtctcgaattcctgacctcaagtgatccacccaccttggcctcccaaaatgctgggattacaagcgtgagctaccctgcccagccgggtcttcccagttttaacaaagaggtcacagagccacaggcggagttaggaactaaattgtctcctcctcccaattcatatgttgaagtcctaaaccaaaatgtggctgtatttagagatggaccctttgggaggtaattagggttgactgaggccatagggtgaggtcctaacccgatggaattgacttctttataagaggaggaggaaatacaagagggcctccccacccctgctgcacacctacactgaaggaaggctatttgcagatgcagcaagaaggcagccatctgcaaggcagaagaagagagccctcaccaggaactgaataagtcagtcagtctgggacttccagcctctagaactgtgaaacaataaatttctgtggtgtaagcaactcaatctatagtagtttgttactattttgttatagcaaccaaagatgactaagccagacaggttatgtcactcgccaagtgtcttagtctgtttgtgctgctataacaaaataccttagactgggtaatttacaaacaacagagatgtatccagagatccacagttctggaggctgagaagtctaaaatcaaggcaccagcagattccacatctcgtgaaggctcactctctgcttcacagatggcactgtcttgctgtgttctcacatggcagaaggggcaaacaagcccccctgggcctcttttataaaggcactaactctatgcctaaaggcagggccctcatgactctatcacctaccaaaaggctccacttctttatactattggaggggtagaaggaacttcctttctagaccttgaaggtttaagaatttgaatctataaaacaagctgacaatagacagattaacaggagaaaaagcatatacattttttaatgtgggccagatggcagaagcttaaataacaccccaagctacaggaagtgaggcctctgatggggaggtagtgacacaggctgtgggagggggtagggggaggaagtctgtggtgagcaaagtttgccttattacactgataaagtgtaattacactaataaagctggatcacctgaggttaggagtttgagaacagcctggccaacatggcaaaaccctgtctctactataaatacaaaaattagccaggtgtagtggcagggcacttgtaatcctatctactcgggaggctgaggcaggagaatcgcttgaacccaggctgtaaaggttgcagtgagccaagatcatgccactgcactccagtctgggtgtcagaatgagaccccatctc

SEQ ID NO: 2264 - DNA, 1056 bp, Homo sapiens
  source 1..1056: mol_type = unassigned DNA
gggtttgcgttcacccgctgcccgggcgcgacgcgctgcggctcagcgacgcggcttctagaaccgggtgattgaactaaaccttcgccgcaccgagtttgcagtacggccgtcacccgcaccgctgcctgcttgcggttggagaaatcaaggccctaccgggcctccgtagtcacctctctatagtgggcgtggccgaggccggggtgaccctgccggagcctccgctgccagcgacatgttcaaggtaattcagaggtccgtggggccagccagcctgagcttgctcaccttcaaagtctatgcagcaccaaaaaaggactcacctcccaaaaattccgtgaaggttgatgagctttcactctactcagttcctgagggtcaatcgaagtatgtggaggaggcaaggagccagcttgaagaaagcatctcacagctccgacactattgcgagccatacacaacctggtgtcagacagctatgactatctccaaaatgcacctcctgttttttccgagacttggtgttattggttttgctggccttattggactccttttggctagaggttcaaaaataaagaagctagtgtatccgcctggtttcatgggattagctgcctccctctattatccacaacaagccatcgtgtttgcccaggtcagtggggagagattatatgactggggtttacgaggatatatagtcatagaagatttgtggaaggagaactttcaaaagccaggaaatgtgaagaattcacctggaactaagtagaaaactccatgctctgccatcttaatcagttataggtaaacattggaaactccatagaataaatcagtatttctacagaaaaatggcatagaagtcagtattgaatgtattaaattggctttcttcttcaggaaaaactagaccagacctctgttatcttctgtgaaatcatcctacaagcaaactaacctggaatcccttcacctagagataatgtacaagccttagaactcctcattctcatgttgctatttatgtacctaattaaaacccaagtt

SEQ ID NO: 2265 - DNA, 1118 bp, Homo sapiens
  source 1..1118: mol_type = unassigned DNA
gcgttcacccgctgcccgggcgcgacgcgctgcggctcagcgacgcggcttctagaaccgggtgattgaactaaaccttcgccgcaccgagtttgcagtacggccgtcacccgcaccgctgcctgcttgcggttggagaaatcaaggccctaccgggcctccgtagtcacctctctatagtgggcgtggccgaggccggggtgaccctgccggagcctccgctgccagcgacatgttcaaggtaattcagaggtccgtggggccagccagcctgagcttgctcaccttcaaagtctatgcagcaccaaaaaaggactcacctcccaaaaattccgtgaaggttgatgagctttcactctactcagttcctgagggtcaatcgaagtatgtggaggaggcaaggagccagcttgaagaaagcatctcacagctccgacactattgcgagccatacacaacctggtgtcaggaaacgtactcccaaactaagcccaagatgcaaagtttggttcaatgggggttagacagctatgactatctccaaaatgcacctcctggattttttccgagacttggtgttattggttttgctggccttattggactccttttggctagaggttcaaaaataaagaagctagtgtatccgcctggtttcatgggattagctgcctccctctattatccacaacaagccatcgtgtttgcccaggtcagtggggagagattatatgactggggtttacgaggatatatagtcatagaagatttgtggaaggagaactttcaaaagccaggaaatgtgaagaattcacctggaactaagtagaaaactccatgctctgccatcttaatcagttataggtaaacattggaaactccatagaataaatcagtatttctacagaaaaatggcatagaagtcagtattgaatgtattaaattggctttcttcttcaggaaaaactagaccagacctctgttatcttctgtgaaatcatcctacaagcaaactaacctggaatcccttcacctagagataatgtacaagccttagaactcctcattctcatgttgctatttatgtacctaattaaaacccaagttaaaaaaaaaaa

SEQ ID NO: 2266 - DNA, 714 bp, Homo sapiens
  source 1..714: mol_type = unassigned DNA
gtctatgcagcaccaaaaaaggactcacctcccaaaaattccgtgaaggttgatgagctttcactctactcagttcctgagggtcaatcgaagtatgtggaggaggcaaggagccagcttgaagaaagcatctcacagctccgacactattgcgagccatacacaacctggtgtcaggaaacgtactcccaaactaagcccaagatgcaaagtttggttcaatgggggttagacagctatgactatctccaaaatgcacctcctggattttttccgagacttggtgttattggttttgctggccttattggactccttttggctagaggttcaaaaataaagaagctagtgtatccgcctggtttcatgggattagctgcctccctctattatccacaacaagccatcgtgtttgcccaggtcagtggggagagattatatgactggggtttacgaggatatatagtcatagaagatttgtggaaggagaactttcaaaagccaggaaatgtgaagaattcacctggaactaagtagaaaactccatgctctgccatcttaatcaggaaaaactagaccagacctctgttatcttctgtgaaatcatcctacaagcaaactaacctggaatcccttcacctagagataatgtacaagccttagaactcctcattctcatgttgctatttatgtacctaattaaaacccaagtta

SEQ ID NO: 2267 - DNA, 2140 bp, Homo sapiens
  source 1..2140: mol_type = unassigned DNA
aatcccttcaaccttctgcgcgcttccgccttcatgctagcaacgcccgcagtgacgcgcaggccccgccccctcccgcgcgcctcccggaagtggccggtccagagctgtggggtggcctccgcgcggtctctggcggagtcggggaatcggatcaaggcgagaggatccggcagggaaggagcttcggggccgggggttgggccgcacatttacgtgcgcgaagcggagtggaccgggagctggtgacgatggcggggccgcagcccctggcgctgcaactggaacagttgttgaacccgcgaccaagcgaggcggaccctgaagcggaccccgaggaagccactgctgccagggtgattgacaggtttgatgaaggggaagatggggaaggtgatttcctagtagtgggtagcattagaaaactggcatcagcctccctcttggacacggacaaaaggtattgcggcaaaaccacctctagaaaagcatggaatgaagaccattgggagcagactctgccaggatcgtctgatgaggaaatatctgatgaggaagggtctggagatgaagattcagagggactgggtctggaggaatatgatgaggacgacctgggtgctgctgaggaacaggagtgtggtgatcacagggagagcaagaagagcagaagccactctgcaaaaacaccgggcttcagtgtccagagtatcagtgactttgagaaatttaccaagggaatggatgaccttgggagcagtgaggaggaggaagacgaagagagtggcatggaagaaggggatgacgcggaagactcccaaggcgagagtgaggaagacagggctggagatagaaacagtgaggatgatggtgtggtgatgaccttctctagtgtcaaagtttctgaggaagtggagaaaggaagagccgtgaagaaccagatagcactgtgggaccagctcttggaaggaaggatcaaactacaaaaagctctgttgaccaccaaccagcttcctcaaccagatgttttcccattgttcaaggacaaaggtggcccagaattttccagtgccctgaaaaatagtcacaaggcacttaaagcattgttgaggtcattggtaggtcttcaggaagagttgcttttccagtacccagacactagatatctagtagatgggacaaagcccaatgcgggaagtgaggagatttctagtgaagatgatgagctggtagaagagaagaagcagcaacgaagaagggtccctgcaaagaggaagctggagatggaggactatcccagcttcatggcaaagcgctttgccgactttacagtctacaggaaccgcacacttcagaaatggcacgataagaccaaactggcttctggaaaactggggaagggttttggtgcctttgaacgctcaatcttgactcagatcgaccatattctgatggacaaagagagattacttcgaaggacacagaccaagcgctctgtctatcgagttcttggcaaacctgagccagcagctcagcctgtcccagagagtttgccaggggaaccggagatccttcctcaagcccctgctaatgctcatctgaaggacttggatgaagaaatctttgatgatgatgacttttaccaccagctccttcgagaactcatagaacggaagaccagctccttggatcccaacgatcaggtggccatgggaaggcagtggcttgcaatccagaagttacgaagcaaaatccacaaaaaagtagataggaaagccagcaaaggcaggaaacttcggtttcatgtccttagcaagctactgagtttcatggcacctattgaccatactacaatgaatgatgatgccaggacagaactgtaccgctctctttttggccagctccaccctcccgacgaaggccacggggattgacatcgcccacctccgacacccagtgggcgccttggctggtgcggctgctggtccagatggaggaaaccagtgactttatggggctgagctagtagggaagcccctggaaagatgctgcgttccgaacctgtgcctaatacacgcaagggcgctgtcccgcccaaccccgcctttaaacgccacaaataaagagcattgttaccgcc

SEQ ID NO: 2268 - DNA, 3117 bp, Homo sapiens
  source 1..3117: mol_type = unassigned DNA
agtcggagccgggcttgcccgggcatgtgggagctgccggctttccggacgccacgtgcagaccggaagagacacgcggggcttcaggctgctgccccattggaagattactccccaggcttcccttgccccaagcagtgagctgactggaatggtaccccgggaggcccctgagtctgctcagtgcctgtgcccttccctcaccatcccaaatgccaaggatgtgcttcggaagaggcacaagagaaggagccgacagcaccagcggttcatggcccggaaggccttgctgcaggagcaggggctgctgagcatgcctccagaaccagggtcctccccactgcccacccctttcggggcagcgacagcaactgaagctgccagcagtgggaagcagtgtctgagggctggatctggcagtgccccatgcagcagaaggcctgctcccgggaaagcctcagggcccttgcccagcaagtgtgtggctatcgactgtgagatggtgggcacgggaccccgagggcgggtaagcgagctggcccgctgttccattgtgagctaccatggcaatgtcctctatgacaagtacatcaggcctgagatgcccatcgctgactaccgtacccgctggagtggcatcactcggcagcacatgcgcaaggctgtccccttccaggtggcccagaaagagatccttaagctcctgaagggcaaggtggtggtggggcacgcgctgcacaacgacttccaggcgctcaagtatgtccaccctcggagccagacccgggatacgacctatgtcccaaacttcctcagcgagcccggcctccacacccgggcccgggtctctctaaaggacctggccctgcagctgctgcacaagaagatccaggtgggccagcacgggcactcatcagtagaagatgccacgacagccatggagctctaccggctggtggaggtgcagtgggaacagcaggaggcccgcagcctctggacctgccccgaggacagagaacctgacagcagcacagacatggaacagtacatggaggaccagtactggcccgatgacctggcccacggcagcagaggaggagccagggaggcacaggacagaaggaattgagaagggggcggggctccctggctgggcttccggtgtggccggtaggaagtgggggccaggagagcagcgggcactccttcctgggcagggtggggcaggatgcagtgagccagccccagggccagaggagtaggggtcatctgttaccttgacaccctctgcacacagcatagccctctctctctccagggctgttggttctttcttctgactcctgtggttttgctaatggcactttacagactccatggagatgtcaggtggaccatcttctagggcccagcaggagtagggaatgtgccaacagactgcccaggttgccgtggccttccccaccccccagatctcctgagtcatcatgctgtgctaatgaaagggatcatatcatcctctctggggatggtgggtgggggtgtcaatatcctggagctcccttaccccaactcaatgacttgggggtaaagttctcttccttttgttgcctacctcttcctccactcatttgggttcagaataaacatgtcctgaagttaaagaggagttaagtcctaaaggaggcatttcttccccacctccctgacctggaactctggctacagccattgtaggaactccgtgcctggcctgtcagctccctgctaggctacagtggaatagcagagcccacaggcttctcgtggggagttggctccttaacatttcttggcaacagaaagccccaggcacagctcagggaggagggaaggcaggtaagctttggacgagaactggcatatttattttgacccaaatcagggatttccccagtccacccagtactgggctcttaagcaaaagtctgagaaacaagacagtggtttgaattctggggcctttgtgtaggattgtgcctgacctttatttatttattaacagcagggccactcgtctagggcagtggagtctgcgtgtctcctggggctggggcagggcattggcagttacgcagtggccctgaacctggtctggtgcccccgaacctggtctgatgccccctcagctctttgacaatcactgtggctgttgggttttctcctatttctaaaaatgttctcttctttcctaagtgacagttttgaagtattggataaccaagagctcaggtcacacagaccttggagccccatctttgcttgcagcttagctttgagatactaagcaagcgagggacttcactcttgaggctgttttttcctcatctgtaaagtggggatagtggtacggcctacctcatagggttgtaatgagcactaaatgtgaagtgcttggcacagtgcctggcacatggtgagccacagctactgtgagtttctgtttatcccccttttttttttttaagcccattgtttattctttgagaatttgttgtaacttcttcaggataacacctgagtccacaggctgagcagctgtggcccagacagaactgctccggcttggctgttccagcaggtggggcgctggcctcggtgagggcacagcagcaaggttcacggatatccgtgtgtcttgtctgtggccaccaggcacaggtttggcttccggtcagtgtcccgacactgtgcgggaggtgacaacagagcaaagcagcgcaggggtcagggaggtacagacactgctgaaatcacactaccccaccctcagctgaagccccacgttccacaaacttggggtcatagattgtccagtcactggctccctccctgtcagcacagcacagaggaaggggctaactgaatcttttaccacttctggcctggctccagaactttgttctagattccttaaaagtcggtagctgatgtcaaactcaattgagcagtagctttgatcccttggtctgggggtcgaaggaagatggtgctgttatcagcggggaaatgtactatttaagatcagctttgttgtaaaaccatttgttctagaataaaactcaattggaaacgtgg

SEQ ID NO: 2269 - DNA, 1067 bp, Homo sapiens
  source 1..1067: mol_type = unassigned DNA
gagacacgcggggcttcaggctgctgccccattggaagattactccccaggcttcccttgccccaagcagtgagctgactggaatggtaccccgggaggcccctgagtctgctcagtgcctgtgcccttccctcaccatcccaaatgccaaggatgtgcttcggaagaggcacaagagaaggagccgacagcaccagcggttcatggcccggaaggccttgctgcaggagcaggggctgctgagcatgcctccagaaccagggtcctccccactgcccacccctttcggggcagcgacagcaactgaagctgccagcagtgggaagcagtgtctgagggctggatctggcagtgccccatgcagcagaaggcctgctcccgggaaagcctcagggcccttgcccagcaagtgtgtggctatcgactgtgagatggtgggcacgggaccccgagggcgggtaagcgagctggcccgctgttccattgtgagctaccatggcaatgtcctctatgacaagtacatcaggcctgagatgcccatcgctgactaccgtacccgctggagtggcatcactcggcagcacatgcgcaaggctgtccccttccaggtggcccagaaagagatccttaagctcctgaagggcaaggtggtggtggggcacgcgctgcacaacgacttccaggcgctcaagtatgtccaccctcggagccagacccgggatacgacctatgtcccaaacttcctcagcgagcccggcctccacacccgggcccgggtctctctaaaggacctggccctgcagctgctgcacaagaagatccaggtgggccagcacgggcactcatcagtagaagatgccacgacagccatggagctctaccggctggtggaggtgcagtgggaacagcaggaggcccgcagcctctggacctgccccgaggacagagaacctgacagcagcacagacatggaacagtacatggaggaccagtccacccagtactgggctcttaagcaaaagtctgagaaacaagacagtggtttgaattctggggcctttgtgtag

SEQ ID NO: 2270 - DNA, 3714 bp, Homo sapiens
  source 1..3714: mol_type = unassigned DNA
gcggctgcactggcggcagctggaggtgtaatagtgcgggtagtgggtttggagaagttccgaggcggcggtggcgccggtcaggacaaggatagcggaaccgggccctgggcttgtcgctcaccatgccgacagtagaggagctttaccgcaattatggcatcctggccgatgccacggagcaagtgggccagcataaagatgcctatcaagtgatattggatggtgtgaaaggtggtactaaggaaaagcgattagcagctcaatttattccgaaattctttaagcattttccagaattggctgattctgctatcaatgcacagttagacctctgtgaggatgaagatgtatctattcgacgtcaagcaattaaagaactgcctcaatttgccactggagaaaatcttcctcgagtggcagatatactaacgcaacttttgcagacagatgactctgcagaatttaacctagtgaacaatgccctattaagtatatttaaaatggatgcaaaagggactttaggtgggttgttcagccaaatacttcaaggagaggacattgttagagaacgagcaattaaattcctttctacaaaacttaagactttaccagatgaagtcttaacaaaggaagtggaagagcttatactaactgaatccaaaaaggtcctagaagatgtgactggtgaagaatttgttctatttatgaagatactgtctgggttaaaaagcttacagacagtgagtggaagacagcaacttgtagagttggtggctgaacaggccgacctagaacagaccttcaatccctcggatcctgactgtgtggacaggctcttacagtgcactcggcaggcagtacccctcttctctaaaaatgtccattccacaaggtttgtgacatatttctgtgagcaggttctccctaacctcggtaccttgactaccccagtggaaggtcttgatatacagttggaggtattgaaattgttggcggagatgagttcattttgtggtgacatggaaaaactagaaacaaatttaaggaaactatttgataagttattggaatacatgcccctccctccagaagaggcagaaaatggagagaatgctggtaatgaagaacccaagctacagttcagttatgtggaatgtttgttgtacagttttcaccagttgggccgaaaacttccagatttcttaacagccaaactgaatgcagaaaagctcaaagatttcaaaatcaggctgcagtactttgcacggggcctgcaagtttatatcagacaacttcgcttagctctccagggtaaaacgggtgaggccttaaaaacagaagagaacaagattaaagtcgttgcattgaaaataacaaacaatatcaatgttttaatcaaggatctcttccacattcctccttcttataagagcacagtaacactatcctggaaacctgtacaaaaggttgagattgggcaaaagagagccagtgaagatacaacttcaggttcaccacccaagaaatcttcagcaggaccaaaaagagatgccaggcagatttataaccctcccagtgggaaatatagcagcaatttgggcaactttaattatgagaggagccttcaggggaagtagaggtggccgaggttggggcacacgaggaaatcgtagtcggggaagactctactgaataagacatcagcattcttcagcattgtcatgagcttaatatacttaaattctactactcattggattgccggggatgtccctttaaacagactgctgccttcagctaaaaacttaatgttctttatacctttgtatgtatgacctacttttgtaacagaccatggttgtgtccaaggtaaaaccacagtgatatttttggatgctttgtctgcaatcttgacttgtttttgcagtatcattattcagacttcaaattgtgaatcttttaaacatcttgataatttgttgttgagagctgttcattctaaaatgtaatgaaattcagtctagttctgctgataaagatcatcagttttgaaaggttactgattttcctcttccctcttagttttttacccaatatatggagaagagtaatggtcaatcttaacattttgttttaattgtttaataaagctgctgggcagtggtgcagcattcctacctagtgtcataaaagcaaaatacttacatagctttcttaaaatataggaatgacattacatttttaggagaaagtaagttgctttgcaccgcctacttaattcttttccatatattgtgatacaaacttttgaatatggaatcttactatttgaatagaaatgtgtatgtataatatacatacatacataagcatatatgtgtgtgtgtgtgtgtatatatatatatatgcatgctgtgaaacttgactacacaacataaatcactttttaaattccaggaacgggtagtctgacacggtgattatccttttgaggctgaatccgttattaacttgttatttaggtttttactcccagtagcaagggattctaagttagttgcacttacatgattattgttatttaaaactaagaataaaggctgcattttcaaagataaattggaattgctgttggtgaaataacaaccaaaatactgaatctgatgtacatacaggtttctacaggaagagatggtataatttacaatttggagatttaataaccagggctacccagaaaaagtgacttgataacatggtaccaataagtaagggatgctctctcggtttgcttttgccactttcaagattttaacttctcaggttattaatcaaaattattgtataagttagccaatagaatttttaggttaaaacaacagatggggggtttgtggagtgtttaatgtcatgggcatttttagtaggatagaccctttgttctgcatttgaatgtttcgtatatttttgtttcacagttaatcttccctccccaagtttgctattcaaatcaactgcctgaatgacatttctagtagtctgatgtatttttctgaggaatagtttgtgattccaatgcaggtgtcttcattaccattacctctacactgcagaagaagcaaaactcctttattagaattactgcacatgtgtatggggaaaatagttctgaaaggctagaatgatacaagtgagcaaaagttggtcagcttggctatggagtggtggcaataatctctaaacattccaaaagaccatgagctgaacctaaactcccttggaatctgaacaaaggaatataaaattgccatttgaaaactgaccagctaatctggacctcagagatagatcagccagtggcccaaagccatttcaagtacagaaattatagagactacagctaaataaatttgaacattaaatataattttaccactttttgtctttataagcatatttgtaaactcagaactgagcagaagtgactttactttctcaagtttgatactgagttgactgttcccttatccctcacccttccccttccctttcctaaggcaatagtgcacaacttaggttatttttgcttccgaatttgaatgaaaaacttaatgccatggatttttttcttttgcaagacacctgtttatcatcttgtttaaatgtaaatgtccccttatgcttttgaaataaatttccttttgtaatttt

SEQ ID NO: 2271 - DNA, 2009 bp, Homo sapiens
  source 1..2009: mol_type = unassigned DNA
gactggcggctgcactggcggcagctggaggtgtaatagtgcgggtagtgggtttggagaagttccgaggcggcggtggcgccggtcaggacaaggatagcggaaccgggccctgggcttgtcgctcaccatgccgacagtagaggagctttaccgcaattatggcatcctggccgatgccacggagcaagtgggccagattcgacgtcaagcaattaaagaactgcctcaatttgccactggagaaaatcttcctcgagtggcagatatactaacgcaacttttgcagacagatgactctgcagaatttaacctagtgaacaatgccctattaagtatatttaaaatggatgcaaaagggactttaggtgggttgttcagccaaatacttcaaggagaggacattgttagagaacgagcaattaaattcctttctacaaaacttaagactttaccagatgaagtcttaacaaaggaagtggaagagcttatactaactgaatccaaaaaggtcctagaagatgtgactggtgaagaatttgttctatttatgaagatactgtctgggttaaaaagcttacagacagtgagtggaagacagcaacttgtagagttggtggctgaacaggccgacctagaacagaccttcaatccctcggatcctgactgtgtggacaggctcttacagtgcactcggcaggcagtacccctcttctctaaaaatgtccattccacaaggtttgtgacatatttctgtgagcaggttctccctaacctcggtaccttgactaccccagtggaaggtcttgatatacagttggaggtattgaaattgttggcggagatgagttcattttgtggtgacatggaaaaactagaaacaaatttaaggaaactatttgataagttattggaatacatgcccctccctccagaagaggcagaaaatggagagaatgctggtaatgaagaacccaagctacagttcagttatgtggaatgtttgttgtacagttttcaccagttgggccgaaaacttccagatttcttaacagccaaactgaatgcagaaaagctcaaagatttcaaaatcaggctgcagtactttgcacggggcctgcaagtttatatcagacaacttcgcttagctctccagggtaaaacgggtgaggccttaaaaacagaagagaacaagattaaagtcgttgcattgaaaataacaaacaatatcaatgttttaatcaaggatctcttccacattcctccttcttataagagcacagtaacactatcctggaaacctgtacaaaaggttgagattgggcaaaagagagccagtgaagatacaacttcaggttcaccacccaagaaatcttcagcaggaccaaaaagagatgccaggcagatttataaccctcccagtgggaaatatagcagcaatttgggcaactttaattatgagaggagccttcaggggaagtagaggtggccgaggttggggcacacgaggaaatcgtagtcggggaagactctactgaataagacatcagcattcttcagcattgtcatgagcttaatatacttaaattctactactcattggattgccggggatgtccctttaaacagactgctgccttcagctaaaaacttaatgttctttatacctttgtatgtatgacctacttttgtaacagaccatggttgtgtccaaggtaaaaccacagtgatatttttggatgctttgtctgcaatcttgacttgtttttgcagtatcattattcagacttcaaattgtgaatcttttaaacatcttgataatttgttgttgagagctgttcattctaaaatgtaatgaaattcagtctagttctgctgataaagatcatcagttttgaaaggttactgattttcctcttccctcttagttttttacccaatatatggagaagagtaatggtcaatcttaacattttgttttaattgtttaataaagctgctgggcagtg

SEQ ID NO: 2272 - DNA, 1868 bp, Homo sapiens
  source 1..1868: mol_type = unassigned DNA
gtgcgcggtgactggcggctgcactggcggcagctggaggtgtaatagtgcgggtagtgggtttggagaagttccgaggcggcggtggcgccggtcaggacaaggatagcggaaccgggccctgggcttgtcgctcaccatgccgacagtagaggagctttaccgcaattatggcatcctggccgatgccacggagcaagtgggccagcataaagatgcctatcaagtgatattggatggtgtgaaaggtggtactaaggaaaagcgattagcagctcaatttattccgaaattctttaagcattttccagaattggctgattctgctatcaatgcacagttagacctctgtgaggatgaagatgtatctattcgacgtcaagcaattaaagaactgcctcaatttgccactggagaaaatcttcctcgagtggcagatatactaacgcaacttttgcagacagatgactctgcagaatttaacctagtgaacaatgccctattaagtatatttaaaatggatgcaaaagggactttaggtgggttgttcagccaaatacttcaaggagaggacattgttagagaacgagcaattaaattcctttctacaaaacttaagactttaccagatgaagtcttaacaaaggaagtggaagagcttatactaactgaatccaaaaaggtcctagaagatgtgactggtgaagaatttgttctatttatgaagatactgtctgggttaaaaagcttacagacagtgagtggaagacagcaacttgtagagttggtggctgaacaggccgacctagaacagaccttcaatccctcggatcctgactgtgtggacaggctcttacagtgcactcggcaggcagtacccctcttctctaaaaatgtccattccacaaggtttgtgacatatttctgtgagcaggttctccctaacctcggtaccttgactaccccagtggaaggtcttgatatacagttggaggtattgaaattgttggcggagatgagttcattttgtggtgacatggaaaaactagaaacaaatttaaggaaactatttgataagttattggaatacatgcccctccctccagaagaggcagaaaatggagagaatgctggtaatgaagaacccaagctacagttcagttatgtggaatgtttgttgtacagttttcaccagttgggccgaaaacttccagatttcttaacagccaaactgaatgcagaaaagctcaaagatttcaaaatcaggctgcagtactttgcacggggcctgcaagtttatatcagacaacttcgcttagctctccagggtaaaacgggtgaggccttaaaaacagaagagaacaagattaaagtcgttgcattgaaaataacaaacaatatcaatgttttaatcaaggatctcttccacattcctccttcttataagagcacagtaacactatcctggaaacctgtacaaaaggttgagattgggcaaaagagagccagtgaagatacaacttcaggttcaccacccaagaaatcttcagcaggaccaaaaagagatgccaggcagatttataaccctcccagtgggaaatatagcagcaatttgggcaactttaattatgagcagagaggagccttcaggggaagtagaggtggccgaggttggggcacacgaggaaatcgtagtcggggaagactctactgaataagacatcagcattcttcagcattgtcatgagcttaatatacttaaattctactactcattggattgccggggatgtccctttaaacagactgctgccttcagctaaaaacttaatgttctttatacctttgtatgtatgacctacttttgt

SEQ ID NO: 2273 - DNA, 1760 bp, Homo sapiens
  source 1..1760: mol_type = unassigned DNA
agcggaaccgggccctgggcttgtcgctcaccatgccgacagtagaggagctttaccgcaattatggcatcctggccgatgccacggagcaagtgggccagcataaagatgcctatcaagtgatattggatggtgtgaaaggtggtactaaggaaaagcgattagcagctcaatttattccgaaattctttaagcattttccagaattggctgattctgctatcaatgcacagttagacctctgtgaggatgaagatgtatctattcgacgtcaagcaattaaagaactgcctcaatttgccactggagaaaatcttcctcgagtggcagatatactaacgcaacttttgcagacagatgactctgcagaatttaacctagtgaacaatgccctattaagtatatttaaaatggatgcaaaagggactttaggtgggttgttcagccaaatacttcaaggagaggacattgttagagaacgagcaattaaattcctttctacaaaacttaagactttaccagatgaagtcttaacaaaggaagtggaagagcttatactaactgaatccaaaaaggtcctagaagatgtgactggtgaagaatttgttctatttatgaagatactgtctgggttaaaaagcttacagacagtgagtggaagacagcaacttgtagagttggtggctgaacaggccgacctagaacagaccttcaatccctcggatcctgactgtgtggacaggctcttacagtgcactcggcaggcagtacccctcttctctaaaaatgtccattccacaaggtttgtgacatatttctgtgagcaggttctccctaacctcggtaccttgactaccccagtggaaggtcttgatatacagttggaggtattgaaattgttggcggagatgagttcattttgtggtgacatggaaaaactagaaacaaatttaaggaaactatttgataagttattggaatacatgcccctccctccagaagaggcagaaaatggagagaatgctggtaatgaagaacccaagctacagttcagttatgtggaatgtttgttgtacagttttcaccagttgggccgaaaacttccagatttcttaacagccaaactgaatgcagaaaagctcaaagatttcaaaatcaggctgcagtactttgcacggggcctgcaagtttatatcagacaacttcgcttagctctccagggtaaaacgggtgaggccttaaaaacagaagagaacaagattaaagtcgttgcattgaaaataacaaacaatatcaatgttttaatcaaggatctcttccacattcctccttcttataagagcacagtaacactatcctggaaacctgtacaaaaggttgagattgggcaaaagagagccagtgaagatacaacttcaggttcaccacccaagaaatcttcagcaggaccaaaaagagatgccaggcagatttataaccctcccagtgggaaatatagcagcaatttgggcaactttaattatggtgagcgtttccgtttgggtacaaggaatatgagagattaggcagaaattgtgttatactttattttaattagtaattatatacagtgtcatggttctatccaatgacttttctgaattagcttggagaactagggctgttgaggaaatgatttatcccattcctctctcattcacccttctgggctgactgtattgaacatgcaacattaaacagtaagcacttaaagaaaaata

SEQ ID NO: 2274 - DNA, 1605 bp, Homo sapiens
  source 1..1605: mol_type = unassigned DNA
gcaccccgcgcctcgctgctaccgggcgcctttcgctcgcggctcctccgtgcggcccgcttccggtggggccagggcgtctccgccgcagctcggctcccgcgcgctcagcaccgccagcggcggccagatgcaggcggagcgaggagctcggggaggccgtgggcggcggccaggccgcggccggcctggcggagatcgccacagcgagcggcccggagccgcagcggcggtagccagaggcggcggcggaggcggcggcggggacggaggcggacgccggggccgtggccgtggccggggcttccgcggcgctcgcggaggccgaggaggaggaggcgccccgcgaggcagccgccgggagccgggaggctggggcgcaggggccagcgcgccggttgaagatgacagcgatgcagagacctatggagaagagaatgatgaacagggaaattattctaaaagaaagattgtctctaactgggatcgatatcaagatattgaaaaagaggtcaataatgaaagtggagagtcacagaggggaacagatttcagtgtcctccttagctctgcaggggactcattctcacagttccggtttgctgaggagaaagaatgggatagtgaagcttcttgtccaaaacagaattcagcattttatgtggatagtgagttattggttcgagcccttcaagagctgcctctctgcctccgactcaacgttgctgccgaactggtccagggtacagttcctttagaggttcctcaggtgaaaccaaagagaactgatgatggcaagggattagggatgcagttaaaggggcccttggggcctggaggaagggggcccatctttgagctgaaatctgtggctgctggctgccctgtgttgctgggcaaagacaacccaagcccgggtccttcaagggattctcagaaacccacttccccactgcagtcagcaggagaccatttggaagaagaactagatctgttgcttaatttagatgcacctataaaagagggagataacatcttaccagatcagacgtctcaggacctgaaatccaaggaagatggggaggtggtccaagaggaagaagtttgtgcaaaaccatctgtgactgaagaaaaaaacatggaacctgagcaaccaagtacctccaaaaatgttaccgaggaagagctggaagactggttggacagcatgatttcctaaaaaggggaaaaaaagtgcctgaagcaaatcttggttgccttctaacggcaggtgggcataaggctgtccttcaggaccagccagtttacaagcatgtctcaagctagtgtgttccattatgctcacagcagtaaatgcctacctctgtgtttgacatctgaaagaatacattgaagcagcttgttgcatttgtttttctggcttagtaatctaatagatttccttaagggcaggagatagactctggcccttgtttctagcctccttccttgcagtgtttacaacatagccagtgtttacagcatagcagatgctgctgctgattaagagaatagatgcaaacaaggcatgcatttggccaaaataaacaaatgctggtctgtcca

SEQ ID NO: 2275 - DNA, 5257 bp, Homo sapiens
  source 1..5257: mol_type = unassigned DNA
atgcccgccggccgctggcccggccatgtcgtcgtccttcttcaaccccagcttcgccttcagctcgcacttcgaccccgacggcgccccgctcagcgagctgtcctggccatcctccctcgccgtggtggctgtgtctttctccgggctcttcgccgtcatcgtcctcatgctggcctgcctgtgctgtaagaagggcggtatcgggttcaaggagtttgagaatgcggagggggacgagtacgcagccgacctggcgcagggctccccggccacggcagcacagaacgggcccgacgtgtacgtcctgccactcacggaggtctccttgcccatggccaagcagcctgggcgctcagtgcagctcctcaagtccacagacgtgggccggcacagcctcctgtacctgaaggaaatcggccgtggctggttcgggaaggtgttcctgggggaggtgaactctggcatcagcagtgcccaggtggtggtgaaggagctgcaggctagtgccagcgtgcaggagcagatgcagttcctggaggaggtgcagccctacagggccctgaagcacagcaacctgctccagtgcctggcccagtgcgccgaggtgacgccctacctgctggtgatggagttctgcccactgggggacctcaagggctacctgcggagctgccgggtggcggagtccatggctcccgacccccggaccctgcagcgcatggcctgtgaggtggcctgtggcgtcctgcaccttcatcgcaacaatttcgtgcacagcgacctggccctgcggaactgcctgctcacggctgacctgacggtgaagattggtgactatggcctggctcactgcaagtacagagaggactacttcgtgactgccgaccagctgtgggtgcctctgcgctggatcgcgccagagctggtggacgaggtgcatagcaacctgctcgtcgtggaccagaccaagagcgggaatgtgtggtccctgggcgtgaccatctgggagctctttgagctgggcacgcagccctatccccagcactcggaccagcaggtgctggcgtacacggtccgggagcagcagctcaagctgcccaagccccagctgcagctgaccctgtcggaccgctggtacgaggtgatgcagttctgctggctgcagcccgagcagcggcccacagccgaggaggtgcacctgctgctgtcctacctgtgtgccaagggcgccaccgaagcagaggaggagtttgaacggcgctggcgctctctgcggcccggcgggggcggcgtggggcccgggcccggtgcggcggggcccatgctgggcggcgtggtggagctcgccgctgcctcgtccttcccgctgctggagcagttcgcgggcgacggcttccacgcggacggcgacgacgtgctgacggtgaccgagaccagccgaggcctcaattttgagtacaagtgggaggcgggccgcggcgcggaggccttcccggccacgctgagccctggccgcaccgcacgcctgcaggagctgtgcgcccccgacggcgcgcccccgggcgtggttccggtgctcagcgcgcacagcccgtcgctgggcagcgagtacttcatccgcctagaggaggccgcacccgccgccggccacgaccctgactgcgccggctgcgcccccagtccacctgccaccgcggaccaggacgacgactctgacggcagcaccgccgcctcgctggccatggagccgctgctgggccacgggccacccgtcgacgtcccctggggccgcggcgaccactaccctcgcagaagcttggcgcgggacccgctctgcccctcacgctctccctcgccctcggcggggcccctgagtctggcggagggaggagcggaggatgcagactggggcgtggccgccttctgtcctgccttcttcgaggacccactgggcacgtcccctttggggagctcaggggcgcccccgctgccgctgactggcgaggatgagctagaggaggtgggagcgcggagggccgcccagcgcgggcactggcgctccaacgtgtcagccaacaacaacagcggcagccgctgtccagagtcctgggaccccgtctctgcgggcggccacgctgagggctgccccagtccaaagcagaccccacgggcctcccccgagccggggtaccctggagagcctctgcttgggctccaggcagcctctgcccaggagccaggctgctgccccggcctccctcatctatgctctgcccagggcctggcacctgctccctgcctggttacaccctcctggacagagacagccagtagtgggggtgaccacccgcaggcagagcccaagcttgccacggaggctgagggcactaccggaccccgcctgccccttccttccgtcccctccccatcccaggagggagccccacttccctcggaggaggccagtgcccccgacgcccctgatgccctgcctgactctcccacgcctgctactggtggcgaggtgtctgccatcaagctggcttctgccctgaatggcagcagcagctctcccgaggtggaggcacccagcagtgaggatgaggacacggccgaggccacctcaggcatcttcaccgacacgtccagcgacggcctgcaggccaggaggccggatgtggtgccagccttccgctctctgcagaagcaggtggggacccccgactccctggactccctggacatcccgtcctcagccagtgatggtggctatgaggtcttcagcccgtcggccactggcccctctggagggcagccgcgagcgctggacagtggctatgacaccgagaactatgagtcccctgagtttgtgctcaaggaggcgcaggaagggtgtgagccccaggcctttgcggagctggcctcagagggtgagggccccgggcccgagacacggctctccacctccctcagtggcctcaacgagaagaatccctaccgagactctgcctacttctcagacctcgaggctgaggccgaggccacctcaggcccagagaagaagtgcggcggggaccgagcccccgggccagagctgggcctgccgagcactgggcagccgtctgagcaggtctgtctcaggcctggggtttccggggaggcacaaggctctggccccggggaggtgctgcccccactgctgcagcttgaagggtcctccccagagcccagcacctgcccctcgggcctggtcccagagcctccggagccccaaggcccagccaaggtgcggcctgggcccagccccagctgctcccagtttttcctgctgaccccggttccgctgagatcagaaggcaacagctctgagttccaggggcccccaggactgttgtcagggccggccccacaaaagcggatggggggcccaggcacccccagagccccactccgcctggctctgcccggcctccctgcggccttggagggccggccggaggaggaggaggaggacagtgaggacagcgacgagtctgacgaggagctccgctgctacagcgtccaggagcctagcgaggacagcgaagaggaggcgccggcggtgcccgtggtggtggctgagagccagagcgcgcgcaacctgcgcagcctgctcaagatgcccagcctgctgtccgagaccttctgcgaggacctggaacgcaagaagaaggccgtgtccttcttcgacgacgtcaccgtctacctctttgaccaggaaagccccacccgggagctcggggagcccttcccgggcgccaaggaatcgccccctacgttccttagggggagccccggctctcccagcgcccccaaccggccgcagcaggctgatggctccccaaatggctccacagcggaagagggtggtgggttcgcgtgggacgacgacttcccgctgatgacggccaaggcagccttcgccatggccctagacccggccgcacccgccccggctgcgcccacgcccacgcccgctcccttctcgcgcttcacggtgtcgcccgcgcccacgtcccgcttctccatcacgcacgtgtctgactcggacgccgagtccaagagaggacctgaagctggtgccgggggtgagagtaaagaggcttgagacctgggcagctcctgcccctcaaggctggcgtcaccggagcccctgccaggcagcagcgaggatggtgaccgagaaggtggggaccacgtcctggtggctgttggcagcagattcaggtgcctctgccccacgcggtgtcctggagaagcccgtgggatgagaggccctggatggtagatcggccatgctccgccccagaggcagaattcgtctgggcttttaggcttgctgctagcccctgggggcgcctggagccacagtgggtgtctgtacacacatacacactcaaaaggggccagtgcccctgggcacggcggcccccaccctctgccctgcctgcctggcctcggaggacccgcatgccccatccggcagctcctccggtgtgctcacaggacacttaaaccaggacgaggcatggccccgagacactggcaggtttgtgagcctcttcccaccccctgtgcccccacccttgcctggttcctggtggctcagggcaaggagtggccctgggcgcccgtgtcggtcctgtttccgctgcccttatctcaaagtccgtggctgtttccccttcactgactcagctagacccgtaagcccacccttcccacagggaacaggctgctcccacctgggtcccgctgtggccacggtgggcagcccaaaagatcaggggtggaggggcttccaggctgtactcctgccccgtgggccccgttctagaggtgcccttggcaggaccgtgcaggcagctcccctctgtggggcagtatctggtcctgtgccccagctgccaaaggagagtgggggccatgccccgcagtcagtgttggggggctcctacctacagggagagggatggtggggaaggggtggagctgggggcagggcagcacagggaatatttttgtaactaactaactgctgtggttggagcgaatggaagttgggtgattttaagttattgttgccaaagagatgtaaagtttattgttgcttcgcagggggatttgttttgtgttttgtttgaggcttagaacgctggtgcaatgttttcttgttccttgttttttaagagaaatgaagctaagacaaaagaaa

SEQ ID NO: 2276 - DNA, 4928 bp, Homo sapiens
  source 1..4928: mol_type = unassigned DNA
gatgcggcggctcgggccggggccgcgggcgtcctgagcgcagcgccctcccgggatgcccgccggccgctggcccggccatgtcgtcgtccttcttcaaccccagcttcgccttcagctcgcacttcgaccccgacggcgccccgctcagcgagctgtcctggccatcctccctcgccgtggtggctgtgtctttctccgggctcttcgccgtcatcgtcctcatgctggcctgcctgtgctgtaagaagggcggtatcgggttcaaggagtttgagaatgcggagggggacgagtacgcagccgacctggcgcagggctccccggccacggcagcacagaacgggcccgacgtgtacgtcctgccactcacggaggtctccttgcccatggccaagcagcctgggcgctcagtgcagctcctcaagtccacagacgtgggccggcacagcctcctgtacctgaaggaaatcggccgtggctggttcgggaaggtgttcctgggggaggtgaactctggcatcagcagtgcccaggtggtggtgaaggagctgcaggctagtgccagcgtgcaggagcagatgcagttcctggaggaggtgcagccctacagggccctgaagcacagcaacctgctccagtgcctggcccagtgcgccgaggtgacgccctacctgctggtgatggagttctgcccactgggggacctcaagggctacctgcggagctgccgggtggcggagtccatggctcccgacccccggaccctgcagcgcatggcctgtgaggtggcctgtggcgtcctgcaccttcatcgcaacaatttcgtgcacagcgacctggccctgcggaactgcctgctcacggctgacctgacggtgaagattggtgactatggcctggctcactgcaagtacagagaggactacttcgtgactgccgaccagctgtgggtgcctctgcgctggatcgcgccagagctggtggacgaggtgcatagcaacctgctcgtcgtggaccagaccaagagcgggaatgtgtggtccctgggcgtgaccatctgggagctctttgagctgggcacgcagccctatccccagcactcggaccagcaggtgctggcgtacacggtccgggagcagcagctcaagctgcccaagccccagctgcagctgaccctgtcggaccgctggtacgaggtgatgcagttctgctggctgcagcccgagcagcggcccacagccgaggaggtgcacctgctgctgtcctacctgtgtgccaagggcgccaccgaagcagaggaggagtttgaacggcgctggcgctctctgcggcccggcgggggcggcgtggggcccgggcccggtgcggcggggcccatgctgggcggcgtggtggagctcgccgctgcctcgtccttcccgctgctggagcagttcgcgggcgacggcttccacgcggacggcgacgacgtgctgacggagctgtgcgcccccgacggcgcgcccccgggcgtggttccggtgctcagcgcgcacagcccgtcgctgggcagcgagtacttcatccgcctagaggaggccgcacccgccgccggccacgaccctgactgcgccggctgcgcccccagtccacctgccaccgcggaccaggacgacgactctgacggcagcaccgccgcctcgctggccatggagccgctgctgggccacgggccacccgtcgacgtcccctggggccgcggcgaccactaccctcgcagaagcttggcgcgggacccgctctgcccctcacgctctccctcgccctcggcggggcccctgagtctggcggagggaggagcggaggatgcagactggggcgtggccgccttctgtcctgccttcttcgaggacccactgggcacgtcccctttggggagctcaggggcgcccccgctgccgctgactggcgaggatgagctagaggaggtgggagcgcggagggccgcccagcgcgggcactggcgctccaacgtgtcagccaacaacaacagcggcagccgctgtccagagtcctgggaccccgtctctgcgggcggccacgctgagggctgccccagtccaaagcagaccccacgggcctcccccgagccggggtaccctggagagcctctgcttgggctccaggcagcctctgcccaggagccaggctgctgccccggcctccctcatctatgctctgcccagggcctggcacctgctccctgcctggttacaccctcctggacagagacagccagtagtgggggtgaccacccgcaggcagagcccaagcttgccacggaggctgagggcactaccggaccccgcctgccccttccttccgtcccctccccatcccaggagggagccccacttccctcggaggaggccagtgcccccgacgcccctgatgccctgcctgactctcccacgcctgctactggtggcgaggtgtctgccatcaagctggcttctgccctgaatggcagcagcagctctcccgaggtggaggcacccagcagtgaggatgaggacacggccgaggccacctcaggcatcttcaccgacacgtccagcgacggcctgcaggccaggaggccggatgtggtgccagccttccgctctctgcagaagcagtggcctcaacgagaagaatccctaccgagactctgcctacttctcagacctcgaggctgaggccgaggccacctcaggcccagagaagaagtgcggcggggaccgagcccccgggccagagctgggcctgccgagcactgggcagccgtctgagcaggtctgtctcaggcctggggtttccggggaggcacaaggctctggccccggggaggtgctgcccccactgctgcagcttgaagggtcctccccagagcccagcacctgcccctcgggcctggtcccagagcctccggagccccaaggcccagccaaggtgcggcctgggcccagccccagctgctcccagtttttcctgctgaccccggttccgctgagatcagaaggcaacagctctgagttccaggggcccccaggactgttgtcagggccggccccacaaaagcggatggggggcccaggcacccccagagccccactccgcctggctctgcccggcctccctgcggccttggagggccggccggaggaggaggaggaggacagtgaggacagcgacgagtctgacgaggagctccgctgctacagcgtccaggagcctagcgaggacagcgaagaggaggcgccggcggtgcccgtggtggtggctgagagccagagcgcgcgcaacctgcgcagcctgctcaagatgcccagcctgctgtccgagaccttctgcgaggacctggaacgcaagaagaaggccgtgtccttcttcgacgacgtcaccgtctacctctttgaccaggaaagccccacccgggagctcggggagcccttcccgggcgccaaggaatcgccccctacgttccttagggggagccccggctctcccagcgcccccaaccggccgcagcaggctgatggctccccaaatggctccacagcggaagagggtggtgggttcgcgtgggacgacgacttcccgctgatgacggccaaggcagccttcgccatggccctagacccggccgcacccgccccggctgcgcccacgcccacgcccgctcccttctcgcgcttcacggtgtcgcccgcgcccacgtcccgcttctccatcacgcacgtgtctgactcggacgccgagtccaagagaggacctgaagctggtgccgggggtgagagtaaagaggcttgagacctgggcagctcctgcccctcaaggctggcgtcaccggagcccctgccaggcagcagcgaggatggtgaccgagaaggtggggaccacgtcctggtggctgttggcagcagattcaggtgcctctgccccacgcggtgtcctggagaagcccgtgggatgagaggccctggatggtagatcggccatgctccgccccagaggcagaattcgtctgggcttttaggcttgctgctagcccctgggggcgcctggagccacagtgggtgtctgtacacacatacacactcaaaaggggccagtgcccctgggcacggcggcccccaccctctgccctgcctgcctggcctcggaggacccgcatgccccatccggcagctcctccggtgtgctcacaggacacttaaaccaggacgaggcatggccccgagacactggcaggtttgtgagcctcttcccaccccctgtgcccccacccttgcctggttcctggtggctcagggcaaggagtggccctgggcgcccgtgtcggtcctgtttccgctgcccttatctcaaagtccgtggctgtttccccttcactgactcagctagacccgtaagcccacccttcccacagggaacaggctgctcccacctgggtcccgctgtggccacggtgggcagcccaaaagatcaggggtggaggggcttccaggctgtactcctgccccgtgggccccgttctagaggtgcccttggcaggaccgtgcaggcagctcccctctgtggggcagtatctggtcctgtgccccagctgccaaaggagagtgggggccatgccccgcagtcagtgttggggggctcctacctacagggagagggatggtggggaaggggtggagctgggggcagggcagcacagggaatatttttgtaactaactaactgctgtggttggagcgaatggaagttgggtgattttaagttattgttgccaaagagatgtaaagtttattgttgcttcgcagggggatttgttttgtgttttgtttgaggcttagaacgctggtgcaatgttttcttgttccttgttttttaagagaaatgaagct

SEQ ID NO: 2277 - DNA, 5081 bp, Homo sapiens
  source 1..5081: mol_type = unassigned DNA
gccaccaggtgaaggtccaaggctgctggggcagatggcggtggcaggagtttgagaatgcggagggggacgagtacgcagccgacctggcgcagggctccccggccacggcagcacagaacgggcccgacgtgtacgtcctgccactcacggaggtctccttgcccatggccaagcagcctgggcgctcagtgcagctcctcaagtccacagacgtgggccggcacagcctcctgtacctgaaggaaatcggccgtggctggttcgggaaggtgttcctgggggaggtgaactctggcatcagcagtgcccaggtggtggtgaaggagctgcaggctagtgccagcgtgcaggagcagatgcagttcctggaggaggtgcagccctacagggccctgaagcacagcaacctgctccagtgcctggcccagtgcgccgaggtgacgccctacctgctggtgatggagttctgcccactgggggacctcaagggctacctgcggagctgccgggtggcggagtccatggctcccgacccccggaccctgcagcgcatggcctgtgaggtggcctgtggcgtcctgcaccttcatcgcaacaatttcgtgcacagcgacctggccctgcggaactgcctgctcacggctgacctgacggtgaagattggtgactatggcctggctcactgcaagtacagagaggactacttcgtgactgccgaccagctgtgggtgcctctgcgctggatcgcgccagagctggtggacgaggtgcatagcaacctgctcgtcgtggaccagaccaagagcgggaatgtgtggtccctgggcgtgaccatctgggagctctttgagctgggcacgcagccctatccccagcactcggaccagcaggtgctggcgtacacggtccgggagcagcagctcaagctgcccaagccccagctgcagctgaccctgtcggaccgctggtacgaggtgatgcagttctgctggctgcagcccgagcagcggcccacagccgaggaggtgcacctgctgctgtcctacctgtgtgccaagggcgccaccgaagcagaggaggagtttgaacggcgctggcgctctctgcggcccggcgggggcggcgtggggcccgggcccggtgcggcggggcccatgctgggcggcgtggtggagctcgccgctgcctcgtccttcccgctgctggagcagttcgcgggcgacggcttccacgcggacggcgacgacgtgctgacggtgaccgagaccagccgaggcctcaattttgagtacaagtgggaggcgggccgcggcgcggaggccttcccggccacgctgagccctggccgcaccgcacgcctgcaggagctgtgcgcccccgacggcgcgcccccgggcgtggttccggtgctcagcgcgcacagcccgtcgctgggcagcgagtacttcatccgcctagaggaggccgcacccgccgccggccacgaccctgactgcgccggctgcgcccccagtccacctgccaccgcggaccaggacgacgactctgacggcagcaccgccgcctcgctggccatggagccgctgctgggccacgggccacccgtcgacgtcccctggggccgcggcgaccactaccctcgcagaagcttggcgcgggacccgctctgcccctcacgctctccctcgccctcggcggggcccctgagtctggcggagggaggagcggaggatgcagactggggcgtggccgccttctgtcctgccttcttcgaggacccactgggcacgtcccctttggggagctcaggggcgcccccgctgccgctgactggcgaggatgagctagaggaggtgggagcgcggagggccgcccagcgcgggcactggcgctccaacgtgtcagccaacaacaacagcggcagccgctgtccagagtcctgggaccccgtctctgcgggcggccacgctgagggctgccccagtccaaagcagaccccacgggcctcccccgagccggggtaccctggagagcctctgcttgggctccaggcagcctctgcccaggagccaggctgctgccccggcctccctcatctatgctctgcccagggcctggcacctgctccctgcctggttacaccctcctggacagagacagccagtagtgggggtgaccacccgcaggcagagcccaagcttgccacggaggctgagggcactaccggaccccgcctgccccttccttccgtcccctccccatcccaggagggagccccacttccctcggaggaggccagtgcccccgacgcccctgatgccctgcctgactctcccacgcctgctactggtggcgaggtgtctgccatcaagctggcttctgccctgaatggcagcagcagctctcccgaggtggaggcacccagcagtgaggatgaggacacggccgaggccacctcaggcatcttcaccgacacgtccagcgacggcctgcaggccaggaggccggatgtggtgccagccttccgctctctgcagaagcaggtggggacccccgactccctggactccctggacatcccgtcctcagccagtgatggtggctatgaggtcttcagcccgtcggccactggcccctctggagggcagccgcgagcgctggacagtggctatgacaccgagaactatgagtcccctgagtttgtgctcaaggaggcgcaggaagggtgtgagccccaggcctttgcggagctggcctcagagggtgagggccccgggcccgagacacggctctccacctccctcagtggcctcaacgagaagaatccctaccgagactctgcctacttctcagacctcgaggctgaggccgaggccacctcaggcccagagaagaagtgcggcggggaccgagcccccgggccagagctgggcctgccgagcactgggcagccgtctgagcaggtctgtctcaggcctggggtttccggggaggcacaaggctctggccccggggaggtgctgcccccactgctgcagcttgaagggtcctccccagagcccagcacctgcccctcgggcctggtcccagagcctccggagccccaaggcccagccaaggtgcggcctgggcccagccccagctgctcccagtttttcctgctgaccccggttccgctgagatcagaaggcaacagctctgagttccaggggcccccaggactgttgtcagggccggccccacaaaagcggatggggggcccaggcacccccagagccccactccgcctggctctgcccggcctccctgcggccttggagggccggccggaggaggaggaggaggacagtgaggacagcgacgagtctgacgaggagctccgctgctacagcgtccaggagcctagcgaggacagcgaagaggaggcgccggcggtgcccgtggtggtggctgagagccagagcgcgcgcaacctgcgcagcctgctcaagatgcccagcctgctgtccgagaccttctgcgaggacctggaacgcaagaagaaggccgtgtccttcttcgacgacgtcaccgtctacctctttgaccaggaaagccccacccgggagctcggggagcccttcccgggcgccaaggaatcgccccctacgttccttagggggagccccggctctcccagcgcccccaaccggccgcagcaggctgatggctccccaaatggctccacagcggaagagggtggtgggttcgcgtgggacgacgacttcccgctgatgacggccaaggcagccttcgccatggccctagacccggccgcacccgccccggctgcgcccacgcccacgcccgctcccttctcgcgcttcacggtgtcgcccgcgcccacgtcccgcttctccatcacgcacgtgtctgactcggacgccgagtccaagagaggacctgaagctggtgccgggggtgagagtaaagaggcttgagacctgggcagctcctgcccctcaaggctggcgtcaccggagcccctgccaggcagcagcgaggatggtgaccgagaaggtggggaccacgtcctggtggctgttggcagcagattcaggtgcctctgccccacgcggtgtcctggagaagcccgtgggatgagaggccctggatggtagatcggccatgctccgccccagaggcagaattcgtctgggcttttaggcttgctgctagcccctgggggcgcctggagccacagtgggtgtctgtacacacatacacactcaaaaggggccagtgcccctgggcacggcggcccccaccctctgccctgcctgcctggcctcggaggacccgcatgccccatccggcagctcctccggtgtgctcacaggacacttaaaccaggacgaggcatggccccgagacactggcaggtttgtgagcctcttcccaccccctgtgcccccacccttgcctggttcctggtggctcagggcaaggagtggccctgggcgcccgtgtcggtcctgtttccgctgcccttatctcaaagtccgtggctgtttccccttcactgactcagctagacccgtaagcccacccttcccacagggaacaggctgctcccacctgggtcccgctgtggccacggtgggcagcccaaaagatcaggggtggaggggcttccaggctgtactcctgccccgtgggccccgttctagaggtgcccttggcaggaccgtgcaggcagctcccctctgtggggcagtatctggtcctgtgccccagctgccaaaggagagtgggggccatgccccgcagtcagtgttggggggctcctacctacagggagagggatggtggggaaggggtggagctgggggcagggcagcacagggaatatttttgtaactaactaactgctgtggttggagcgaatggaagttgggtgattttaagttattgttgccaaagagatgtaaagtttattgttgcttcgcagggggatttgttttgtgttttgtttgaggcttagaacgctggtgcaatgttttcttgttccttgttttttaagagaaatgaagctaaga

SEQ ID NO: 2278 - DNA, 796 bp, Homo sapiens
  source 1..796: mol_type = unassigned DNA
gggaaaatccgacctggccgcgcaccaccgccccttctcggccctcctgcgtttgcccagggtcggcccgcagtgatggaggaggaggcggagaccgaggagcagcagcgattctcttaccaacagaggctaaaggcagcagttcactatactgtgggttgtctttgcgaggaagttgcattggacaaagagatgcagttcagcaaacagaccattgcggccatttcggagctgactttccgacagtgtgaaaattttgccaaagaccttgaaatgtttgcaagacatgcgaaaagaaccacaattaacactgaagatgtgaagctcttagccaggaggagtaattcactgctaaaatacatcacagacaaaagtgaagagattgctcagattaacctagaacgaaaagcacagaagaaaaagaagtcagaggatggaagcaaaaattcaaggcagccagcagaggctggagtggtggaaagtgagaattaaagtccctcgccgcttggaaagtgcagccttctacaggtagagccacctagaaatgcatatggctgcaaaggaaactttgaagggttaaatagagatttaaaaaaataaaataaaaaggctgggctagggtgctttttgtgctgaattctccacattgttaactgccaaagctagttttagagaatgagaaagtcttaagcaaaatactcccaggtctcactccagaacataaaaatggtgtgtgatcaaatggtatatattagaaattacatctgttgtaattaaaattgtgtgagcaattaaa

SEQ ID NO: 2279 - DNA, 1469 bp, Homo sapiens
  source 1..1469: mol_type = unassigned DNA
ggagctcctgataatgtgtactgcgttacatgatctgtaaatcgtgggctacgcatcctctacacccgactggaacacgctttgcacctatgcgcacacgtgtttcgcggagagtggtgctcagcgttgtgccaggcgctgaatcaggctctggggtgcagcagtgacctcggtggtcatgtccccgcgtcgcccggccacctccgcagagcaagctgagcagggggctggctggaggccgacggcggaatcccctcaacggagcgccgccagggggcgcgcgaggcagggcggagctgcgtactttgtccgcccgcgcggcccgtcgctcgcgccgcggcgggaaaatccgacctggccgcgcaccaccgccccttctcggccctcctgcgtttgcccagggtcggcccgcagtgatggaggaggaggcggagaccgaggagcagcagcgattctcttaccaacagaggctaaaggcagcagttcactatactgtgggttgtctttgcgaggaagttgcattggacaaagagatgcagttcagcaaacagaccattgcggccatttcggagctgactttccgacagtgtgaaaattttgccaaagaccttgaaatgtttgcaagacatgcgaaaagaaccacaattaacactgaagatgtgaagctcttagccaggaggagtaattcactgcatatgcaggaagcggcaggaataaggaaaagcagcctcctgactttcctcgcttggtggtttgagtggacctcccaggccagtgccgggcccctcataggagaggaagcccgggaggtggccaggcggcaggaaggcgcacccccccagcaatctgcgcgccgggacagaatgccctgcaggaacttcttctggaagaccttctcctcctgcaaataaaacctcacccatgaatgctcacgcaagtgtaatgacagacctgaataaaatgtattaagcagcagtgatctttcctctcctccttcccaagtcatttgaaaagtgtttgttatttaaattccaataatgcccaatactgacgtgtcttgagtaatttggaacccaaagtgaagatctttgataaagatttttttgtggttcgactggactgtgctgagtgcgggcactgggcttttcttctgatgttcattatggtgctgggaagctctgtctttgatttaaaataaaatagctaaaggctacacaattaagagttcagaataacatcttatttcagtttatgaattgatatgaattgtctaatttaaaaaatatttccctcacattaaaagcaaatttttaatatcaggctcgaagagcaaaatgattattcctcatgttttagctgaaattaattttaaaacatattaaacagaaaacctgctgacatgcctgtgaaactgatactcgaacttgctgttatgtaccagttttaattagtagcttaatgggttgcaa

SEQ ID NO: 2280 - DNA, 1402 bp, Homo sapiens
  source 1..1402: mol_type = unassigned DNA
ggagctcctgataatgtgtactgcgttacatgatctgtaaatcgtgggctacgcatcctctacacccgactggaacacgctttgcacctatgcgcacacgtgtttcgcggagagtggtgctcagcgttgtgccaggcgctgaatcaggctctggggtgcagcagtgacctcggtggtcatgtccccgcgtcgcccggccacctccgcagagcaagctgagcagggggctggctggaggccgacggcggaatcccctcaacggagcgccgccagggggcgcgcgaggcagggcggagctgcgtactttgtccgcccgcgcggcccgtcgctcgcgccgcggcgggaaaatccgacctggccgcgcaccaccgccccttctcggccctcctgcgtttgcccagggtcggcccgcagtgatggaggaggaggcggagaccgaggagcagcagcgattctcttaccaacagaggctaaaggcagcagttcactatactgtgggttgtctttgcgaggaagttgcattggacaaagagatgcagttcagcaaacagaccattgcggccatttcggagctgactttccgacagtgtgaaaattttgccaaagaccttgaaatgtttgcaagcatatgcaggaagcggcaggaataaggaaaagcagcctcctgactttcctcgcttggtggtttgagtggacctcccaggccagtgccgggcccctcataggagaggaagcccgggaggtggccaggcggcaggaaggcgcacccccccagcaatctgcgcgccgggacagaatgccctgcaggaacttcttctggaagaccttctcctcctgcaaataaaacctcacccatgaatgctcacgcaagtgtaatgacagacctgaataaaatgtattaagcagcagtgatctttcctctcctccttcccaagtcatttgaaaagtgtttgttatttaaattccaataatgcccaatactgacgtgtcttgagtaatttggaacccaaagtgaagatctttgataaagatttttttgtggttcgactggactgtgctgagtgcgggcactgggcttttcttctgatgttcattatggtgctgggaagctctgtctttgatttaaaataaaatagctaaaggctacacaattaagagttcagaataacatcttatttcagtttatgaattgatatgaattgtctaatttaaaaaatatttccctcacattaaaagcaaatttttaatatcaggctcgaagagcaaaatgattattcctcatgttttagctgaaattaattttaaaacatattaaacagaaaacctgctgacatgcctgtgaaactgatactcgaacttgctgttatgtaccagttttaattagtagcttaatgggttgcaa

SEQ ID NO: 2281 - DNA, 2018 bp, Homo sapiens
  source 1..2018: mol_type = unassigned DNA
agcgccggaagcggtgaggcacagatgagtaacgtgaatttgtccgtctccgacttctggagagtgatgatgcgggtgtgctggttggtgagacaggacagccggcaccagcgaatcagacttccacatttggaagcagttgtgattgggcgtggcccagagaccaagatcactgataagaaatgttctcgacagcaagtacagttgaaagcagagtgtaacaagggatatgtcaaggtaaagcaggtaggagtcaatcccaccagcattgactcagtcgtaattgggaaggaccaagaggtgaagctgcagcctggccaggttctccacatggtgaatgaactttatccatatattgtagagtttgaggaagaggcaaagaaccctggcctggaaacacacaggaagagaaagagatcaggcaacagtgattctatagaaagggatgctgctcaggaagctgaggctgggacagggctggaacctgggagcaactctggccaatgctctgtgcccctaaagaagggaaaagatgcacctatcaaaaaggaatccctgggccactggagtcaaggcttgaagatttctatgcaggaccccaaaatgcaggtttacaaagatgagcaggtggtggtgataaaggataaatacccaaaggcccgttaccattggctggtcttaccgtggacctccatttccagtctgaaggctgtggccagggaacaccttgaactccttaagcatatgcacactgtgggggaaaaggtgattgtagattttgctgggtccagcaaactccgcttccgattgggctaccacgccattccgagtatgagccatgtacatcttcatgtgatcagccaggattttgattctccttgccttaaaaacaaaaaacattggaattctttcaatacagaatacttcctagaatcacaagagtagctgggatttgacttttcttccttgcctgcagctgtgatcgagatggtacaagaggctggtagagtaactgtccgagatgggatgcctgagctcttgaagctgccccttcgttgtcatgagtgccagcagctgctgccttccattcctcagctgaaagaacatctcaggaagcactggacacagtgattctgcagagcctgagctgctgctgtggtgtggcccactggagcaaactgctggcacctattctgggttgcttgtgaacttctactcatttcctaaattaaaacatgcagctttttcacaaatttattctattattgagtggccacaatgtagagtggctcaaagtacttcaggattaggaatttgggtttgtcatagatgtattctctggtgagggtggctgggatatacctgacccaccatcttcagaaggacccatgtcaggtctgaccattgggagcaaagccatgttcacactgacctaatgcagagtatggaagcattgggctggttatacatttctgtttcttagatttatcctccgcctctgtaggcatggacaacctttaatcagagcatctagagtggcctcttgtttatcctgaagatactgatgggtcttgttttctgttagtctgttttgtaatattcttttcccttccttcatggggaggcttagtttgtccagtccttccatgcccttctatcccagattacctaaatgttcccttctcaggaattctgtctcatcagttcttcacagtgagaaaagaggctagatgatggtgtggggggttggagttttcttctaataccgagggttcctggctgtgaggaaacagccacatgttcgtcatgattgagctgtgaagtcttcttggacctgttgtctgaaaataaagttaatttgtttgaggcatctctcttaagtaggtggaaactattgaagttcagctaacaatcacagcataggttctgatgcatggaaaggtggttggtgaatgaaaaagttgcgtagagccactactttctttttccctgagaataaatttggataaaacagttgt

SEQ ID NO: 2282 - DNA, 1143 bp, Homo sapiens
  source 1..1143: mol_type = unassigned DNA
ggtgaggcacagatgagtaacgtgaatttgtccgtctccgacttctggagagtgatgatgcgggtgtgctggttggtgagacaggacagccggcaccagcgaatcagacttccacatttggaagcagttgtgattgggcgtggcccagagaccaagatcactgataagaaatgttctcgacagcaagtacagttgaaagcagagtgtaacaagggatatgtcaaggtaaagcaggtaggagtcaatcccaccagcattgactcagtcgtaattgggaaggaccaagaggtgaagctgcagcctggccaggttctccacatggtgaatgaactttatccatatattgtagagtttgaggaagaggcaaagaaccctggcctggaaacacacaggaagagaaagagatcaggcaacagtgattctatagaaagggatgctgctcaggaagctgaggctgggacagggctggaacctgggagcaactctggccaatgctctgtgcccctaaagaagggaaaagatgcacctatcaaaaagaaagtttacaaagatgagcaggtggtggtgataaaggataaatacccaaaggcccgttaccattggctggtcttaccgtggacctccatttccagtctgaaggctgtggccagggaacaccttgaactccttaagcatatgcacactgtgggggaaaaggtgattgtagattttgctgggtccagcaaactccgcttccgattgggctaccacgccattccgagtatgagccatgtacatcttcatgtgatcagccaggattttgattctccttgccttaaaaacaaaaaacattggaattctttcaatacagaatacttcctagaatcacaagctgtgatcgagatggtacaagaggctggtagagtaactgtccgagatgggatgcctgagctcttgaagctgccccttcgttgtcatgagtgccagcagctgctgccttccattcctcagctgaaagaacatctcaggaagcactggacacagtgattctgcagagcctgagctgctgctgtggtgtggcccactggagcaaactgctggcacctattctgggttgcttgtgaacttctactcatttcctaaattaaaacatgcagctttttc

SEQ ID NO: 2283 - DNA, 1200 bp, Homo sapiens
  source 1..1200: mol_type = unassigned DNA
ggtgaggcacagatgagtaacgtgaatttgtccgtctccgacttctggagagtgatgatgcgggtgtgctggttggtgagacaggacagccggcaccagcgaatcagacttccacatttggaagcagttgtgattgggcgtggcccagagaccaagatcactgataagaaatgttctcgacagcaagtacagttgaaagcagagtgtaacaagggatatgtcaaggtaaagcaggtaggagtcaatcccaccagcattgactcagtcgtaattgggaaggaccaagaggtgaagctgcagcctggccaggttctccacatggtgaatgaactttatccatatattgtagagtttgaggaagaggcaaagaaccctggcctggaaacacacaggaagagaaagagatcaggcaacagtgattctatagaaagggatgctgctcaggaagctgaggctgggacagggctggaacctgggagcaactctggccaatgctctgtgcccctaaagaagggaaaagatgcacctatcaaaaaggaatccctgggccactggagtcaaggcttgaagatttctatgcaggaccccaaaatgcaggtttacaaagatgagcaggtggtggtgataaaggataaatacccaaaggcccgttaccattggctggtcttaccgtggacctccatttccagtctgaaggctgtggccagggaacaccttgaactccttaagcatatgcacactgtgggggaaaaggtgattgtagattttgctgggtccagcaaactccgcttccgattgggctaccacgccattccgagtatgagccatgtacatcttcatgtgatcagccaggattttgattctccttgccttaaaaacaaaaaacattggaattctttcaatacagaatacttcctagaatcacaagctgtgatcgagatggtacaagaggctggtagagtaactgtccgagatgggatgcctgagctcttgaagctgccccttcgttgtcatgagtgccagcagctgctgccttccattcctcagctgaaagaacatctcaggaagcactggacacagtgattctgcagagcctgagctgctgctgtggtgtggcccactggagcaaactgctggcacctattctgggttgcttgtgaacttctactcatttcctaaattaaaacatgcagctttttc

SEQ ID NO: 2284 - DNA, 1820 bp, Homo sapiens
  source 1..1820: mol_type = unassigned DNA
atgagtaacgtgaatttgtccgtctccgacttctggagagtgatgatgcgggtgtgctggttggtgagacaggacagccggcaccagcgaatcagacttccacatttggaagcagttgtgattgggcgtggcccagagaccaagatcactgataagaaatgttctcgacagcaagtacagttgaaagcagagtgtaacaagggatatgtcaaggtaaagcaggtaggagtcaatcccaccagcattgactcagtcgtaattgggaaggaccaagaggtgaagctgcagcctggccaggttctccacatggtgaatgaactttatccatatattgtagagtttgaggaagaggcaaagaaccctggcctggaaacacacaggaagagaaagagatcaggcaacagtgattctatagaaagggatgctgctcaggaagctgaggctgggacagggctggaacctgggagcaactctggccaatgctctgtgcccctaaagaagggaaaagatgcacctatcaaaaaggaatccctgggccactggagtcaaggcttgaagatttctatgcaggaccccaaaatgcaggtttacaaagatgagcaggtggtggtgataaaggataaatacccaaaggcccgttaccattggctggtcttaccgtggacctccatttccagtctgaaggctgtggccagggaacaccttgaactccttaagcatatgcacactgtgggggaaaaggtgattgtagattttgctgggtccagcaaactccgcttccgattgggctaccacgccattccgagtatgagccatgtacatcttcatgtgatcagccaggattttgattctccttgccttaaaaacaaaaaacattggaattctttcaatacagaatacttcctagaatcacaagctgtgatcgagatggtacaagaggctggtagagtaactgtccgagatgggatgcctgagctcttgaagctgccccttcgttgtcatgagtgccagcagctgctgccttccattcctcagctgaaagaacatctcaggaagcactggacacagtgattctgcagagcctgagctgctgctgtggtgtggcccactggagcaaactgctggcacctattctgggttgcttgtgaacttctactcatttcctaaattaaaacatgcagctttttcacaaatttattctattattgagtggccacaatgtagagtggctcaaagtacttcaggattaggaatttgggtttgtcatagatgtattctctggtgagggtggctgggatatacctgacccaccatcttcagaaggacccatgtcaggtctgaccattgggagcaaagccatgttcacactgacctaatgcagagtatggaagcattgggctggttatacatttctgtttcttagatttatcctccgcctctgtaggcatggacaacctttaatcagagcatctagagtggcctcttgtttatcctgaagatactgatgggtcttgttttctgttagtctgttttgtaatattcttttcccttccttcatggggaggcttagtttgtccagtccttccatgcccttctatcccagattacctaaatgttcccttctcaggaattctgtctcatcagttcttcacagtgagaaaagaggctagatgatggtgtggggggttggagttttcttctaataccgagggttcctggctgtgaggaaacagccacatgttcgtcatgattgagctgtgaagtcttcttggacctgttgtctgaaaataaagttaatttgtttgaggcatctctcttaa

SEQ ID NO: 2285 - DNA, 2023 bp, Homo sapiens
  source 1..2023: mol_type = unassigned DNA
agcgccggaagcggtgaggcacagatgagtaacgtgaatttgtccgtctccgacttctggagagtgatgatgcgggtgtgctggttggtgagacaggacagccggcaccagcgaatcagacttccacatttggaagcagttgtgattgggcgtggcccagagaccaagatcactgataagaaatgttctcgacagcaagtacagttgaaagcagagtgtaacaagggatatgtcaaggtaaagcaggtaggagtcaatcccaccagcattgactcagtcgtaattgggaaggaccaagaggtgaagctgcagcctggccaggttctccacatggtgaatgaactttatccatatattgtagagtttgaggaagaggcaaagaaccctggcctggaaacacacaggaagagaaagagatcaggcaacagtgattctatagaaagggatgctgctcaggaagctgaggctgggacagggctggaacctgggagcaactctggccaatgctctgtgcccctaaagaagggaaaagatgcacctatcaaaaaggaatccctgggccactggagtcaaggcttgaagatttctatgcaggaccccaaaatgcaggtttacaaagatgagcaggtggtggtgataaaggataaatacccaaaggcccgttaccattggctggtcttaccgtggacctccatttccagtctgaaggctgtggccagggaacaccttgaactccttaagcatatgcacactgtgggggaaaaggtgattgtagattttgctgggtccagcaaactccgcttccgattgggctaccacgccattccgagtatgagccatgtacatcttcatgtgatcagccaggattttgattctccttgccttaaaaacaaaaaacattggaattctttcaatacagaatacttcctagaatcacaagagtagctgggatttgacttttcttccttgcctgcagctgtgatcgagatggtacaagaggctggtagagtaactgtccgagatgggatgcctgagctcttgaagctgccccttcgttgtcatgagtgccagcagctgctgccttccattcctcagctgaaagaacatctcaggaagcactggacacagtgattctgcagagcctgagctgctgctgtggtgtggcccactggagcaaactgctggcacctattctgggttgcttgtgaacttctactcatttcctaaattaaaacatgcagctttttcacaaatttattctattattgagtggccacaatgtagagtggctcaaagtacttcaggattaggaatttgggtttgtcatagatgtattctctggtgagggtggctgggatatacctgacccaccatcttcagaaggacccatgtcaggtctgaccattgggagcaaagccatgttcacactgacctaatgcagagtatggaagcattgggctggttatacatttctgtttcttagatttatcctccgcctctgtaggcatggacaacctttaatcagagcatctagagtggcctcttgtttatcctgaagatactgatgggtcttgttttctgttagtctgttttgtaatattcttttcccttccttcatggggaggcttagtttgtccagtccttccatgcccttctatcccagattacctaaatgttcccttctcaggaattctgtctcatcagttcttcacagtgagaaaagaggctagatgatggtgtggggggttggagttttcttctaataccgagggttcctggctgtgaggaaacagccacatgttcgtcatgattgagctgtgaagtcttcttggacctgttgtctgaaaataaagttaatttgtttgaggcatctctcttaagtaggtggaaactattgaagttcagctaacaatcacagcataggttctgatgcatggaaaggtggttggtgaatgaaaaagttgcgtagagccactactttctttttccctgagaataaatttggataaaacagttgtattca

SEQ ID NO: 2286 - DNA, 1740 bp, Homo sapiens
  source 1..1740: mol_type = unassigned DNA
cagatgagtaacgtgaatttgtccgtctccgacttctggagagtgatgatgcgggtgtgctggttggtgagacaggacagccggcaccagcgaatcagacttccacatttggaagcagttgtgattgggcgtggcccagagaccaagatcactgataagaaatgttctcgacagcaagtacagttgaaagcagagtgtaacaagggatatgtcaaggtaaagcaggtaggagtcaatcccaccagcattgactcagtcgtaattgggaaggaccaagaggtgaagctgcagcctggccaggttctccacatggaatccctgggccactggagtcaaggcttgaagatttctatgcaggaccccaaaatgcaggtttacaaagatgagcaggtggtggtgataaaggataaatacccaaaggcccgttaccattggctggtcttaccgtggacctccatttccagtctgaaggctgtggccagggaacaccttgaactccttaagcatatgcacactgtgggggaaaaggtgattgtagattttgctgggtccagcaaactccgcttccgattgggctaccacgccattccgagtatgagccatgtacatcttcatgtgatcagccaggattttgattctccttgccttaaaaacaaaaaacattggaattctttcaatacagaatacttcctagaatcacaagctgtgatcgagatggtacaagaggctggtagagtaactgtccgagatgggatgcctgagctcttgaagctgccccttcgttgtcatgagtgccagcagctgctgccttccattcctcagctgaaagaacatctcaggaagcactggacacagtgattctgcagagcctgagctgctgctgtggtgtggcccactggagcaaactgctggcacctattctgggttgcttgtgaacttctactcatttcctaaattaaaacatgcagctttttcacaaatttattctattattgagtggccacaatgtagagtggctcaaagtacttcaggattaggaatttgggtttgtcatagatgtattctctggtgagggtggctgggatatacctgacccaccatcttcagaaggacccatgtcaggtctgaccattgggagcaaagccatgttcacactgacctaatgcagagtatggaagcattgggctggttatacatttctgtttcttagatttatcctccgcctctgtaggcatggacaacctttaatcagagcatctagagtggcctcttgtttatcctgaagatactgatgggtcttgttttctgttagtctgttttgtaatattcttttcccttccttcatggggaggcttagtttgtccagtccttccatgcccttctatcccagattacctaaatgttcccttctcaggaattctgtctcatcagttcttcacagtgagaaaagaggctagatgatggtgtggggggttggagttttcttctaataccgagggttcctggctgtgaggaaacagccacatgttcgtcatgattgagctgtgaagtcttcttggacctgttgtctgaaaataaagttaatttgtttgaggcatctctcttaagtaggtggaaactattgaagttcagctaacaatcacagcataggttctgatgcatggaaaggtggttggtgaatgaaaaagttgcgtagagccactactttctttttccctgagaataaatttggataaaaca

SEQ ID NO: 2287 - DNA, 1873 bp, Homo sapiens
  source 1..1873: mol_type = unassigned DNA
attttcacaacagcctcctgagtcccatcattatcatggtttataggtgaggaaattgagactagggtggtgaagtcacttgcctcaagatgaacagctggtagatcacatgcgtggtggcaccgggtgtggccctggaggactcgtgctagtggatctgtttttctagtgattcttttgttttgtcccttagagtgatgatgcgggtgtgctggttggtgagacaggacagccggcaccagcgaatcagacttccacatttggaagcagttgtgattgggcgtggcccagagaccaagatcactgataagaaatgttctcgacagcaagtacagttgaaagcagagtgtaacaagggatatgtcaaggtaaagcaggtaggagtcaatcccaccagcattgactcagtcgtaattgggaaggaccaagaggtgaagctgcagcctggccaggttctccacatggtgaatgaactttatccatatattgtagagtttgaggaagaggcaaagaaccctggcctggaaacacacaggaagagaaagagatcaggcaacagtgattctatagaaagggatgctgctcaggaagctgaggctgggacagggctggaacctgggagcaactctggccaatgctctgtgcccctaaagaagggaaaagatgcacctatcaaaaaggaatccctgggccactggagtcaaggcttgaagatttctatgcaggaccccaaaatgcagccatgtacatcttcatgtgatcagccaggattttgattctccttgccttaaaaacaaaaaacattggaattctttcaatacagaatacttcctagaatcacaagctgtgatcgagatggtacaagaggctggtagagtaactgtccgagatgggatgcctgagctcttgaagctgccccttcgttgtcatgagtgccagcagctgctgccttccattcctcagctgaaagaacatctcaggaagcactggacacagtgattctgcagagcctgagctgctgctgtggtgtggcccactggagcaaactgctggcacctattctgggttgcttgtgaacttctactcatttcctaaattaaaacatgcagctttttcacaaatttattctattattgagtggccacaatgtagagtggctcaaagtacttcaggattaggaatttgggtttgtcatagatgtattctctggtgagggtggctgggatatacctgacccaccatcttcagaaggacccatgtcaggtctgaccattgggagcaaagccatgttcacactgacctaatgcagagtatggaagcattgggctggttatacatttctgtttcttagatttatcctccgcctctgtaggcatggacaacctttaatcagagcatctagagtggcctcttgtttatcctgaagatactgatgggtcttgttttctgttagtctgttttgtaatattcttttcccttccttcatggggaggcttagtttgtccagtccttccatgcccttctatcccagattacctaaatgttcccttctcaggaattctgtctcatcagttcttcacagtgagaaaagaggctagatgatggtgtggggggttggagttttcttctaataccgagggttcctggctgtgaggaaacagccacatgttcgtcatgattgagctgtgaagtcttcttggacctgttgtctgaaaataaagttaatttgtttgaggcatctctcttaagtaggtggaaactattgaagttcagctaacaatcacagcataggttctgatgcatggaaaggtggttggtgaatgaaaaagttgcgtagagccactactttctttttccctgagaataaatttgg

SEQ ID NO: 2288 - DNA, 1455 bp, Homo sapiens
  source 1..1455: mol_type = unassigned DNA
gaggtgttgctgtgttgcccaagctggacttgaacccctaggctcaagcaatccttccacctcagtctcccaagtagcagggactacagagtgatgatgcgggtgtgctggttggtgagacaggacagccggcaccagcgaatcagacttccacatttggaagcagttgtgattgggcgtggcccagagaccaagatcactgataagaaatgttctcgacagcaagtacagttgaaagcagagtgtaacaagggatatgtcaaggtaaagcaggtaggagtcaatcccaccagcattgactcagtcgtaattgggaaggaccaagaggtgaagctgcagcctggccaggttctccacatggtgaatgaactttatccatatattgtagagtttgaggaagaggcaaagaaccctggcctggaaacacacaggaagagaaagagatcaggcaacagtgattctatagaaagggatgctgctcaggaagctgaggctgggacagggctggaacctgggagcaactctggccaatgctctgtgcccctaaagaagggaaaagatgcacctatcaaaaaggaatccctgggccactggagtcaaggcttgaagatttctatgcaggaccccaaaatgcaggtttacaaagatgagcaggtggtggtgataaaggataaatacccaaaggcccgttaccattggctggtcttaccgtggacctccatttccagtctgaaggctgtggccagggaacaccttgaactccttaagcatatgcacactgtgggggaaaaggtgattgtagattttgctgggtccagcaaactccgcttccgattgggctaccacgccattccgagtatgagccatgtacatcttcatgtgatcagccaggattttgattctccttgccttaaaaacaaaaaacattggaattctttcaatacagaatacttcctagaatcacaagctgtgatcgagatggtacaagaggctggtagagtaactgtccgagatgggatgcctgagctcttgaagctgccccttcgttgtcatgagtgccagcagctgctgccttccattcctcagctgaaagaacatctcaggaagcactggacacagtgattctgcagagcctgagctgctgctgtggtgtggcccactggagcaaactgctggcacctattctgggttgcttgtgaacttctactcatttcctaaattaaaacatgcagctttttcacaaatttattctattattgagtggccacaatgtagagtggctcaaagtacttcaggattaggaatttgggtttgtcatagatgtattctctggtgagggtggctgggatatacctgacccaccatcttcagaaggacccatgtcaggtctgaccattgggagcaaagccatgttcacactgacctaatgcagagtatggaagcattgggctggtt

SEQ ID NO: 2289 - DNA, 1068 bp, Homo sapiens
  source 1..1068: mol_type = unassigned DNA
gacgtcatcccgcagcgccggaagcggtgaggcacagatgagtaacgtgaatttgtccgtctccgacttctggagagtgatgatgcgggtgtgctggttggtgagacaggacagccggcaccagcgaatcagacttccacatttggaagcagttgtgattgggcgtggcccagagaccaagatcactgataagaaatgttctcgacagcaagagtttgaggaagaggcaaagaaccctggcctggaaacacacaggaagagaaagagatcaggcaacagtgattctatagaaagggatgctgctcaggaagctgaggctgggacagggctggaacctgggagcaactctggccaatgctctgtgcccctaaagaagggaaaagatgcacctatcaaaaaggaatccctgggccactggagtcaaggcttgaagatttctatgcaggaccccaaaatgcaggtttacaaagatgagcaggtggtggtgataaaggataaatacccaaaggcccgttaccattggctggtcttaccgtggacctccatttccagtctgaaggctgtggccagggaacaccttgaactccttaagcatatgcacactgtgggggaaaaggtgattgtagattttgctgggtccagcaaactccgcttccgattgggctaccacgccattccgagtatgagccatgtacatcttcatgtgatcagccaggattttgattctccttgccttaaaaacaaaaaacattggaattctttcaatacagaatacttcctagaatcacaagctgtgatcgagatggtacaagaggctggtagagtaactgtccgagatgggatgcctgagctcttgaagctgccccttcgttgtcatgagtgccagcagctgctgccttccattcctcagctgaaagaacatctcaggaagcactggacacagtgattctgcagagcctgagctgctgctgtggtgtggcccactggagcaaactgctggcacctattctgggttgcttgtgaacttctactcatttcctaaattaaaacatgcagctttttcacaaa

SEQ ID NO: 2290 - DNA, 2106 bp, Homo sapiens
  source 1..2106: mol_type = unassigned DNA
attttcacaacagcctcctgagtcccatcattatcatggtttataggtgaggaaattgagactagggtggtgaagtcacttgcctcaagatgaacagctggtagatcacatgcgtggtggcaccgggtgtggccctggaggactcgtgctagtggatctgtttttctagtgattcttttgttttgtcccttagagtgatgatgcgggtgtgctggttggtgagacaggacagccggcaccagcgaatcagacttccacatttggaagcagttgtgattgggcgtggcccagagaccaagatcactgataagaaatgttctcgacagcaagtacagttgaaagcagagtgtaacaagggatatgtcaaggtaaagcaggtaggagtcaatcccaccagcattgactcagtcgtaattgggaaggaccaagaggtgaagctgcagcctggccaggttctccacatggtgaatgaactttatccatatattgtagagtttgaggaagaggcaaagaaccctggcctggaaacacacaggaagagaaagagatcaggcaacagtgattctatagaaagggatgctgctcaggaagctgaggctgggacagggctggaacctgggagcaactctggccaatgctctgtgcccctaaagaagggaaaagatgcacctatcaaaaaggaatccctgggccactggagtcaaggcttgaagatttctatgcaggaccccaaaatgcaggtttacaaagatgagcaggtggtggtgataaaggataaatacccaaaggcccgttaccattggctggtcttaccgtggacctccatttccagtctgaaggctgtggccagggaacaccttgaactccttaagcatatgcacactgtgggggaaaaggtgattgtagattttgctgggtccagcaaactccgcttccgattgggctaccacgccattccgagtatgagccatgtacatcttcatgtgatcagccaggattttgattctccttgccttaaaaacaaaaaacattggaattctttcaatacagaatacttcctagaatcacaagctgtgatcgagatggtacaagaggctggtagagtaactgtccgagatgggatgcctgagctcttgaagctgccccttcgttgtcatgagtgccagcagctgctgccttccattcctcagctgaaagaacatctcaggaagcactggacacagtgattctgcagagcctgagctgctgctgtggtgtggcccactggagcaaactgctggcacctattctgggttgcttgtgaacttctactcatttcctaaattaaaacatgcagctttttcacaaatttattctattattgagtggccacaatgtagagtggctcaaagtacttcaggattaggaatttgggtttgtcatagatgtattctctggtgagggtggctgggatatacctgacccaccatcttcagaaggacccatgtcaggtctgaccattgggagcaaagccatgttcacactgacctaatgcagagtatggaagcattgggctggttatacatttctgtttcttagatttatcctccgcctctgtaggcatggacaacctttaatcagagcatctagagtggcctcttgtttatcctgaagatactgatgggtcttgttttctgttagtctgttttgtaatattcttttcccttccttcatggggaggcttagtttgtccagtccttccatgcccttctatcccagattacctaaatgttcccttctcaggaattctgtctcatcagttcttcacagtgagaaaagaggctagatgatggtgtggggggttggagttttcttctaataccgagggttcctggctgtgaggaaacagccacatgttcgtcatgattgagctgtgaagtcttcttggacctgttgtctgaaaataaagttaatttgtttgaggcatctctcttaagtaggtggaaactattgaagttcagctaacaatcacagcataggttctgatgcatggaaaggtggttggtgaatgaaaaagttgcgtagagccactactttctttttccctgagaataaatttggataaaa

SEQ ID NO: 2291 - DNA, 1029 bp, Homo sapiens
  source 1..1029: mol_type = unassigned DNA
agctctcagagggaattgagcacccggcagcggtctcaggccaagccccctgccagcatggccagcgagttcaagaagaagctcttctggagggcagtggtggccgagttcctggccacgaccctctttgtcttcatcagcatcggttctgccctgggcttcaaatacccggtggggaacaaccagacggcggtccaggacaacgtgaaggtgtcgctggccttcgggctgagcatcgccacgctggcgcagagtgtgggccacatcagcggcgcccacctcaacccggctgtcacactggggctgctgctcagctgccagatcagcatcttccgtgccctcatgtacatcatcgcccagtgcgtgggggccatcgtcgccaccgccatcctctcaggcatcacctcctccctgactgggaactcgcttggccgcaatgacctggctgatggtgtgaactcgggccagggcctgggcatcgagatcatcgggaccctccagctggtgctatgcgtgctggctactaccgaccggaggcgccgtgaccttggtggctcagccccccttgccatcggcctctctgtagcccttggacacctcctggctattgactacactggctgtgggattaaccctgctcggtcctttggctccgcggtgatcacacacaacttcagcaaccactggattttctgggtggggccattcatcgggggagccctggctgtactcatctacgacttcatcctggccccacgcagcagtgacctcacagaccgcgtgaaggtgtggaccagcggccaggtggaggagtatgacctggatgccgacgacatcaactccaggagcttcctggggaccaagatttaccaattcacccactcccttgaagttgtggaggaggtgaaagaaagggacccacctgctagtcgcccctcagagcatgatgggaggtgtgccagaaagtcccccctcgccccaaagttgctcaccgactcacctgcgcaagtgcctgggattctaccgtaa

SEQ ID NO: 2292 - DNA, 2752 bp, Homo sapiens
  source 1..2752: mol_type = unassigned DNA
ctctcagagggaattgagcacccggcagcggtctcaggccaagccccctgccagcatggccagcgagttcaagaagaagctcttctggagggcagtggtggccgagttcctggccacgaccctctttgtcttcatcagcatcggttctgccctgggcttcaaatacccggtggggaacaaccagacggcggtccaggacaacgtgaaggtgtcgctggccttcgggctgagcatcgccacgctggcgcagagtgtgggccacatcagcggcgcccacctcaacccggctgtcacactggggctgctgctcagctgccagatcagcatcttccgtgccctcatgtacatcatcgcccagtgcgtgggggccatcgtcgccaccgccatcctctcaggcatcacctcctccctgactgggaactcgcttggccgcaatgacctggctgatggtgtgaactcgggccagggcctgggcatcgagatcatcgggaccctccagctggtgctatgcgtgctggctactaccgaccggaggcgccgtgaccttggtggctcagccccccttgccatcggcctctctgtagcccttggacacctcctggctattgactacactggctgtgggattaaccctgctcggtcctttggctccgcggtgatcacacacaacttcagcaaccactggattttctgggtggggccattcatcgggggagccctggctgtactcatctacgacttcatcctggccccacgcagcagtgacctcacagaccgcgtgaaggtgtggaccagcggccaggtggaggagtatgacctggatgccgacgacatcaactccagggtggagatgaagcccaaatagaaggggtctggcccgggcatccacgtagggggcaggggcaggggcgggcggagggaggggaggggtgaaatccatactgtagacactctgacaagctggccaaagtcacttccccaagatctgccagacctgcatggtcaagcctcttatgggggtgtttctatctctttctttctctttctgtttcctggcctcagagcttcctggggaccaagatttaccaattcacccactcccttgaagttgtggaggaggtgaaagaaagggacccacctgctagtcgcccctcagagcatgatgggaggtgtgccagaaagtcccccctcgccccaaagttgctcaccgactcacctgcgcaagtgcctgggattctaccgtaattgctttgtgcctttgggcacggccctccttcttttcctaacatgcaccttgctcccaatggtgcttggagggggaagagatcccaggaggtgcagtggagggggcaagctttgctccttcagttctgcttgctcccaagcccctgacccgctcggacttactgcctgaccttggaatcgtccctatatcagggcctgagtgacctccttctgcaaagtggcagggaccggcagagctctacaggcctgcagcccctaagtgcaaacacagcatgggtccagaagacgtggtctagaccagggctgctctttccacttgccctgtgttctttccccaggggcatgactgtcgccacacgcctctgtgtacatgtgtgcagagcagacaggctacaaagcagagatcgacagacagccaggtagttggaactttctgttccctatggagaggcttccctacacagggcctgctattgcagaatgaagccatttagagggtgaaggagaaatacccatgttacttctctgagttttagttggtctttccatctatcactgcattatcttgctcattcttcagttctctactccctcttgtcagtgtagacacaggtcaccattatgctggtgtatgtttatcaaagagcacttgagctgtctgaagcccaaagcctgaggacagaaagaccctgatgcaggtcagcccatggaggcagatgcccttgctgggcctgggggttttccaagccctcagctggtcctgaccaggatggagcaagctcttcccttgctcatgagctcctgatcagaggcatttgagcagctgaataacctgcacaggcttgctgtatgacccctggccacagccttccctctgcattgacctggaggggagaggtcagccttgacctaatgaggtagctatagttgcagcccaaggacagttcagagatcaggatcagctttgaaggctggattctatctacataagtcctttcaattccaccagggccagagcagctccaccactgtgcacttagccatgatggcaacagaaaccaagagacacaattacgcaggtatttagaagcagagggacaaccagaaggcccttaactatcaccagtgcatcacatctgcacactctcttctccattccctagcaggaacttctagctcatttaacagataaagaaactgaggcccacggtttcagctagacaatgatttggccaggcctagtaaccaaggccctgtctctggctactccctggaccacgaggctgattcctctcatttccagcttctcagtttctgcctgggcaatggccaggggccaggagtggggagagttgtgatggaggggagaggggtcacacccaccccctgcctggttctaggctgctgcacaccaaggccctgcatctgtctgctctgcatatatgtctctttggagttggaatttcattatatgttaagaaaataaaggaaaatgacttgtaaggtc

SEQ ID NO: 2293 - DNA, 1140 bp, Homo sapiens
  source 1..1140: mol_type = unassigned DNA
gagagggtggagacaatagggaggcaggcacagaggagaaagaggggtggagggagccaggacctcaccgaaggcctcctcagccctggaatttagatgcagtcgggcatggggtggaatgttctggacttttgggtatgaagccgtgtcccctgctgggccttcccacctttttgcatctcttctcctaggagtgctcctgaccatcaccttcatgcctggggctcgccccttgcctctggtcttggtaccccagaataccctggcctggatgcagctggatgcaaaggccccagctcaccccaggcctctccagcttctaggcagagtggggcctgggtctaggcagctggctgatggtgtgaactcgggccagggcctgggcatcgagatcatcgggaccctccagctggtgctatgcgtgctggctactaccgaccggaggcgccgtgaccttggtggctcagccccccttgccatcggcctctctgtagcccttggacacctcctggctattgactacactggctgtgggattaaccctgctcggtcctttggctccgcggtgatcacacacaacttcagcaaccactggattttctgggtggggccattcatcgggggagccctggctgtactcatctacgacttcatcctggccccacgcagcagtgacctcacagaccgcgtgaaggtgtggaccagcggccaggtggaggagtatgacctggatgccgacgacatcaactccagggtggagatgaagcccaaatagaaggggtctggcccgggcatccacgtagggggcaggggcaggggcgggcggagggaggggaggggtgaaatccatactgtagacactctgacaagctggccaaagtcacttccccaagatctgccagacctgcatggtcaagcctcttatgggggtgtttctatctctttctttctctttctgtttcctggcctcagagcttcctggggaccaagatttaccaattcacccactcccttgaagttgtggaggaggtgaaagaaagggacccacctgctagtcgcccctcagagcatgatgggaggtgtgccagaaagtcccccctcgccccaaagttgctcaccgactcacctgcgcaagtgcct

SEQ ID NO: 2294 - DNA, 1009 bp, Homo sapiens
  source 1..1009: mol_type = unassigned DNA
aagcaatgggagacaggccttggaccaaggaaagagacggggtggagaaggagagagagagggtggagacaatagggaggcaggcacagaggagaaagaggggtggagggagccaggacctcaccgaaggcctcctcagccctggaatttagatgcagtcgggcatggggtggaatgttctggacttttggctggctgatggtgtgaactcgggccagggcctgggcatcgagatcatcgggaccctccagctggtgctatgcgtgctggctactaccgaccggaggcgccgtgaccttggtggctcagccccccttgccatcggcctctctgtagcccttggacacctcctggctattgactacactggctgtgggattaaccctgctcggtcctttggctccgcggtgatcacacacaacttcagcaaccactggattttctgggtggggccattcatcgggggagccctggctgtactcatctacgacttcatcctggccccacgcagcagtgacctcacagaccgcgtgaaggtgtggaccagcggccaggtggaggagtatgacctggatgccgacgacatcaactccagggtggagatgaagcccaaatagaaggggtctggcccgggcatccacgtagggggcaggggcaggggcgggcggagggaggggaggggtgaaatccatactgtagacactctgacaagctggccaaagtcacttccccaagatctgccagacctgcatggtcaagcctcttatgggggtgtttctatctctttctttctctttctgtttcctggcctcagagcttcctggggaccaagatttaccaattcacccactcccttgaagttgtggaggaggtgaaagaaagggacccacctgctagtcgcccctcagagcatgatgggaggtgtgccagaaagtcccccctcgccccaaagttgctcaccgactcacctgcgcaagtgcctgggattctaccgtaattgctttgtgcc

SEQ ID NO: 2295 - DNA, 2652 bp, Homo sapiens
  source 1..2652: mol_type = unassigned DNA
atggccagcgagttcaagaagaagctcttctggagggcagtggtggccgagttcctggccacgaccctctttgtcttcatcagcatcggttctgccctgggcttcaaatacccggtggggaacaaccagacggcggtccaggacaacgtgaaggtgtcgctggccttcgggctgagcatcgccacgctggcgcagagtgtgggccacatcagcggcgcccacctcaacccggctgtcacactggggctgctgctcagctgccagatcagcatcgtcgccaccgccatcctctcaggcatcacctcctccctgactgggaactcgcttggccgcaatgacctggctgatggtgtgaactcgggccagggcctgggcatcgagatcatcgggaccctccagctggtgctatgcgtgctggctactaccgaccggaggcgccgtgaccttggtggctcagccccccttgccatcggcctctctgtagcccttggacacctcctggctattgactacactggctgtgggattaaccctgctcggtcctttggctccgcggtgatcacacacaacttcagcaaccactggattttctgggtggggccattcatcgggggagccctggctgtactcatctacgacttcatcctggccccacgcagcagtgacctcacagaccgcgtgaaggtgtggaccagcggccaggtggaggagtatgacctggatgccgacgacatcaactccagggtggagatgaagcccaaatagaaggggtctggcccgggcatccacgtagggggcaggggcaggggcgggcggagggaggggaggggtgaaatccatactgtagacactctgacaagctggccaaagtcacttccccaagatctgccagacctgcatggtcaagcctcttatgggggtgtttctatctctttctttctctttctgtttcctggcctcagagcttcctggggaccaagatttaccaattcacccactcccttgaagttgtggaggaggtgaaagaaagggacccacctgctagtcgcccctcagagcatgatgggaggtgtgccagaaagtcccccctcgccccaaagttgctcaccgactcacctgcgcaagtgcctgggattctaccgtaattgctttgtgcctttgggcacggccctccttcttttcctaacatgcaccttgctcccaatggtgcttggagggggaagagatcccaggaggtgcagtggagggggcaagctttgctccttcagttctgcttgctcccaagcccctgacccgctcggacttactgcctgaccttggaatcgtccctatatcagggcctgagtgacctccttctgcaaagtggcagggaccggcagagctctacaggcctgcagcccctaagtgcaaacacagcatgggtccagaagacgtggtctagaccagggctgctctttccacttgccctgtgttctttccccaggggcatgactgtcgccacacgcctctgtgtacatgtgtgcagagcagacaggctacaaagcagagatcgacagacagccaggtagttggaactttctgttccctatggagaggcttccctacacagggcctgctattgcagaatgaagccatttagagggtgaaggagaaatacccatgttacttctctgagttttagttggtctttccatctatcactgcattatcttgctcattcttcagttctctactccctcttgtcagtgtagacacaggtcaccattatgctggtgtatgtttatcaaagagcacttgagctgtctgaagcccaaagcctgaggacagaaagaccctgatgcaggtcagcccatggaggcagatgcccttgctgggcctgggggttttccaagccctcagctggtcctgaccaggatggagcaagctcttcccttgctcatgagctcctgatcagaggcatttgagcagctgaataacctgcacaggcttgctgtatgacccctggccacagccttccctctgcattgacctggaggggagaggtcagccttgacctaatgaggtagctatagttgcagcccaaggacagttcagagatcaggatcagctttgaaggctggattctatctacataagtcctttcaattccaccagggccagagcagctccaccactgtgcacttagccatgatggcaacagaaaccaagagacacaattacgcaggtatttagaagcagagggacaaccagaaggcccttaactatcaccagtgcatcacatctgcacactctcttctccattccctagcaggaacttctagctcatttaacagataaagaaactgaggcccacggtttcagctagacaatgatttggccaggcctagtaaccaaggccctgtctctggctactccctggaccacgaggctgattcctctcatttccagcttctcagtttctgcctgggcaatggccaggggccaggagtggggagagttgtgatggaggggagaggggtcacacccaccccctgcctggttctaggctgctgcacaccaaggccctgcatctgtctgctctgcatatatgtctctttggagttggaatttcattatatgttaagaaaataaaggaaaatgacttgtaaggtc

SEQ ID NO: 2296 - DNA, 1524 bp, Homo sapiens
  source 1..1524: mol_type = unassigned DNA
cttacgcttcacagtttgacctgctatgaggacctggtgacttttcttcaacaaagcattcatcagtttgaagtgggcccctatggctgcatcctgctcaccctttctgccatcctgtccaggtctacagagctcatccgccaggactttgatgtccccaccagccacctgattggagcacatggctactgtacacaggaacttgtcaatctgctcctgactgggaaagctgtgtccaacgttttcaacgatgtggttgagctggattctggggatgggaacatcacacttctcagaggcattgctgcacgcagtgatattggcttcttatctctctttgagcattacaacatgtgccaggttggctgcttcctgaagaccccgaggttccccatctgggtggtttgcagtgagagccacttcagcatcctctttagcctgcagccggggctcctgcgtgactggaggactgagaggctctttgacttgtactactacgatggcctggccaaccagcaggagcagatccggctgaccattgacaccacccaaaccatctctgaggacacagacaacgaccttgtcccacccctcgagctctgcatcagaaccaacatcggttctgccctgggcttcaaatacccggtggggaacaaccagacggcggtccaggacaacgtgaaggtgtcgctggccttcgggctgagcatcgccacgctggcgcagagtgtgggccacatcagcggcgcccacctcaacccggctgtcacactggggctgctgctcagctgccagatcagcatcttccgtgccctcatgtacatcatcgcccagtgcgtgggggccatcgtcgccaccgccatcctctcaggcatcacctcctccctgactgggaactcgcttggccgcaatgacctggctgatggtgtgaactcgggccagggcctgggcatcgagatcatcgggaccctccagctggtgctatgcgtgctggctactaccgaccggaggcgccgtgaccttggtggctcagccccccttgccatcggcctctctgtagcccttggacacctcctggctattgactacactggctgtgggattaaccctgctcggtcctttggctccgcggtgatcacacacaacttcagcaaccactggattttctgggtggggccattcatcgggggagccctggctgtactcatctacgacttcatcctggccccacgcagcagtgacctcacagaccgcgtgaaggtgtggaccagcggccaggtggaggagtatgacctggatgccgacgacatcaactccagggtggagatgaagcccaaatagaaggggtctggcccgggcatccacgtagggggcaggggcaggggcgggcggagggaggggaggggtgaaatccatactgtagacactctgacaagctggccaaagtcacttccccaagatctgccagacctgcatggtcaagcctcttatgggggtgtttctatctctttctttctctttctg

SEQ ID NO: 2297 - DNA, 2487 bp, Homo sapiens
  source 1..2487: mol_type = unassigned DNA
taaaagtggcccaggagagtgctcctgaccatcaccttcatgcctggggctcgccccttgcctctggtcttggtaccccagaataccctggcctggatgcagctggatgcaaaggccccagctcaccccaggcctctccagcttctaggcagagtggggcctgggtctaggcagctggctgatggtgtgaactcgggccagggcctgggcatcgagatcatcgggaccctccagctggtgctatgcgtgctggctactaccgaccggaggcgccgtgaccttggtggctcagccccccttgccatcggcctctctgtagcccttggacacctcctggctattgactacactggctgtgggattaaccctgctcggtcctttggctccgcggtgatcacacacaacttcagcaaccactggattttctgggtggggccattcatcgggggagccctggctgtactcatctacgacttcatcctggccccacgcagcagtgacctcacagaccgcgtgaaggtgtggaccagcggccaggtggaggagtatgacctggatgccgacgacatcaactccagggtggagatgaagcccaaatagaaggggtctggcccgggcatccacgtagggggcaggggcaggggcgggcggagggaggggaggggtgaaatccatactgtagacactctgacaagctggccaaagtcacttccccaagatctgccagacctgcatggtcaagcctcttatgggggtgtttctatctctttctttctctttctgtttcctggcctcagagcttcctggggaccaagatttaccaattcacccactcccttgaagttgtggaggaggtgaaagaaagggacccacctgctagtcgcccctcagagcatgatgggaggtgtgccagaaagtcccccctcgccccaaagttgctcaccgactcacctgcgcaagtgcctgggattctaccgtaattgctttgtgcctttgggcacggccctccttcttttcctaacatgcaccttgctcccaatggtgcttggagggggaagagatcccaggaggtgcagtggagggggcaagctttgctccttcagttctgcttgctcccaagcccctgacccgctcggacttactgcctgaccttggaatcgtccctatatcagggcctgagtgacctccttctgcaaagtggcagggaccggcagagctctacaggcctgcagcccctaagtgcaaacacagcatgggtccagaagacgtggtctagaccagggctgctctttccacttgccctgtgttctttccccaggggcatgactgtcgccacacgcctctgtgtacatgtgtgcagagcagacaggctacaaagcagagatcgacagacagccaggtagttggaactttctgttccctatggagaggcttccctacacagggcctgctattgcagaatgaagccatttagagggtgaaggagaaatacccatgttacttctctgagttttagttggtctttccatctatcactgcattatcttgctcattcttcagttctctactccctcttgtcagtgtagacacaggtcaccattatgctggtgtatgtttatcaaagagcacttgagctgtctgaagcccaaagcctgaggacagaaagaccctgatgcaggtcagcccatggaggcagatgcccttgctgggcctgggggttttccaagccctcagctggtcctgaccaggatggagcaagctcttcccttgctcatgagctcctgatcagaggcatttgagcagctgaataacctgcacaggcttgctgtatgacccctggccacagccttccctctgcattgacctggaggggagaggtcagccttgacctaatgaggtagctatagttgcagcccaaggacagttcagagatcaggatcagctttgaaggctggattctatctacataagtcctttcaattccaccagggccagagcagctccaccactgtgcacttagccatgatggcaacagaaaccaagagacacaattacgcaggtatttagaagcagagggacaaccagaaggcccttaactatcaccagtgcatcacatctgcacactctcttctccattccctagcaggaacttctagctcatttaacagataaagaaactgaggcccacggtttcagctagacaatgatttggccaggcctagtaaccaaggccctgtctctggctactccctggaccacgaggctgattcctctcatttccagcttctcagtttctgcctgggcaatggccaggggccaggagtggggagagttgtgatggaggggagaggggtcacacccaccccctgcctggttctaggctgctgcacaccaaggccctgcatctgtctgctctgcatatatgtctctttggagttggaatttcattatatgttaagaaaataaaggaaaatgacttgtaaggtc

SEQ ID NO: 2298 - DNA, 2152 bp, Homo sapiens
  source 1..2152: mol_type = unassigned DNA
tccgccgccgcgcccgcctacaaggccctgagggagactgcggagggtgagtgcgcggtgggctcggctgaccgttggccctgcggccggcgccctaggctacctcccttcgcctccccgcgcctccccgcgcctccccgcctccccgcctccccgcctcctcggctctggttccaacaccccagcgccaagccggggaggcggggaggacttcttaagtgtgccgctcgggagcctcccgctcgtcccgccccgaggggcgtgaggaggggaggggctgcggacttcggactcgggcctggagaccgcctcctacccagagccggagcccgcaacccgctcaggcggcgacggagccatgtcgccgctgctggggctccggtccgagctgcaggacacctgcacctcgctgggactgatgctgtcggtggtgctgctcatggggctggcccgcgtagtcgcccggcagcagctgcacaggccggtggcccacgccttcgtcctggagtttctagccaccttccagctctgctgctgcacccacgagctgcaactgctgagcgaacagcaccccgcgcaccccacctggacgctgacgctcgtctacttcttctcgcttgtgcatggcctgactctggtgggcacgtccagcaacccgtgcggcgtgatgatgcagatgatgctggggggcatgtcccccgagacgggtgcggtgaggctattggctcagctggttagtgccctgtgcagcaggtactgcacaagcgccttgtggagcttgggtctgacccagtatcacgtcagcgagaggagcttcgcttgcaagaatcccatccgagtcgacttgctcaaagcggtcatcacagaggccgtctgctcctttctcttccacagcgctctgctgcacttccaggaagtccgaaccaagcttcgtatccacctgctggctgcactcatcacctttttggtctatgcaggaggaagtctaacaggagctgtatttaatccagctttggcactttcgctacatttcatgtgttttgatgaagcattccctcagttttttatagtatactggctggctccttctttaggtatattgttgatgattttgatgttcagctttttccttccatggctgcataacaaccatacaattaataaaaaggaataactgttccaaagactcagactaacatacaggacagtccagctggatgtgataaagattttatcacctcatatggaaaacaccggctgcactggattcatcagtgttaacttcctttgaggaagctgccttatagttttcatcactgggactttaaaaaaaaattactgtgaaaatgaggtattctgtacttctcagttaagacttgttctttgagtgatgtattaaatgctgctagaaaagcctcattacattaaatataaatcaatcttaaatgataattgttaactttgatgaaaaacgagtacaggatgagaagggaagtaaaggtgatagtaagatcaacgaatttgtgtatcaagtgtcacccaaatgaacagaatttttaactataaaagtacaaggcgtcaacttacagaactggggagaggatactttcagccaccacctcacaaaatgataccatcaagcagtgtcatctttcaacaggaaagttgcttttagaagtagaatatatattcactcacatgcaagcgatttcctacattttaagtacattaaaatctaatacctaaaatagtttctctaaatagacaatctcactagctccagccaagtggttattctttaatagaatataataaaacaaaacacccatacaaagtcaggatttaagcttttcacattctcctttgaaccaacagctagctaccttatgaagtagggagggcatgtatttttaatctccattttacagataaggaaactaagcctagatgggtttgctgccctggcttagatcacatagagccaaataccatctctagtcttcaacttcaatccaaaaattcttctcggtcacgattatgactaaagggaaatcaagggttcatagaaacattaaatactttataataacgttaaaacttgtttagaaattaactagtattttttgaggtttaaagaaccttccagttttac

SEQ ID NO: 2299 - DNA, 1084 bp, Homo sapiens
  source 1..1084: mol_type = unassigned DNA
gaaccagccagctcctgctctgtcccctcaggtgtcctgcaggcacagctcctcggggggcccaggccgatggcaggtcttaacgtgtccctctccttcttctttgccaccttcgccctctgtgaggcggccaggcgggcctccaaggccctgctcccagtgggcgcctatgaagtcttcgcccgggaggcgatgaggacgctggtcgagctcgggccctgggctggggactttgggcctgacctgctgctcaccctgctcttcctgctcttcctggcgcacggggtcaccttggacggggcctcggccaaccccactgtgtccctgcaggagttcctcatggccgagcagtctctgcctggcacgctgttgaagctggcggcacaggggctgggcatgcaggccgcctgcaccctgatgcgcctctgctgggcctgggagctcagtgacctgcacctgctgcagagcctcatggcccagagctgcagctcggccctgcgcacatccgtgccccacggggcgcttgtggaggccgcctgcgccttttgtttccatctgaccctcctgcacctgcggcacagtcctcccgcctacagcgggcccgctgtggctctgttggtcaccgtcacggcctacacggccgggcccttcacgtctgccttcttcaaccctgccctggccgcctctgtgacctttgcctgctcgggacacaccttactggagtacgtgcaggtgtactggctgggccctctgacagggatggtcctggctgtgctgctgcaccagggccgccttccccaccttttccagaggaacctgttctacggccagaagaacaagtaccgagcaccccgagggaagccggccccggcctcaggggacacccagacccctgcaaaggggtccagtgtccgggagcctgggcgcagtggtgttgaggggccacattccagctgagtggccttgctctgtgtgagccccgtgcgagggccctgcttgtagctggaccctggaaccttctgtagctaagagggaatcctggccccctccccagaagccatttgtcaataaaccatttctaaga

SEQ ID NO: 2300 - DNA, 3009 bp, Homo sapiens
  source 1..3009: mol_type = unassigned DNA
gaaccagccagctcctgctctgtcccctcaggtgtcctgcaggcacagctcctcggggggcccaggccgatggcaggagttcctcatggccgagcagtctctgcctggcacgctgttgaagctggcggcacaggggctgggcatgcaggccgcctgcaccctgatgcgcctctgctgggcctgggagctcagtgacctgcacctgctgcagagcctcatggcccagagctgcagctcggccctgcgcacatccgtgccccacggggcgcttgtggaggccgcctgcgccttttgtttccatctgaccctcctgcacctgcggcacagtcctcccgcctacagcgggcccgctgtggctctgttggtcaccgtcacggcctacacggccgggcccttcacgtctgccttcttcaaccctgccctggccgcctctgtgacctttgcctgctcgggacacaccttactggagtacgtgcaggtgtactggctgggccctctgacagaggagcagcatggggaggtcatggagccccctcttggacctagatctggggattctggcccctggcttcagaggcccaggtggagcccacaccttctcctgcacctgctctcagacactcggctccacctcactgaggtaccagaagggcagctgggttcctatggaattctggaagcttttttcagcttctgctggctctacactggggaggtctcaggggcaatgcctcagcctccccttggggggaaagacaggagctgggggtctctcaggcacctggccctgcgatggtgacactgacgtcatcgtgatttgtcgccatggttctgatgtggtcacagtctctcaggcatgtgcagggtcctaggaagcatatgaagtgcatcaggaaccccctcctgcccccgttgccgaggcagcactgccctctgctaggaacagctccgtgttggcctctctgtccccacacactgggcctgcagggcttctccgagactcttcagttcaggtatcaaccctgggctgtctcctgggatgtggggggcggatgttctttccttgcctccccacgctcctcctgcggatccttcactccgggtgggtcggcctcttcctcctgatcagctccagagccccctctagttccctggcatggaaacacggcccgggtgagctgtggtggccccggaggcctctccgctcctgcacaggccttgcttcctgcgggtgacgaggtcctggactctctcctgcccaggcttctgggtgctttccttagttcagcaccagtgctctgtgtgggcagcgtctcccccgaggatccgcagctccgggttacccgcaggcgtccatctccggtatggtgctgcccttcactgatcctggttgtatttctgtttcctgctttcctcatcgcctcctgtttcggttgattccttctttttgctggtgcccgtctcacagtagcttcctgagaacggggacctggcaggtacacttcagacctcctgtgtctgaaatagtgtcctggttctgacctgcacttgagtgtcggtgaggcctgggcagggttccgggtgggagctcagtttcgtcctgagtttctcaggccccaaccatggcctgtggtggcttcacgggctacaaggcaaaggacgcaaacgaagaggcttcacgtgacagggttgtatgctcagccagctctggaggctggagtctgagctggcagcactgacagggtcagctctcctcggaggctgctggggaggagcctcctgcctcttccgggctccgggggcctctggcacccccggtgtccccgggcttggagacgcagcactcccatgtctgccggttcccctggccgcctcctctgtgtcattgtctgttctcttcatatagggacaccagtcattgaattggaggttcactctactcaagtatgacgtcaccgtgatttcactgattttatgtcccaggccgtattctaacaagggcacatcctgtgttctgggaagggcgtgtcgctggggaaatactcttcacccggctgcaacctctcactgtagaactgcctctgtggagaagcccaaagggcatttgcggcttctaggagccaagtaggaggaggctgggatccgtgtttcaggcgggactccaggcttgggcgggcctgatactcgagtccacatgccccctctagagaggaacctgtctcctgccagggccagggaggggggcactggctgcttctgtattttggggtttggggccctggagcttcccatgcggaattgccgtccctcctcctaggcgagtcccagggccaccccatcccacagggacccgggcgccagcttctgaaagcatggggcatctgcggaagaactgggttgtttcccagctttcgtccctgcggaggggcgatccggcccctccatgtcagcagtgtttggtcgtccacatgcttgtcagccccacgctgtgctcctgcgtctcttcccgtctcatccatctggatgcttgacacctctgacagcatccctttcctgtcatcttagggcagcttcaggaaaccgaaaaacaggcttgtgtccttccattaacccctttatccacaagttcagtatcagcatgagccctggggagctccaaggctgcagccaggagccccgtagccagggatggtcctggctgtgctgctgcaccagggccgccttccccaccttttccagaggaacctgttctacggccagaagaacaagtaccgagcaccccgagggaagccggccccggcctcaggggacacccagacccctgcaaaggggtccagtgtccgggagcctgggcgcagtggtgttgaggggccacattccagctgagtggccttgctctgtgtgagccccgtgcgagggccctgcttgtagctggaccctggaaccttctgtagctaagagggaatcctggccccctccccagaagccatttgtcaataaaccatttct

SEQ ID NO: 2301 - DNA, 1110 bp, Homo sapiens
  source 1..1110: mol_type = unassigned DNA
gccagctcctgctctgtcccctcaggtgtcctgcaggcacagctcctcggggggcccaggccgatggcaggtcttaacgtgtccctctccttcttctttgccaccttcgccctctgtgaggcggccaggcgggcctccaaggccctgctcccagtgggcgcctatgaagtcttcgcccgggaggcggtgggtgcggtgcagctcgggccctgctgcctggagatgaggacgctggtcgagctcgggccctgggctggggactttgggcctgacctgctgctcaccctgctcttcctgctcttcctggcgcacggggtcaccttggacggggcctcggccaaccccactgtgtccctgcaggagttcctcatggccgagcagtctctgcctggcacgctgttgaagctggcggcacaggggctgggcatgcaggccgcctgcaccctgatgcgcctctgctgggcctgggagctcagtgacctgcacctgctgcagagcctcatggcccagagctgcagctcggccctgcgcacatccgtgccccacggggcgcttgtggaggccgcctgcgccttttgtttccatctgaccctcctgcacctgcggcacagtcctcccgcctacagcgggcccgctgtggctctgttggtcaccgtcacggcctacacggccgggcccttcacgtctgccttcttcaaccctgccctggccgcctctgtgacctttgcctgctcgggacacaccttactggagtacgtgcaggtgtactggctgggccctctgacagggatggtcctggctgtgctgctgcaccagggccgccttccccaccttttccagaggaacctgttctacggccagaagaacaagtaccgagcaccccgagggaagccggccccggcctcaggggacacccagacccctgcaaaggggtccagtgtccgggagcctgggcgcagtggtgttgaggggccacattccagctgagtggccttgctctgtgtgagccccgtgcgagggccctgcttgtagctggaccctggaaccttctgtagctaagagggaatcctggccccctccccagaagccatttgtcaataaaccatttct

SEQ ID NO: 2302 - DNA, 4174 bp, Homo sapiens
  source 1..4174: mol_type = unassigned DNA
gaaagagagcgatagagtgcgagagcgagtgcccggagcatcctggccctgagacagctgggccagccccgcagggctctgcagcatgtgggagctccgctccatagccttctccagggctgtgttcgcagagttcctggccacactcctcttcgtcttctttggcctcggctctgccctcaactggccacaggccctgccctctgtgctacagattgccatggcgtttggcttgggtattggcaccctggtacaggctctgggccacataagcggggcccacatcaaccctgccgtgactgtggcctgcctggtgggctgccacgtctccgttctccgagccgccttctacgtggctgcccagctgctgggggctgtggccggagccgctctgctccatgagatcacgccagcagacatccgcggggacctggctgtcaatgctctcagcaacagcacgacggctggccaggcggtgactgtggagctcttcctgacactgcagctggtgctctgcatcttcgcctccaccgatgagcgccgcggagagaacccgggcacccctgctctctccataggcttctctgtggccctgggccacctccttgggatccattacaccggctgctctatgaatcctgcccgctccctggctccagctgtcgtcactggcaaatttgatgaccactgggtcttctggatcggacccctggtgggcgccatcctgggctccctcctctacaactacgtgctgtttccgccagccaagagcctgtcggagcgcctggcagtgctgaagggcctggagccggacaccgattgggaggagcgcgaggtgcgacggcggcagtcggtggagctgcactcgccgcagagcctgccacggggtaccaaggcctgagggccgccagcggcctctacggccccgacggacgcttgtgaggcccgaggcagaagggcccaccccgtccctcctctcccgcaggtctgaagttggccccccagcgcagagtagctgcttcctggacgtgcgcgcccaggccagtgctgtgagcaggcggggaggaggctgccggagggagccctgagcctggcaggtcccctgccctgaggctgtgagcagctagtggtggcttctccagcctttttcagggaactgggaacttaggggactgagctggggagggaggcaggtgggtggtaagagggaaactctggagagcctgcacccaggtactgagtggggagtgtacagacccctgccttgggggttccgggaatgatgcaactggttttactagtgtgcaagtgtgttcatccccaagttctcttttgtcctcacatgcagagttgtgcatgcccctgagtgtgaacaggtttgcctacgttggtgcaagtgtgcatggctggggacttctcacttccccttgcaccccttcctccccaacctgcaataaatccgcttctcctgcagtggatgagtgtgggtgccagtcctcctcaggagaaggggaagggaaggaggccactttgagagggctgaagggagggccttgatttccagccgcaatctggctcctcctggaaaatttcccccacctgcagcgctgggccccaaggcttgccaagactcattgctggaggtagagaggtgtcaaccagagaacagctcccctagacatggcctctggaaaaaggaaatctttggtggccaaagatttcctttctgtggtgagggagaacctctccaaagaggaagcaggcatatgagtgcgcacgccttcacgtgtgtgtatgctgtgtgtgcccgggacccccgtctccaggggtgccccagacccagagattagcctcccacttcggcgcagaaaacaaaagccctttgtgggacccgggcctttgtcttgggtgaggggagatttgcacctagacacttcttgaaaggagacactcagtttcacaagtgagccctcttgcccagcacacacctatggctggctgggcaaggcgctcaggcatgcaaccatgggcaccaggcaatacccatccatcacccatctcactctccccagtcctcaggcagcagcttttccaccccaggaatctctgttccttctctgtctgcctctccacagcccgtgatcccctgcttctggctcctaccactggacagtcattgtggatagagcagcctgctgctctcaggaccagagaagggaaatgacttctccaggcagaggcagatctgagtctagaacccaggcttctaaatttctaggccagtactactgctctcaaaagagattaactgggattaagtgagatgacgcatgtaaagatgctgtgtaaactgtaattcttaataccattatcacgcattactagaatcatttcattatttctgcttcctgggggaaggatgcagaaggagtctgatgctcaacatcccttacctcctttcgttgatggccaaagcaaaggagagtcctgggagcccacaagatccaggcagaaggagatgggtttggggctggccccatcctggcccagcctcttaacctcttcttaccctgaatgtgtgccctatcttttctcccacctccttcctcctaccacccagccctatccattctctccttccctctccagcctgctgtataagtaacatgtgggtcataccttgaacccccctccgcccccatgctctctgtggcctccatgccttcaagacttctgtctgtatctatctcacactgcaccaagcacccactgtgcaccaggcactaagtctctagcctctttctcccttctgctcccatccaagaaagacagtgtataaggaacatctctgtaattgtgtcccctctcatctatgctctttcctgtcttccttgaccaaagctctctttgaggtccaaaaaaggctgccctgggccatatgtgctatggagaggactctcccaaacccccaatagctagtgacagccacttggcctcactaccagaagaagggtggagtcagaaaccaaagtgacctccagagctgtcctcctggcacctgagtgtccttgctctagaggttcaaaggcagcaaggcagtgagctatgagcccagcatggatgtgtctcaggcacctcatccccaccccacctcaccccaacaaactcctctagaagaagccaagaatttctctctatgtctgtttcactttttggattgcatctccccaaaaactaaatgtgaaatccctaccatttctagcctctattgcccagattggagtcagaggtcaaaaaaggattccaagtgatggaactccaggggtggagggaaattggcagttcctggcatctcttgtgtaccagctgctgtgctgggtgccttgcatgcacggacttatctgatcttcctcaaacttcagataggttagggaaggacaaaggcccccagccatgaagggttttgctatttccaaagcttccccttatcgtcccctgtgattatctcccaaccccgtgacaaaggtagagcaaatattgttcttcccattttacagattcagaaaccaaggctaagggactggtctaaagtctcacaggtagtatatggtggagccaacacttgaactcagacctttttacacaaaatcccatgatttttccactgagacaaatcctaggctcctgggaggccctggcagaagccagaacacatggctgggcctttccagcccaacccactgtcttgcagtggacggagagccttggcgagggcagcagggtagagaggacaaagaatgtggggctggtttctgccctttaagagcacccggtcagtcagagaacagagatcacacacaccaaaccagacagaggcagggcagcatggagacaggtagacagacctccaggtccctaagctggggacagagaaggttctgagctgtcccatactcccactttgtgccaaatgactttgcacctgcaaatggtgcttcaatgtcgttttgtatctttaagctgtgatgttgtatatatacaatgcctcccagctagactgtaagccctttggggacaagggctgcttccagttcttggatggcgttctcctatctaccttccttcaactgctctgcatataataagcactcaataaatgctcatttgccaataa

SEQ ID NO: 2303 - DNA, 1849 bp, Homo sapiens
  source 1..1849: mol_type = unassigned DNA
ccagcgctggaggccgctgctcgctgcgccaccgcctcccgccacccctgcccgcccgacagcgccgccgcctgccccgccatgggtcgacagaaggagctggtgtcccgctgcggggagatgctccacatccgctaccggctgctccgacaggcgctggccgagtgcctggggaccctcatcctggtgatgtttggctgtggctccgtggcccaggttgtgctcagccggggcacccacggtggtttcctcaccatcaacctggcctttggctttgctgtcactctgggcatcctcatcgctggccaggtctctggggcccacctgaaccctgccgtgacctttgccatgtgcttcctggctcgtgagccctggatcaagctgcccatctacaccctggcacagacgctgggagccttcttgggtgctggaatagtttttgggctgtattatgatgcaatctggcacttcgccgacaaccagctttttgtttcgggccccaatggcacagccggcatctttgctacctacccctctggacacttggatatgatcaatggcttctttgaccagttcataggcacagcctcccttatcgtgtgtgtgctggccattgttgacccctacaacaaccccgtcccccgaggcctggaggccttcaccgtgggcctggtggtcctggtcattggcacctccatgggcttcaactccggctatgccgtcaaccctgcccgggactttggcccccgcctttttacagcccttgcgggctggggctctgcagtcttcacgaccggccagcattggtggtgggtgcccatcgtgtccccactcctgggctccattgcgggtgtcttcgtgtaccagctgatgatcggctgccacctggagcagcccccaccctccaacgaggaagagaatgtgaagctggcccatgtgaagcacaaggagcagatctgagtgggcaggggccatctccccactccgctgccctggccttgagcatccactgactgtccaagggccactcccaagaagcccccttcacgatccaccctttcaggctaaggagctccctatctaccctcaccccacgagacagccccttcaggatttccactggaccttgcccaaatagcaccttaggccactgcccctaagctggggtggaaccggaatttgggtcaatacatccttttgtctcccaagggaagagaatgggcagcaggtatgtgtgtgtgtgcatgtgtgtgcatgtgtgtgcatgtgtgtgcaggggtgtgtgtgtgtggggggggttcccagatattcagggcaagggaccagtcggaagggattctggctattgggggagcccagagacaggggaaggcagcctgtccatctgtgcataaggagaggaaagttccagggtgtgtatgtttcaggggcttcacatggaggagctgcagatagatatgtgtttctgtgtatgtgtatgtctgcctttttttctaagtgggggcttctacaggcttttgggaagtagggtggatgtgggtagggctgggaggagggggccacagcttaggtttggagctctggatgtacatacataagtaggagcagtgggacgtgtttctgtcataatgcaggcatgaagggtggagtgaagtcaggtcataagtttcatgtttgcttttgttttgttttgtttttaatgtatgtagcagatgttacagtcttagggatccgggatgggagaccccactttagaaagggtcgtcactcctttaatcctctactcaacaatgtactcttttacttttatattaaaaaaaataaaataaatatgtgcctaaaacctcca

SEQ ID NO: 2304 - DNA, 902 bp, Homo sapiens
  source 1..902: mol_type = unassigned DNA
ctcgctgcgccaccgcctcccgccacccctgcccgcccgacagcgccgccgcctgccccgccatgggtcgacagaaggagctggtgtcccgctgcggggagatgctccacatccgctaccggctgctccgacaggcgctggccgagtgcctggggaccctcatcctggtgatgtttggctgtggctccgtggcccaggttgtgctcagccggggcacccacggtggtttcctcaccatcaacctggcctttggctttgctgtcactctgggcatcctcatcgctggccaggtctctggggcccacctgaaccctgccgtgacctttgccatgtgcttcctggctcgtgagccctggatcaagctgcccatctacaccctggcacagacgctgggagccttcttgggtgctggaatagtttttgggctgtattatgatgcaatctggcacttcgccgacaaccagctttttgtttcgggccccaatggcacagccggcatctttgctacctacccctctggacacttggatatgatcaatggcttctttgaccaggaccggccagcattggtggtgggtgcccatcgtgtccccactcctgggctccattgcgggtgtcttcgtgtaccagctgatgatcggctgccacctggagcagcccccaccctccaacgaggaagagaatgtgaagctggcccatgtgaagcacaaggagcagatctgagtgggcaggggtccccactccgctgccctggccttgagcatccactgactgtccaagggccactcccaagaagcccccttcacgatccaccctttcaggctaaggagctccctatctaccctcaccccacgacagccccttcaggatttccactggaccttgcccaaatagcaccttag

SEQ ID NO: 2305 - DNA, 5241 bp, Homo sapiens
  source 1..5241: mol_type = unassigned DNA
ccaaaaacccaatcagacaagtggccgtaatctgactcccagcacacagggagctgcggggcaggcaatgagagctgcactctggctggggaaggcatgagtgacagacccacagcaaggcggtggggtaagtgtggacctttgtgtaccagagagaacatcatggtggctttcaaaggggtctggactcaagctttctggaaagcagtcacagcggaatttctggccatgcttatttttgttctcctcagcctgggatccaccatcaactggggtggaacagaaaagcctttaccggtcgacatggttctcatctccctttgctttggactcagcattgcaaccatggtgcagtgctttggccatatcagcggtggccacatcaaccctgcagtgactgtggccatggtgtgcaccaggaagatcagcatcgccaagtctgtcttctacatcgcagcccagtgcctgggggccatcattggagcaggaatcctctatctggtcacacctcccagtgtggtgggaggcctgggagtcaccatggttcatggaaatcttaccgctggtcatggtctcctggttgagttgataatcacatttcaattggtgtttactatctttgccagctgtgattccaaacggactgatgtcactggctcaatagctttagcaattggattttctgttgcaattggacatttatttgcaatcaattatactggtgccagcatgaatcccgcccgatcctttggacctgcagttatcatgggaaattgggaaaaccattggatatattgggttgggcccatcataggagctgtcctcgctggtggcctttatgagtatgtcttctgtccagatgttgaattcaaacgtcgttttaaagaagccttcagcaaagctgcccagcaaacaaaaggaagctacatggaggtggaggacaacaggagtcaggtagagacggatgacctgattctaaaacctggagtggtgcatgtgattgacgttgaccggggagaggagaagaaggggaaagaccaatctggagaggtattgtcttcagtatgactagaagatcgcactgaaagcagacaagactccttagaactgtcctcagatttccttccacccattaaggaaacagatttgttataaattagaaatgtgcaggtttgttgtttcatgtcatattactcagtctaaacaataaatatttcataatttacaaaggaggaacggaagaaacctattgtgaattccaaatctaaaaaaagaaatatttttaaaatgttcttaagcaaatatatacctattttatctagttacctttcattaacaaccaattttaaccgtgtgtcaagatttggttaagtcttgcctgacagaactcaaagacacgtctatcagcttattccttctctactggaatattggtatagtcaattcttatttgaatatttattctattaaactgagtttaacaatggcaaaatacagtatgtcacagtcatgcacattcaagagagaaaatataacaagttcttttatgagcaatcccttatgcatagactaccttggcaaaagagcattagcaagtgtcactgctcatcagttacttccttccatttatatcacaaatacccaagtttcaattctaacttcatttcatggtatttcttcctcctcaatgcccaaggtaatgtgggactaaagcccagaaatttgaaaagaatattcagaaatccttcccaaatcataagggcacctattgagattcaagacaagcagactcgtaaaatcttgtagaggcagaggcaaagttatcatcatacaaaaatcacaaacaaaaaggagatctgtattcgggtatcaaacggttgatctgttttcagtgcacaccctcaaatgcaccacaccagttttacgatctaagcttttaacccctttaccactttgcttatttttaaaaaatttattggcaaaactggggattttgtttgtaactttggttatctatatttaaacattagctgagacatatttttgataacaagaacttagctagttgagtcctggctttttgttgattattaagctgtgttcactctagaaggtgtaaaggccctgtcccaatctctgctctctcacttctcgtgacatttgttgataatctttactgcaagtgtaatgatatttgagtgaattaaaatgcatgacagacaaggtacaacatggttgcagaataaaagggtgaggacatcagatcactctgtattcaaagcttactagacgaacaatctttcatttctggatatattgtagctaacccaacacatttttaaactatttttgttactgactcacttacttgtcaaaataattggtttttctgtcctgctttgccttttgtcactagaatgttctccagaaaccccagtttctgtcatcttaactgtctagtctagccgttaacttagacaaagaagtgcaaatgtcaatttcactaaacaaaagctattagaagtaaagcagaaacctatcactgcaaggagtgacttgtaaataactgatgatcaagggctgtcttctctcaagcatggttccaactctgtgtcactttttagcgttaatggcagttgtgtgtctgtggcagtgagataatggaccactattaaacctgattctcttcggtgctaggaaagagtgatgtgtgagattcccagagagtcgtcacaccagtgttatgcctgggagtgccactggcataccgcaggtgcctaaatcccaggcccctttctcagggggcgtggccacaccacacactgcgccagtgacacatagttacttcctggctgggacggcacctatagaaactagggtacaaatctcccaaagatggtttgcaccgtcatttcaaatgtttgcacaatataccacttagaggcttaaaatcagggtggttcagttcaaaaggtaatatcaaccgtcagcaaacatgtcagtttaaaaataagttcggttaacaaggaagtgttaagcagattttttgaatacacttacaatatactggcttataatcatttttattctgccatatggtttatttcatatacactcacttttacactcacttccaattatagcattcaataagttacggttaaagaaaagtgaatggtgtttttgtaatttgttttctagtagctagcagagagcctggcacatagtatgtattcaaaacaagtgtgttaattaataaaaatatataaatctcatttgagatttaagaatataaataattttcttttaatctttattttgctcaatatttaataggaagtatgatttcaaggactactaaaggaaggcaatatacatgtgaaaaccataaaatacattttttgcattctactatttttaggggcatgaaatgaatgaaagctttagcacttttttgcccctacatatgagacaacatattttgtatttcactcaaggctctgccagtaaaaagtaatgaaattgtacctttctaatgacatctatgcagcaggggtctatcgccttgtggatggcaccaaattatccaagtgtattaggagactggggcttttttctttaatcccttcttattaatgaagtgcatagtgctgctcccaggagaccactgctgacagatacacagagaagagatcagagaggaaaaactgggaagacataaatgaattatacccagccatgaaacaatgccaactgtctcttccctaaggaagagtacaagtaccctaaaattgaaaggtggtccctacactgaaaacgcacatagtttgtcaaaagtgtacaaaagggaaagagtcttattttaagctttcaggctttcttaaaaacttggggaccagaatttcaatgtatgtttccattgttgaagataacattttcttcaaagagccttaaccttttgtactggaaggaaatattttctggacttaagtagttgcctaaatttaagattcctacactttatttctgccattgatgcttttcctaaacccttatactatctttttattatctgagccttttcctaatgcagctcataggtgctagctagagctgctgctcagtattgaagactttacaaggagattagaaatctttggaaaacatatgtgatgaaattgagctatatgatttatcagagatctgattccaaagagcacagaatactgttctcagaccatgaaaccagacaacacatgtattggtttaaactcgataatgacaggaaaattccaaactagagcagtaaattcaaatggtaagatgaatcctagaaggcctctgattgcagcatgttgacaccaacctcacgttacgaacaattcacagagaatttgcctttgtggcaactgaagatggaagtctggggggcacagacaaccttatcaaacaatataaaagccaatataaattctcataagcactatagaatttgcaaattcagaacattttatacctaaaagtaattctgtctttcctaaagtgtttttaacatgaaaattagtaggaagatgtggttactatttggaaagtgtaatgtaacaaaactctcttttgttaccacaaattttgtgagtttagtactctacagattgccccataagagcagtagcttttgaaactcataattctctgaaataaatgaaagacatttaattcaaggatcaaaaattgtggccatctttgcaaatgactacctatagcctgtgaaaatacatttcaaaaaatgttatgtgcaatgaacactaaatttaagagcagttacagtgtgactcactcatgtttaaaaaaaatcgaagagctaaaaaatacgtctaatttatgtaacccattggaatgtatttctaggttctcttcaggattaattaaataaacatgcaatttatgaaaacatataaacaattatttatcacttttatgacccaaatcacaataaaattgtcatttaggataaactggggagaatagactgaacatatggttatattcacagttatttattaacttaaatgttattccaacattagagctaatgttaaaaagatttaaactgtaacgtctaatatttggaataatatattaaagtattagcactgtggttgattttcttgaattatgttgcatcttgtactactaagcttgtgaaaataaacatttggatgttttaaaaggtaaacatta

SEQ ID NO: 2306 - DNA, 702 bp, Homo sapiens
  source 1..702: mol_type = unassigned DNA
gactcccagcacacagggagctgcggggcaggcaatgagagctgcactctggctggggaaggcatgagtgacagacccacagcaaggcggtggggtaagtgtggacctttgtgtaccagagagaacatcatggtggctttcaaaggggtctggactcaagctttctggaaagcagtcacagcggaatttctggccatgcttatttttgttctcctcagcctgggatccaccatcaactggggtggaacagaaaagcctttaccggtcgacatggttctcatctccctttgctttggactcagcattgcaaccatggtgcagtgctttggccatatcagcggtggccacatcaaccctgcagtgactgtggccatggtgtgcaccaggaagatcagcatcgccaagtctgtcttctacatcgcagcccagtgcgttgggcccatcataggagctgtcctcgctggtggcctttatgagtatgtcttctgtccagatgttgaattcaaacgtcgttttaaagaagccttcagcaaagctgcccagcaaacaaaaggaagctacatggaggtggaggacaacaggagtcaggtagagacggatgacctgattctaaaacctggagtggtgcatgtgattgacgttgaccggggagaggagaagaaggggaaagaccaatctggagaggtattgtcttcagtatga

SEQ ID NO: 2307 - DNA, 991 bp, Homo sapiens
  source 1..991: mol_type = unassigned DNA
agagctgcactctggctggggaaggcatgagtgacagacccacagcaaggcggtggggtaagtgtggacctttgtgtaccagagagaacatcatggtggctttcaaaggggtctggactcaagctttctggaaagcagtcacagcggaatttctggccatgcttatttttgttctcctcagcctgggatccaccatcaactggggtggaacagaaaagcctttaccggtcgacatggttctcatctccctttgctttggactcagcattgcaaccatggtgtgcaccaggaagatcagcatcgccaagtctgtcttctacatcgcagcccagtgcctgggggccatcattggagcaggaatcctctatctggtcacacctcccagtgtggtgggaggcctgggagtcaccatggttcatggaaatcttaccgctggtcatggtctcctggttgagttgataatcacatttcaattggtgtttactatctttgccagctgtgattccaaacggactgatgtcactggctcaatagctttagcaattggattttctgttgcaattggacatttatttgcaatcaattatactggtgccagcatgaatcccgcccgatcctttggacctgcagttatcatgggaaattgggaaaaccattggatatattgggttgggcccatcataggagctgtcctcgctggtggcctttatgagtatgtcttctgtccagatgttgaattcaaacgtcgttttaaagaagccttcagcaaagctgcccagcaaacaaaaggaagctacatggaggtggaggacaacaggagtcaggtagagacggatgacctgattctaaaacctggagtggtgcatgtgattgacgttgaccggggagaggagaagaaggggaaagaccaatctggagaggtattgtcttcagtatgactagaagatcgcactgaaagcagacaagactccttagaactgtcctcagattt

SEQ ID NO: 2308 - DNA, 1398 bp, Homo sapiens
  source 1..1398: mol_type = unassigned DNA
tcatcgtaggaggttccagctcagtgcccagagacagcccccacatcccaccccatcaggtcagctcaggctggagcaggcatatgagcaacacccctcattccacccccatacacatgcataagcccatccgcctgcgccctgccagtctgaccagcacagtcctggggacaggagcgtggtggaggagctgcaggtgggggccagagaagcctccacagagagcaaaagccagggtcagccagagacaggacaccagaagagacaggagatcagagaccagaggaacagagaagaggccccagagcaaggcaaggaacggccaaggcaccaggacatggatgcagtggagccagggggacgtggctgggccagcatgttggcgtgcaggctttggaaagccatcagcagggcgctgtttgcagagttcctggccacggggctgtatgtgttctttggcgtgggctcagtcatgcgctggcccacagcacttccctccgtgctacagattgccatcaccttcaacctggtcaccgccatggctgtgcaggtcacctggaaggccagcggggcccacgccaaccccgccgtgacgctggccttcctcgtaggctcccacatctctctgccccgtgctgtggcctatgtggctgcccagctggtgggggccacggtgggggctgctctgctttatggggtcatgccgggagacatccgagagacccttgggatcaacgtggtccggaacagtgtctcaactggccaggcggtggcagtggagctgcttctgaccctgcagctggtgctctgtgtcttcgcttccaccgacagccgtcagacatcaggctccccggccaccatgattgggatctctgtggcactgggccacctcattgggatccacttcactggctgctccatgaatccagcccgctccttcggccctgccatcatcattgggaagttcacagtccactgggtcttctgggtggggcccctgatgggagccctcctggcctcactgatctacaacttcgtcctgttccccgacaccaagaccctggcgcagcggctggctatcctcacaggcaccgtagaggtggggacaggggcaggggcaggggcggagcccctgaagaaggaatcccagccgggttcgggagccgtggagatggagagtgtgtgaaacagcctacgcctggccgcgcccttgggcttcctgccttgcaggacctgcctggaggttctccctgggggtggcgggagggggaggcttgaccttttgtcctgaccaggtgggctggaggggacaagccctatccctggcattacgtttctaggtagaatctgggagtgaatttgtcccattccctctctgtagggcttccccacctctcg

SEQ ID NO: 2309 - DNA, 1256 bp, Homo sapiens
  source 1..1256: mol_type = unassigned DNA
ggctctggactggggacacagggatagctgagccccagctgggggtggaagctgagccagggacagtcacggaggaacaagatcaagatgcgctgtaactgagaagcccccaaggcggaggctgagaatcagagacatttcagcagacatctacaaatctgaaagacaaaacatggttcaagcatccgggcacaggcggtccacccgtggctccaaaatggtctcctggtccgtgatagcaaagatccaggaaatactgcagaggaagatggtgcgagagttcctggccgagttcatgagcacatatgtcatgatggtattcggccttggttccgtggcccatatggttctaaataaaaaatatgggagctaccttggtgtcaacttgggttttggcttcggagtcaccatgggagtgcacgtggcaggccgcatctctggagcccacatgaacgcagctgtgacctttgctaactgtgcgctgggccgcgtgccctggaggaagtttccggtctatgtgctggggcagttcctgggctccttcctggcggctgccaccatctacagtctcttctacacggccattctccacttttcgggtggacagctgatggtgaccggtcccgtcgctacagctggcatttttgccacctaccttcctgatcacatgacattgtggcggggcttcctgaatgaggcgtggctgaccgggatgctccagctgtgtctcttcgccatcacggaccaggagaacaacccagcactgccaggaacagaggcgctggtgataggcatcctcgtggtcatcatcggggtgtcccttggcatgaacacaggatatgccatcaacccgtcccgggacctgcccccccgcatcttcaccttcattgctggttggggcaaacaggtcttcagcaatggggagaactggtggtgggtgccagtggtggcaccacttctgggtgcctatctaggtggcatcatctacctggtcttcattggctccaccatcccacgggagcccctgaaattggaggattctgtggcgtatgaagaccacgggataaccgtattgcccaagatgggatctcatgaacccacgatctctcccctcacccccgtctctgtgagccctgccaacagatcttcagtccaccctgccccacccttacatgaatccatggccctagagcacttctaagcagagattatttgtgatcccatccattccccaataaagcaaggcttgtccgaca

SEQ ID NO: 2310 - DNA, 1067 bp, Homo sapiens
  source 1..1067: mol_type = unassigned DNA
ggggacacagggatagctgagccccagctgggggtggaagctgagccagggacagtcacggaggaacaagatcaagatgcgctgtaactgagaagcccccaaggcggaggctgagaatcagagacatttcagcagacatctacaaatctgaaagacaaaacatggttcaagcatccgggcacaggcggtattcggccttggttccgtggcccatatggttctaaataaaaaatatgggagctaccttggtgtcaacttgggttttggcttcggagtcaccatgggagtgcacgtggcaggccgcatctctggagcccacatgaacgcagctgtgacctttgctaactgtgcgctgggccgcgtgccctggaggaagtttccggtctatgtgctggggcagttcctgggctccttcctggcggctgccaccatctacagtctcttctacacggccattctccacttttcgggtggacagctgatggtgaccggtcccgtcgctacagctggcatttttgccacctaccttcctgatcacatgacattgtggcggggcttcctgaatgaggcgtggctgaccgggatgctccagctgtgtctcttcgccatcacggaccaggagaacaacccagcactgccaggaacagaggcgctggtgataggcatcctcgtggtcatcatcggggtgtcccttggcatgaacacaggatatgccatcaacccgtcccgggacctgcccccccgcatcttcaccttcattgctggttggggcaaacaggtcttcaggtggcatcatctacctggtcttcattggctccaccatcccacgggagcccctgaaattggaggattctgtggcgtatgaagaccacgggataaccgtattgcccaagatgggatctcatgaacccacgatctctcccctcacccccgtctctgtgagccctgccaacagatcttcagtccaccctgccccacccttacatgaatccatggccctagagcacttctaagcagagattatttgtgatcccatccattccccaataaagcaaggcttgtccgac

SEQ ID NO: 2311 - DNA, 677 bp, Homo sapiens
  source 1..677: mol_type = unassigned DNA
gttgcccttggagctggcctcctggctgtgggggagagttggatgggctgggccacattcactgatcagggagaggaggggctggagccatccgggccctggaaaaccagccatacacgagcccacatgaacgcagctgtgacctttgctaactgtgcgctgggccgcgtgccctggaggaagtttccggtctatgtgctggggcagttcctgggctccttcctggcggctgccaccatctacagtctcttctacacggccattctccacttttcgggtggacagctgatggtgaccggtcccgtcgctacagctggcatttttgccacctaccttcctgatcacatgacattgtggcggggcttcctgaatgaggcgtggctgaccgggatgctccagctgtgtctcttcgccatcacggaccaggagaacaacccagcactgccaggaacagaggcgctggtgataggcatcctcgtggtcatcatcggggtgtcccttggcatgaacacaggatatgccatcaacccgtcccgggacctgcccccccgcatcttcaccttcattgctggttggggcaaacaggtcttcaggtactgcccctgcccaggcccattcctttgagtttttctgtgggtcccctgtgtgttgaggggtggggggtgatgtgaggggca

SEQ ID NO: 2312 - DNA, 1062 bp, Homo sapiens
  source 1..1062: mol_type = unassigned DNA
gagtctcctttctgtccatgggctcgggccactgtcttaggtccacccgtggctccaaaatggtctcctggtccgtgatagcaaagatccaggaaatactgcagaggaagatggtgcgagagttcctggccgagttcatgagcacatatgtcatgatggtattcggccttggttccgtggcccatatggttctaaataaaaaatatgggagctaccttggtgtcaacttgggttttggcttcggagtcaccatgggagtgcacgtggcaggccgcatctctggagcccacatgaacgcagctgtgacctttgctaactgtgcgctgggccgcgtgccctggaggaagtttccggtctatgtgctggggcagttcctgggctccttcctggcggctgccaccatctacagtctcttctacacggccattctccacttttcgggtggacagctgatggtgaccggtcccgtcgctacagctggcatttttgccacctaccttcctgatcacatgacattgtggcggggcttcctgaatgaggcgtggctgaccgggatgctccagctgtgtctcttcgccatcacggaccaggagaacaacccagcactgccaggaacagaggcgctggtgataggcatcctcgtggtcatcatcggggtgtcccttggcatgaacacaggatatgccatcaacccgtcccgggacctgcccccccgcatcttcaccttcattgctggttggggcaaacaggtcttcaggtactgcccctgcccaggcccattcctttgagtttttctgtgggtcccctgtgtgttgaggggtggggggtgatgtgaggggcagcacaggagggtcctgctgagcccccaggtagcctggggagcaggagtgagtcccaacatttccccaggccagtacagatacagatcctgcacctgcactgagtgtcaacgctgtccctgaattgggctgaggctgaccagggccctgggttgggggtgtttcctggggtagcctggggatgactcctctgctcaacctgtcttggcccgaggtggatgag

SEQ ID NO: 2313 - DNA, 1108 bp, Homo sapiens
  source 1..1108: mol_type = unassigned DNA
aggcagacttgagtctcctttctgtccatgggctcgggccactgtcttaggtccacccgtggctccaaaatggtctcctggtccgtgatagcaaagatccaggaaatactgcagaggaagatggtgcgagagttcctggccgagttcatgagcacatatgtcatgatggtattcggccttggttccgtggcccatatggttctaaataaaaaatatgggagctaccttggtgtcaacttgggttttggcttcggagtcaccatgggagtgcacgtggcaggccgcatctctggagcccacatgaacgcagctgtgacctttgctaactgtgcgctgggccgcgtgccctggaggaagtttccggtctatgtgctggggcagttcctgggctccttcctggcggctgccaccatctacagtctcttctacacggccattctccacttttcgggtggacagctgatggtgaccggtcccgtcgctacagctggcatttttgccacctaccttcctgatcacatgacattgtggcggggcttcctgaatgaggcgtggctgaccgggatgctccagctgtgtctcttcgccatcacggaccaggagaacaacccagcactgccaggaacagaggcgctggtgataggcatcctcgtggtcatcatcggggtgtcccttggcatgaacacaggatatgccatcaacccgtcccgggacctgcccccccgcatcttcaccttcattgctggttggggcaaacaggtcttcagcaatggggagaactggtggtgggtgccagtggtggcaccacttctgggtgcctatctaggtggcatcatctacctggtcttcattggctccaccatcccacgggagcccctgaaattggaggattctgtggcgtatgaagaccacgggataaccgtattgcccaagatgggatctcatgaacccacgatctctcccctcacccccgtctctgtgagccctgccaacagatcttcagtccaccctgccccacccttacatgaatccatggccctagagcacttctaagcagagattatttgtgatcccatccattccccaataaagcaaggcttgtccgaca

SEQ ID NO: 2314 - DNA, 675 bp, Homo sapiens
  source 1..675: mol_type = unassigned DNA
gagtctcctttctgtccatgggctcgggccactgtcttaggtccacccgtggctccaaaatggtctcctggtccgtgatagcaaagatccaggaaatactgcagaggaagatggtgcgagagttcctggccgagttcatgagcacatatgtcatgatggagcccacatgaacgcagctgtgacctttgctaactgtgcgctgggccgcgtgccctggaggaagtttccggtctatgtgctggggcagttcctgggctccttcctggcggctgccaccatctacagtctcttctacacggccattctccacttttcgggtggacagctgatggtgaccggtcccgtcgctacagctggcatttttgccacctaccttcctgatcacatgacattgtggcggggcttcctgaatgaggcgtggctgaccgggatgctccagctgtgtctcttcgccatcacggaccaggagaacaacccagcactgccaggaacagaggcgctggtgataggcatcctcgtggtcatcatcggggtgtcccttggcatgaacacaggatatgccatcaacccgtcccgggacctgcccccccgcatcttcaccttcattgctggttggggcaaacaggtcttcagcaatggggagaactggtggtgggtgccagtggtggcaccact

SEQ ID NO: 2315 - DNA, 629 bp, Homo sapiens
  source 1..629: mol_type = unassigned DNA
ctcttctacacggccattctccacttttcgggtggacagctgatggtgaccggtcccgtcgctacagctggcatttttgccacctaccttcctgatcacatgacattgtggcggggcttcctgaatgaggcgtggctgaccgggatgctccagctgtgtctcttcgccatcacggaccaggagaacaacccagcactgccaggaacagaggcgctggtgataggcatcctcgtggtcatcatcggggtgtcccttggcatgaacacaggatatgccatcaacccgtcccgggacctgcccccccgcatcttcaccttcattgctggttggggcaaacaggtcttcaggtggcatcatctacctggtcttcattggctccaccatcccacgggagcccctgaaattggaggattctgtggcgtatgaagaccacgggataaccgtattgcccaagatgggatctcatgaacccacgatctctcccctcacccccgtctctgtgagccctgccaacagatcttcagtccaccctgccccacccttacatgaatccatggccctagagcacttctaagcagagattatttgtgatcccatccattccccaataaagcaaggcttgtccgaca

SEQ ID NO: 2316 - DNA, 1668 bp, Homo sapiens
  source 1..1668: mol_type = unassigned DNA
tggactggggacacagggatagctgagccccagctgggggtggaagctgagccagggacagtcacggaggaacaagatcaagatgcgctgtaactgagaagcccccaaggcggaggctgagaatcagagacatttcagcagacatctacaaatctgaaagacaaaacatggttcaagcatccgggcacaggcggtccacccgtggctccaaaatggtctcctggtccgtgatagcaaagatccaggaaatactgcagaggaagatggtgcgagagttcctggccgagttcatgagcacatatgtcatgatggagcccacatgaacgcagctgtgacctttgctaactgtgcgctgggccgcgtgccctggaggaagtttccggtctatgtgctggggcagttcctgggctccttcctggcggctgccaccatctacagtctcttctacacggccattctccacttttcgggtggacagctgatggtgaccggtcccgtcgctacagctggcatttttgccacctaccttcctgatcacatgacattgtggcggggcttcctgaatgaggcgtggctgaccgggatgctccagctgtgtctcttcgccatcacggaccaggagaacaacccagcactgccaggaacagaggcgctggtgataggcatcctcgtggtcatcatcggggtgtcccttggcatgaacacaggatatgccatcaacccgtcccgggacctgcccccccgcatcttcaccttcattgctggttggggcaaacaggtcttcaggtactgcccctgcccaggcccattcctttgagtttttctgtgggtcccctgtgtgttgaggggtggggggtgatgtgaggggcagcacaggagggtcctgctgagcccccaggtagcctggggagcaggagtgagtcccaacatttccccaggccagtacagatacagatcctgcacctgcactgagtgtcaacgctgtccctgaattgggctgaggctgaccagggccctgggttgggggtgtttcctggggtagcctggggatgactcctctgctcaacctgtcttggcccgaggtggatgagggtgctgtcctgggcatcagccccctcagcaggcctctgcctcttgcctgcagcaatggggagaactggtggtgggtgccagtggtggcaccacttctgggtgcctatctaggtggcatcatctacctggtcttcattggctccaccatcccacgggagcccctgaaattggaggattctgtggcgtatgaagaccacgggataaccgtattgcccaagatgggatctcatgaacccacgatctctcccctcacccccgtctctgtgagccctgccaacagatcttcagtccaccctgccccacccttacatgaatccatggccctagagcacttctaagcagagattatttgtgatcccatccattccccaataaagcaaggcttgtccgacagcagtacccccacttcctgggggcctcctgtggttgggcttccctcctgggttcttacaggagctccagggctatgtcttagcccaaggtgtagaggtgaggcacctcaagtctttcatgccctgggaactggggtgccccagggggagaatggggaagagatgacctgcgccctcagtagga

SEQ ID NO: 2317 - DNA, 1270 bp, Homo sapiens
  source 1..1270: mol_type = unassigned DNA
cttactgacctctcccctggaggagcaggagcagcgctcgaggccgccctgggagagctgagaggcaggctctggactggggacacagggatagctgagccccagctgggggtggaagctgagccagggacagtcacggaggaacaagatcaagatgcgctgtaactgagaagcccccaaggcggaggctgagaatcagagacatttcagcagacatctacaaatctgaaagacaaaacatggttcaagcatccgggcacaggcggtccacccgtggctccaaaatggtctcctggtccgtgatagcaaagatccaggaaatactgcagaggaagatggtgcgagagttcctggccgagttcatgagcacatatgtcatgatggtattcggccttggttccgtggcccatatggttctaaataaaaaatatgggagctaccttggtgtcaacttgggttttggcttcggagtcaccatgggagtgcacgtggcaggccgcatctctggagcccacatgaacgcagctgtgacctttgctaactgtgcgctgggccgcgtgccctggaggaagtttccggtctatgtgctggggcagttcctgggctccttcctggcggctgccaccatctacagtctcttctacacggccattctccacttttcgggtggacagctgatggtgaccggtcccgtcgctacagctggcatttttgccacctaccttcctgatcacatgacattgtggcggggcttcctgaatgaggcgtggctgaccgggatgctccagctgtgtctcttcgccatcacggaccaggagaacaacccagcactgccaggaacagaggcgctggtgataggcatcctcgtggtcatcatcggggtgtcccttggcatgaacacaggatatgccatcaacccgtcccgggacctgcccccccgcatcttcaccttcattgctggttggggcaaacaggtcttcaggtactgcccctgcccaggcccattcctttgagtttttctgtgggtcccctgtgtgttgaggggtggggggtgatgtgaggggcagcacaggagggtcctgctgagcccccaggtagcctggggagcaggagtgagtcccaacatttccccaggccagtacagatacagatcctgcacctgcactgagtgtcaacgctgtccctgaattgggctgaggctgaccagggccctgggttgggggtgtttcctggggtagcctggggatgactcctctgctcaacctgtctt

SEQ ID NO: 2318 - DNA, 989 bp, Homo sapiens
  source 1..989: mol_type = unassigned DNA
gatgttattttgggcagtgcatctggacttggttcaagtggcaccagccaaacccctgccttactgacctctcccctggaggagcaggagcagcgctcgaggccgccctgggagagctgagaggcaggctctggactggggacacagggatagctgagccccagctgggggtggaagctgagccagggacagtcacggaggaacaagatcaagatgcgctgtaactgagaagcccccaaggcggaggctgagaatcagagacatttcagcagacatctacaaatctgaaagacaaaacatggttcaagcatccgggcacaggcggtccacccgtggctccaaaatggtctcctggtccgtgatagcaaagatccaggaaatactgcagaggaagatggtgcgagagttcctggccgagttcatgagcacatatgtcatgatggagcccacatgaacgcagctgtgacctttgctaactgtgcgctgggccgcgtgccctggaggaagtttccggtctatgtgctggggcagttcctgggctccttcctggcggctgccaccatctacagtctcttctacagcgtggctgaccgggatgctccagctgtgtctcttcgccatcacggaccaggagaacaacccagcactgccaggaacagaggcgctggtgataggcatcctcgtggtcatcatcggggtgtcccttggcatgaacacaggatatgccatcaacccgtcccgggacctgcccccccgcatcttcaccttcattgctggttggggcaaacaggtcttcaggtactgcccctgcccaggcccattcctttgagtttttctgtgggtcccctgtgtgttgaggggtggggggtgatgtgaggggcagcacaggagggtcctgctgagcccccaggtagcctggggagcaggagtgagtcccaacatttccccaggccagtacagatacagatcctgcacctgcactgagtgtc

SEQ ID NO: 2319 - DNA, 1359 bp, Homo sapiens
  source 1..1359: mol_type = unassigned DNA
aaaggggcagagcccatagtgtgatcagcaggtcctgtccctaggagataagagtatcttgcacagcaggtgcaggtttcccagcagctcaggcaagagtccgatgtttgtgccatctgatcctgatgtctggagagatagccatgtgtgagcctgaatttggcaatgacaaggccagggagccgagcgtgggtggcaggtggcgagtgtcctggtacgaacggtttgtgcagccatgtctggtcgaactgctgggctctgctctcttcatcttcatcgggtgcctgtcggtcattgagaatgggacggacactgggctgctgcagccggccctggcccacgggctggctttggggctcgtgattgccacgctggggaatatcagtggtggacacttcaaccctgcggtgtccctggcagccatgctgatcggaggcctcaacctggtgatgctcctcccgtactgggtctcacagctgctcggggggatgctcggggctgccttggccaaggcggtgagtcctgaggagaggttctggaatgcatctggggcggcctttgtgacagtccaggagcaggggcaggtggcaggggcgttggtggcagagatcatcctgacgacgctgctggccctggctgtatgcatgggtgccatcaatgagaagacaaagggccctctggccccgttctccatcggctttgccgtcaccgtggatatcctggctgggggccctgtgtctggaggctgcatgaatcccgcccgtgcttttggacctgcggtggtggccaaccactggaacttccactggatctactggctgggcccactcctggctggcctgcttgttggactgctcattaggtgcttcattggagatgggaagacccgcctcatcctgaaggctcggtgaagcagagctcgtgggattcctgctgctccaggtgtcctcagctcacctgtcccagactgaggacaggggagttcctgcatttcctgccagggcagaggcccagaggagcgaccccctgcttccactgcttgggcctgctttctcagatagactgactgctgaggaggctctaggttcttggaattcctttgtgctcatcagagaccccagcctggggaacacgctgcccgcactgcccagagagcagtgcaaacaccacaacacgagcgtgtttcttgagaggaatgtccccgagttggacaaggaggctgtttctgcacatcagctcatttcccgcaccccatttcttgcttgattgctttgttgggggcctggccacttccttgcttctcaagctgacaattctcactttgcaataaatagtccagtgtttccttccacgtgctca

SEQ ID NO: 2320 - DNA, 3034 bp, Homo sapiens
  source 1..3034: mol_type = unassigned DNA
actgtgatttggcaacacaactggcacatctcttttctcatctcttgaaaaaaaccaacagagaaaaaagtaccttgagaataaaggtaatgattaatctgtcaggcacaaaagggattgttttggggatttcgggttctaagtcgcagattcaaacaaatagcagcgaacagggaatgacagttccaccagaagacgattaagccacagcctctaattggaacggcatttgtacagtcagagactcttaccagacatctccaggaatctgtgagccattgtcaaaacgtccattttcatctggctgtgaaagtgaggaccacaacaggtaggtattggtagaaacaggagtcctcagagaagccccaagatgcagcctgagggagcagaaaagggaaaaagcttcaagcagagactggtcttgaagagcagcttagcgaaagaaaccctctctgagttcttgggcacgttcatcttgattgtccttggatgtggctgtgttgcccaagctattctcagtcgaggacgttttggaggggtcatcactatcaatgttggattttcaatggcagttgcaatggccatttatgtggctggcggtgtctctggtggtcacatcaacccagctgtgtctttagcaatgtgtctctttggacggatgaaatggttcaaattgccattttatgtgggagcccagttcttgggagcctttgtgggggctgcaaccgtctttggcatttactatgatggacttatgtcctttgctggtggaaaactgctgatcgtgggagaaaatgcaacagcacacatttttgcaacatacccagctccgtatctatctctggcgaacgcatttgcagatcaagtggtggccaccatgatactcctcataatcgtctttgccatctttgactccagaaacttgggagcccccagaggcctagagcccattgccatcggcctcctgattattgtcattgcttcctccctgggactgaacagtggctgtgccatgaacccagctcgagacctgagtcccagacttttcactgccttggcaggctgggggtttgaagtcttcagagctggaaacaacttctggtggattcctgtagtgggccctttggttggtgctgtcattggaggcctcatctatgttcttgtcattgaaatccaccatccagagcctgactcagtctttaagacagaacaatctgaggacaaaccagagaaatatgaactcagtgtcatcatgtagtggcatgctcagctctggatttgcagtcagtttgggattctcttcagaaagatggcatctaagtgtctgtgttcttgtaagcctgaggtggaatccacccagttttgtctgctagccatatgggacatctaattggaaaagcatctgcataaaagtttggaaacaatgaccacttctctaccattgtcccccacccccaccccccagaataacgctgactgtcccctgaaacagccttctctcctgccctgtttatttcatcctcgatgggaattcttgctaggtaagcactaataactcggcatcttgacgatagtcccatttgggtggtttcagctgcactatctgtatgaaatggtgtcaccaaaacccttttcttcagtatcgacaaagattacattctgagtaccaaccaaaccctaaattgaaagacaaaactatggtttcagtcaacatattcatgaattagggagctaatgggttaagcttccagttcccgctatgctactggatttgtataaatactgatattctccaaacctagtggtgtagggagcaagagaatgcagctggaaggcacaaggggaggacattgtggcattcagaaactgcaggagacaagatgaatttgagaagccaaatggaatttttaatggaaaccatttatcagattaatctcttgctctcctgcattttagaggacaccaattaatttcctggtctttagtatataataacctaaaataccattgtaacctcagtcatgaaaaatacatcactctgtctttttagctcaaatgtattttcctaattgcccacttgagaacagacatttgacaagttatatcaacgactgtgcttgtccattattttacacatgccctagaagccaaaactgaaagccactggatcctggtctagctgaatcttcagagtgggaggtctccaaaaagatattaccttattgggcttaacaattcacaaggcactttcacacccattatctaatttaatcctcataatgactatgtgaggcaaatgccacattgcccatttttcagataaagaaacaaaatcttagggaagataagttgagttgtccaagagcacactgaaagttgaatgttatctaatgcattcctctacctttcagaagatcagtagctggctgacaatctttgccaaatcttccttgctagccagaagtggaattggcagcttctagaatatgtacacctctggacaaaatgttcctcaatcttaagatacaaagaccctcattgtctgggtctattcccacacttactgagtacagatgaaggaaagtggtagcaatttaatcataactttcatttgctgaaaaacattatgagaaggcctcccttcctaagccacctctggtcttgctaagtcttgatcttgcttcctgccagcaccaaacattacattcaggggatttcctctggctcagtcttttccccttgaagttctctaatagatgttacttttgacaaaagatcgcctatgagttacaagcaccaggggatgctctacatcaagggatgcaccttcagtcaaactgtcaaaaagcccagaattcccaaaggcattaggtttcccaactgctttgtgctgatatcagaacagcagaaattaaatgtgaaatgtttctgatgacttatgttctacaatctatggacatacgggatttttttttcttgctttgaagctacctggatatttcctatttgaaataaaattgttcggtcattgttg

SEQ ID NO: 2321 - DNA, 2803 bp, Homo sapiens
  source 1..2803: mol_type = unassigned DNA
ccaccagaagacgattaagccacagcctctaattggaacggcatttgtacagtcagagactcttaccagacatctccaggaatctgtgagccattgtcaaaacgtccattttcatctggctgtgaaagtgaggaccacaacaggtaggtattggtagaaacaggagtcctcagagaagccccaagatgcagcctgagggagcagaaaagggaaaaagcttcaagcagagactggtcttgaagagcagcttagcgaaagaaaccctctctgagttcttgggcacgttcatcttgattgtccttggatgtggctgtgttgcccaagctattctcagtcgaggacgttttggaggggtcatcactatcaatgttggattttcaatggcagttgcaatggccatttatgtggctggcggtgtctctggtggtcacatcaacccagctgtgtctttagcaatgtgtctctttggacggatgaaatggttcaaattgccattttatgtgggagcccagttcttgggagcctttgtgggggctgcaaccgtctttggcatttactatgatggacttatgtcctttgctggtggaaaactgctgatcgtgggagaaaatgcaacagcacacatttttgcaacatacccagctccgtatctatctctggcgaacgcatttgcagatcaagtggtggccaccatgatactcctcataatcgtctttgccatctttgactccagaaacttgggagcccccagaggcctagagcccattgccatcggcctcctgattattgtcattgcttcctccctgggactgaacagtggctgtgccatgaacccagctcgagacctgagtcccagacttttcactgccttggcaggctgggggtttgaagtcttcagagctggaaacaacttctggtggattcctgtagtgggccctttggttggtgctgtcattggaggcctcatctatgttcttgtcattgaaatccaccatccagagcctgactcagtctttaagacagaacaatctgaggacaaaccagagaaatatgaactcagtgtcatcatgtagtggcatgctcagctctggatttgcagtcagtttgggattctcttcagaaagatggcatctaagtgtctgtgttcttgtaagcctgaggtggaatccacccagttttgtctgctagccatatgggacatctaattggaaaagcatctgcataaaagtttggaaacaatgaccacttctctaccattgtcccccacccccaccccccagaataacgctgactgtcccctgaaacagccttctctcctgccctgtttatttcatcctcgatgggaattcttgctaggtaagcactaataactcggcatgaaatggtgtcaccaaaacccttttcttcagtatcgacaaagattacattctgagtaccaaccaaaccctaaattgaaagacaaaactatggtttcagtcaacatattcatgaattagggagctaatgggttaagcttccagttcccgctatgctactggatttgtataaatactgatattctccaaacctagtggtgtagggagcaagagaatgcagctggaaggcacaaggggaggacattgtggcattcagaaactgcaggagacaagatgaatttgagaagccaaatggaatttttaatggaaaccatttatcagattaatctcttgctctcctgcattttagaggacaccaattaatttcctggtctttagtatataataacctaaaataccattgtaacctcagtcatgaaaaatacatcactctgtctttttagctcaaatgtattttcctaattgcccacttgagaacagacatttgacaagttatatcaacgactgtgcttgtccattattttacacatgccctagaagccaaaactgaaagccactggatcctggtctagctgaatcttcagagtgggaggtctccaaaaagatattaccttattgggcttaacaattcacaaggcactttcacacccattatctaatttaatcctcataatgactatgtgaggcaaatgccacattgcccatttttcagataaagaaacaaaatcttagggaagataagttgagttgtccaagagcacactgaaagttgaatgttatctaatgcattcctctacctttcagaagatcagtagctggctgacaatctttgccaaatcttccttgctagccagaagtggaattggcagcttctagaatatgtacacctctggacaaaatgttcctcaatcttaagatacaaagaccctcattgtctgggtctattcccacacttactgagtacagatgaaggaaagtggtagcaatttaatcataactttcatttgctgaaaaacattatgagaaggcctcccttcctaagccacctctggtcttgctaagtcttgatcttgcttcctgccagcaccaaacattacattcaggggatttcctctggctcagtcttttccccttgaagttctctaatagatgttacttttgacaaaagatcgcctatgagttacaagcaccaggggatgctctacatcaagggatgcaccttcagtcaaactgtcaaaaagcccagaattcccaaaggcattaggtttcccaactgctttgtgctgatatcagaacagcagaaattaaatgtgaaatgtttctgatgacttatgttctacaatctatggacatacgggatttttttttcttgctttgaagctacctggatatttcctatttgaaataaaattgttcggtcattgttg

SEQ ID NO: 2322 - DNA, 2358 bp, Homo sapiens
  source 1..2358: mol_type = unassigned DNA
cccgggaatcgcacaggacccggctcccctcgcctaagctgctggggggcgccatgggccgctaccgcatccgcgtggccaccggggcctggctcttctccgggtcgtacaaccgcgtgcagctttggctggtcgggacgcgcggggaggcggagctggagctgcagctgcggcccgcgcggggcgaggaggaggagtttgatcatgacgttgcagaggacttggggctcctgcagttcgtgaggctgcgcaagcaccactggctggtggacgacgcgtggttctgcgaccgcatcacggtgcagggccctggagcctgcgcggaggtggccttcccgtgctaccgctgggtgcagggcgaggacatcctgagcctgcccgagggcaccgcccgcctgccaggagacaatgctttggacatgttccagaagcatcgagagaaggaactgaaagacagacagcagatctactgctgggccacctggaaggaagggttacccctgaccatcgctgcagaccgtaaggatgatctacctccaaatatgagattccatgaggagaagaggctggactttgaatggacactgaaggcaggggctctggagatggccctcaaacgtgtttacaccctcctgagctcctggaactgcctagaagactttgatcagatcttctggggccagaagagtgccctggctgagaaggttcgccagtgctggcaggatgatgagttgttcagctaccagttcctcaatggtgccaaccccatgctgttgagacgctcgacctctctgccctccaggctagtgctgccctcggggatggaagagcttcaggctcaactggagaaagaacttcagaatggttccctgtttgaagctgacttcatccttctggatggaattccagccaacgtgatccgaggagagaagcaatacctggctgcccccctcgttatgctgaagatggagcccaatgggaagctgcagcccatggtcatccagattcagcctcccaaccccagctctccaaccccaacactgttcctgccctcagaccccccacttgcctggctcctggcaaagtcctgggtccgaaattcagatttccaactgcacgagatccagtatcacttgctgaacactcacctggtggctgaggtcatcgctgtcgccaccatgcggtgcctcccaggactgcaccccatcttcaagttcctgatcccccatatccgctacaccatggaaatcaacacccgggcccggacccaactcatctcagatggaggaatttttgataaggcagtgagcacaggtggagggggccatgtacagttgctccgtcgggcggcagctcagctgacctactgctccctctgtcctcctgacgacctggctgaccggggcctgctgggactcccaggtgctctctatgcccatgatgctttacggctctgggagatcattgccaggtatgtggaggggatcgtccacctcttctaccaaagggatgacatagtgaagggggaccctgagctgcaggcctggtgtcgggagatcacggaggtggggctgtgccaggcccaggaccgaggtttccctgtctccttccagtcccagagtcaactctgccatttcctcaccatgtgcgtcttcacgtgcactgcccagcatgccgccatcaaccagggccagctggactggtatgcctgggtccctaatgctccatgcacaatgcggatgcccccacccaccaccaaggaagatgtgacgatggccacagtgatggggtcactacctgatgtccggcaggcctgtcttcaaatggccatctcatggcatctgagtcgccgccagccagacatggtgcctctggggcaccacaaagaaaaatatttctcaggccccaagcccaaagctgtgctaaaccaattccgaacagatttggaaaagctggaaaaggagattacagcccggaatgagcaacttgactggccctatgaatatctgaagcccagctgcatagagaacagtgtcaccatctgagccctagagtgactctacctgcaagatttcacatcagctttaggactgacatttctatcttgaatttcatgctttcctaaagtctctgctgctaaggctctatttcctcccccagttaaaccccctacattagtatcccactagcccaggggagcagtaaactttctctgcaaagactagatccttttttacgctttgcagaccgcatagtcactgtctcaactactcagctctcctgctgcagcatgaaggcagccacagacaacatggaaatgagtgtgactatgttccaataaaactttatggacactga

SEQ ID NO: 2323 - DNA, 2503 bp, Homo sapiens
  source 1..2503: mol_type = unassigned DNA
gcccagacacctgctcactcaccaccagctgggctccgcctgggcctgcccggcacccaccccggccaccaagggcagcagcttttccagaatttggctggcaggcctagtcaccccacctcgccacctcaccactgcacctcggaggccagccctgtccactccactctgtgcctggcttctcttgcctgccttgggccttcgtgtggcccctccacggtgtctgggactgagtgcccctcttgcctcctgaagagcagccatggccacctacaaagtcagggtggccacaggcaccgacctcttgtcgggaacacgggactccatctcactgaccattgtggggacacaaggagagagccataagcagctgctgaaccactttgggagagactttgcaactggggcggtgggccagtacaccgtgcagtgccctcaggacctgggtgagctcatcatcatccgcctgcacaaagagcggtacgccttcttccccaaggacccttggtactgcaactatgtgcagatctgtgcccccaacggccgtatctaccacttccccgcctaccagtggatggatggctacgagaccctggcactccgggaggccacaggaaagacaacagcagatgactcgctccccgtcctcctggagcacagaaaagaggagatcagagccaagcaggacttctaccactggcgagtctttcttcctggcctgcccagctatgtgcacattcccagttaccgccctccggtgcggaggcatcgcaaccccaaccggcctgagtggaatggctatattccgggattcccaattctcatcaactttaaggccaccaagttcctgaacttaaatctccgctactccttcctcaagacggcctccttcttcgtccgcctggggcccatggcactggctttcaaagtccgcggcctgttggactgcaaacattcgtggaagaggctgaaggacattaggaaaattttccctggcaagaaatctgtcgtctccgagtacgtggccgagcactgggcagaggacaccttctttgggtaccagtacctcaacggcgtcaaccccggcctgatccgccgctgcacgcggatcccagacaagttccccgtcacagacgacatggtggctccgttcctgggcgagggaacgtgcttgcaagcggagctggagaaggggaacatttacctggccgactaccgcatcatggagggcatccccaccgtggagctcagcggccggaagcagcaccactgcgcccccctctgcctgctgcactttggacccgagggcaagatgatgcccatcgccatccagctcagccagacccctgggccagattgccccatcttcctgcccagtgattctgagtgggactggctgctagccaagacgtgggtacgctatgcggagttctacagccacgaggccatcgcccacctgctggagacacacctcattgctgaggccttctgcctggccttgctgaggaacctgcccatgtgccaccccctctacaagctcctcatcccccatacccgatacaccgtccagatcaacagcattggccgggccgttctcctcaatgagggggggctctctgccaagggcatgtccctgggcgtggaaggctttgctggggtgatggtacgggctctgtcggagctcacctatgacagcctctacctccccaatgactttgtggagcgtggggtccaggacctgcctggatattactaccgcgatgacagcttggcggtgtggaatgcactggagaagtatgtgacggagatcatcacctattattacccgagtgacgcagccgtggagggtgatccggaattgcagtcttgggtgcaggaaatatttaaagagtgcctcctggggcgggagagctcaggcttccctaggtgcttgcgaaccgtgcctgagctgatccgatatgtcactatagtcatctacacctgctctgccaagcacgctgctgtcaacacaggccagatggagttcaccgcctggatgcccaacttcccagcgtccatgcggaatccaccgattcagactaaggggctgaccactctggagaccttcatggacacgttgccggatgtgaagaccacgtgcatcacgctgctggtgctctggaccctcagccgagagcctgacgacaggcggcccctgggacacttcccggacattcacttcgtggaggaggccccgcggaggagcatagaggcgttccgccagcgcctgaaccagatctcacacgacatccgccagcgcaacaagtgccttcccatcccctactactacctggacccggtgctgattgagaacagcatttctatttaggagcgcgcttcccgtctctcctctccccattctgtgccctactattttcaacaaaacaaaacaaacaagcaaaaaacacaaaaacctcagagaccaaaacaccaaacaaacaaaaaaacaaaaaaccttcctttc

SEQ ID NO: 2324 - DNA, 2682 bp, Homo sapiens
  source 1..2682: mol_type = unassigned DNA
tctttgagcaagatgggtctctaccgcatccgcgtgtccactggggcctcgctctatgccggttccaacaaccaggtgcagctgtggctggtcggccagcacggggaggcggcgctcgggaagcgactgtggcccgcacggggcaaggagacagaactcaaggtggaagtaccggagtatctggggccgctgctgtttgtgaaactgcgcaaacggcacctccttaaggacgacgcctggttctgcaactggatctctgtgcagggccccggagccggggacgaggtcaggttcccttgttaccgctgggtggagggcaacggcgtcctgagcctgcctgaaggcaccggccgcactgtgggcgaggaccctcagggcctgttccagaaacaccgggaagaagagctggaagagagaaggaagttgtaccggtggggaaactggaaggacgggttaattctgaatatggctggggccaaactatatgacctccctgtggatgagcgatttctggaagacaagagagttgactttgaggtttcgctggccaaggggctggccgacctcgctatcaaagactctctaaatgttctgacttgctggaaggatctagatgacttcaaccggattttctggtgtggtcagagcaagctggctgagcgcgtgcgggactcctggaaggaagatgccttatttgggtaccagtttcttaatggcgccaaccccgtggtgctgaggcgctctgctcaccttcctgctcgcctagtgttccctccaggcatggaggaactgcaggcccagctggagaaggagctggagggaggcacactgttcgaagctgacttctccctgctggatgggatcaaggccaacgtcattctctgtagccagcagcacctggctgcccctctagtcatgctgaaattgcagcctgatgggaaactcttgcccatggtcatccagctccagctgccccgcacaggatccccaccacctccccttttcttgcctacggatcccccaatggcctggcttctggccaaatgctgggtgcgcagctctgacttccagctccatgagctgcagtctcatcttctgaggggacacttgatggctgaggtcattgttgtggccaccatgaggtgcctgccgtcgatacatcctatcttcaagcttataattccccacctgcgatacaccctggaaattaacgtccgggccaggactgggctggtctctgacatgggaattttcgaccagataatgagcactggtgggggaggccacgtgcagctgctcaagcaagctggagccttcctaacctacagctccttctgtccccctgatgacttggccgaccgggggctcctgggagtgaagtcttccttctatgcccaagatgcgctgcggctctgggaaatcatctatcggtatgtggaaggaatcgtgagtctccactataagacagacgtggctgtgaaagacgacccagagctgcagacctggtgtcgagagatcactgaaatcgggctgcaaggggcccaggaccgagggtttcctgtctctttacaggctcgggaccaggtttgccactttgtcaccatgtgtatcttcacctgcaccggccaacacgcctctgtgcacctgggccagctggactggtactcttgggtgcctaatgcaccctgcacgatgcggctgcccccgccaaccaccaaggatgcaacgctggagacagtgatggcgacactgcccaacttccaccaggcttctctccagatgtccatcacttggcagctgggcagacgccagcccgttatggtggctgtgggccagcatgaggaggagtatttttcgggccctgagcctaaggctgtgctgaagaagttcagggaggagctggctgccctggataaggaaattgagatccggaatgcaaagctggacatgccctacgagtacctgcggcccagcgtggtggaaaacagtgtggccatctaagcgtcgccaccctttggttatttcagcccccatcacccaagccacaagctgaccccttcgtggttatagccctgccctcccaagtcccaccctcttcccatgtcccaccctccctagaggggcaccttttcatggtctctgcacccagtgaacacattttactctagaggcatcacctgggaccttactcctctttccttccttcctcctttcctatcttccttcctctctctcttcctctttcttcattcagatctatatggcaaatagccacaattatataaatcatttcaagactagaatagggggatataatacatattactccacaccttttatgaatcaaatatgatttttttgttgttgttaagacagagtctcactttgacacccaggctggagtgcagtggtgccatcaccacggctcactgcagcctcagcgtcctgggctcaaatgatcctcccacctcagcctcctgagtagctgggactacaggctcatgccatcatgcccagctaatatttttttattttcgtggagacggggcctcactatgttgcctaggctggaaataggattttgaacccaaattgagtttaacaataataaaaagttgttttacgctaaagatggaaaagaactaggactgaactattttaaataaaatattggcaaaagaa

SEQ ID NO: 2325 - DNA, 2200 bp, Homo sapiens
  source 1..2200: mol_type = unassigned DNA
ttctgcaggcaacagggaggcagcggcttttatgctcaaaaggaatgagtcccagtggctggcacagagaagaaggagcgaaacatctttgagcaagatgggtctctaccgcatccgcgtgtccactggggcctcgctctatgccggttccaacaaccaggtgcagctgtggctggtcggccagcacggggaggcggcgctcgggaagcgactgtggcccgcacggggcaaggagacagaactcaaggtggaagtaccggagtatctggggccgctgctgtttgtgaaactgcgcaaacggcacctccttaaggacgacgcctggttctgcaactggatctctgtgcagggccccggagccggggacgaggtcaggttcccttgttaccgctgggtggagggcaacggcgtcctgagcctgcctgaaggcaccggccgcactgtgggcgaggaccctcagggcctgttccagaaacaccgggaagaagagctggaagagagaaggaagttgtaccggtggggaaactggaaggacgggttaattctgaatatggctggggccaaactatatgacctccctgtggatgagcgatttctggaagacaagagagttgactttgaggtttcgctggccaaggggctggccgacctcgctatcaaagactctctaaatgttctgacttgctggaaggatctagatgacttcaaccggattttctggtgtggtcagagcaagctggctgagcgcgtgcgggactcctggaaggaagatgccttatttgggtaccagtttcttaatggcgccaaccccgtggtgctgaggcgctctgctcaccttcctgctcgcctagtgttccctccaggcatggaggaactgcaggcccagctggagaaggagctggagggaggcacactgttcgaagctgacttctccctgctggatgggatcaaggccaacgtcattctctgtagccagcagcacctggctgcccctctagtcatgctgaaattgcagcctgatgggaaactcttgcccatggtcatccagctccagctgccccgcacaggatccccaccacctccccttttcttgcctacggatcccccaatggcctggcttctggccaaatgctgggtgcgcagctctgacttccagctccatgagctgcagtctcatcttctgaggggacacttgatggctgaggtcattgttgtggccaccatgaggtgcctgccgtcgatacatcctatcttcaagcttataattccccacctgcgatacaccctggaaattaacgtccgggccaggactgggctggtctctgacatgggaattttcgaccagataatgagcactggtgggggaggccacgtgcagctgctcaagcaagctggagccttcctaacctacagctccttctgtccccctgatgacttggccgaccgggggctcctgggagtgaagtcttccttctatgcccaagatgcgctgcggctctgggaaatcatctatcggtatgtggaaggaatcgtgagtctccactataagacagacgtggctgtgaaagacgacccagagctgcagacctggtgtcgagagatcactgaaatcgggctgcaaggggcccaggaccgagggtttcctgtctctttacaggctcgggaccaggtttgccactttgtcaccatgtgtatcttcacctgcaccggccaacacgcctctgtgcacctgggccagctggactggtactcttgggtgcctaatgcaccctgcacgatgcggctgcccccgccaaccaccaaggatgcaacgctggagacagtgatggcgacactgcccaacttccaccaggcttctctccagatgtccatcacttggcagctgggcagacgccagcccgttatggtggctgtgggccagcatgaggaggagtatttttcgggccctgagcctaaggctgtgctgaagaagttcagggaggagctggctgccctggataaggaaattgagatccggaatgcaaagctggacatgccctacgagtacctgcggcccagcgtggtggaaaacagtgtggccatctaagcgtcgccaccctttggttatttcagcccccatcacccaagccacaagctgaccccttcgtggttatagccctgccctcccaagtcccaccctcttcccatgtcccaccctccc

SEQ ID NO: 2326 - DNA, 2784 bp, Homo sapiens
  source 1..2784: mol_type = unassigned DNA
ttctgcaggcaacagggaggcagcggcttttatgctcaaaaggaatgagtcccagtggctggcacagagaagaaggagcgaaacatctttgagcaagatgggtctctaccgcatccgcgtgtccactggggcctcgctctatgccggttccaacaaccaggtgcagctgtggctggtcggccagcacggggaggcggcgctcgggaagcgactgtggcccgcacggggcaaggagacagaactcaaggtggaagtaccggagtatctggggccgctgctgtttgtgaaactgcgcaaacggcacctccttaaggacgacgcctggttctgcaactggatctctgtgcagggccccggagccggggacgaggtcaggttcccttgttaccgctgggtggagggcaacggcgtcctgagcctgcctgaaggcaccggccgcactgtgggcgaggaccctcagggcctgttccagaaacaccgggaagaagagctggaagagagaaggaagttgtaccggtggggaaactggaaggacgggttaattctgaatatggctggggccaaactatatgacctccctgtggatgagcgatttctggaagacaagagagttgactttgaggtttcgctggccaaggggctggccgacctcgctatcaaagactctctaaatgttctgacttgctggaaggatctagatgacttcaaccggattttctggtgtggtcagagcaagctggctgagcgcgtgcgggactcctggaaggaagatgccttatttgggtaccagtttcttaatggcgccaaccccgtggtgctgaggcgctctgctcaccttcctgctcgcctagtgttccctccaggcatggaggaactgcaggcccagctggagaaggagctggagggaggcacactgttcgaagctgacttctccctgctggatgggatcaaggccaacgtcattctctgtagccagcagcacctggctgcccctctagtcatgctgaaattgcagcctgatgggaaactcttgcccatggtcatccagctccagctgccccgcacaggatccccaccacctccccttttcttgcctacggatcccccaatggcctggcttctggccaaatgctgggtgcgcagctctgacttccagctccatgagctgcagtctcatcttctgaggggacacttgatggctgaggtcattgttgtggccaccatgaggtgcctgccgtcgatacatcctatcttcaagcttataattccccacctgcgatacaccctggaaattaacgtccgggccaggactgggctggtctctgacatgggaattttcgaccagataatgagcactggtgggggaggccacgtgcagctgctcaagcaagctggagccttcctaacctacagctccttctgtccccctgatgacttggccgaccgggggctcctgggagtgaagtcttccttctatgcccaagatgcgctgcggctctgggaaatcatctatcggtatgtggaaggaatcgtgagtctccactataagacagacgtggctgtgaaagacgacccagagctgcagacctggtgtcgagagatcactgaaatcgggctgcaaggggcccaggaccgagggtttcctgtctctttacaggctcgggaccaggtttgccactttgtcaccatgtgtatcttcacctgcaccggccaacacgcctctgtgcacctgggccagctggactggtactcttgggtgcctaatgcaccctgcacgatgcggctgcccccgccaaccaccaaggatgcaacgctggagacagtgatggcgacactgcccaacttccaccaggcttctctccagatgtccatcacttggcagctgggcagacgccagcccgttatggtggctgtgggccagcatgaggaggagtatttttcgggccctgagcctaaggctgtgctgaagaagttcagggaggagctggctgccctggataaggaaattgagatccggaatgcaaagctggacatgccctacgagtacctgcggcccagcgtggtggaaaacagtgtggccatctaagcgtcgccaccctttggttatttcagcccccatcacccaagccacaagctgaccccttcgtggttatagccctgccctcccaagtcccaccctcttcccatgtcccaccctccctagaggggcaccttttcatggtctctgcacccagtgaacacattttactctagaggcatcacctgggaccttactcctctttccttccttcctcctttcctatcttccttcctctctctcttcctctttcttcattcagatctatatggcaaatagccacaattatataaatcatttcaagactagaatagggggatataatacatattactccacaccttttatgaatcaaatatgatttttttgttgttgttaagacagagtctcactttgacacccaggctggagtgcagtggtgccatcaccacggctcactgcagcctcagcgtcctgggctcaaatgatcctcccacctcagcctcctgagtagctgggactacaggctcatgccatcatgcccagctaatatttttttattttcgtggagacggggcctcactatgttgcctaggctggaaataggattttgaacccaaattgagtttaacaataataaaaagttgttttacgctaaagatggaaaagaactaggactgaactattttaaataaaatattggcaaaagaatatagagcatcaaaaaa

SEQ ID NO: 2327 - DNA, 897 bp, Homo sapiens
  source 1..897: mol_type = unassigned DNA
aatgatgaaagagtgcaagctctcacttccccttcctgtacagggcaggttgtgcagctggaggcagagcagtcctctctggggagcctgaagcaaacatggatcaagaaactgtaggcaatgttgtcctgttggccatcgtcaccctcatcagcgtggtccagaatggattctttgcccataaagtggagcacgaaagcaggacccagaatgggaggagcttccagaggaccggaacacttgcctttgagcgggtctacactgccaaccagaactgtgtagatgcgtaccccactttcctcgctgtgctctggtctgcggggctactttgcagccaagttcctgctgcgtttgctggactgatgtacttgtttgtgaggcaaaagtactttgtcggttacctaggagagagaacgcagagcacccctggctacatatttgggaaacgcatcatactcttcctgttcctcatgtccgttgctggcatattcaactattacctcatcttctttttcggaagtgactttgaaaactacataaagacgatctccaccaccatctcccctctacttctcattccctaactctctgctgaatatggggttggtgttctcatctaatcaatacctacaagtcatcataattcagctcttgagagcattctgctcttctttagatggctgtaaatctattggccatctgggcttcacagcttgagttaaccttgcttttccgggaacaaaatgatgtcatgtcagctccgccccttgaacatgaccgtggccccaaatttgctattcccatgcattttgtttgtttcttcacttatcctgttctctgaagatgttttgtgaccaggtttgtgttttcttaaaataaaatgcagagacatgtttt

SEQ ID NO: 2328 - DNA, 3396 bp, Homo sapiens
  source 1..3396: mol_type = unassigned DNA
ggaaccggccgcgcggggccgctgcgggctatgggcttctctgagaggttcctccccagtccctagtggcccagatcccggacacctgggctcccgcccaggatcctgcaggcccagggcggtcctggagcggaaagaatgccacgcggggcattcagaccctgtttgccggcgctgtatttcgctttcctgacctgccctactccagagcagagaatgagtggaacccaggctcctgatatccatctgggtgagccagccagagggaccggctgtgtcagaggcaagcaaacaagtattagagtgcaagactgtgggcggagagaggaagcccgagccgccagcagggagcttcggagagagaaagcccaggaacatcccagagagagctgggcccatcctcagccctacccagccccgcagcccctagccctccgcccagaaacccagccctgtccggcgtgccgctcttctcctccaggccggctgctgctgcggccagcgttgccggggcatcccttcctccttcccatcatggcagtgtaccgcctgtgtgtgaccactggtccctacctgagggccggcacactggacaacatctctgtcacactggtgggcacgtgtggtgaaagccccaagcagcggctagatcgaatgggcagggacttcgcccctggatcggtacagaagtacaaggtgcgttgcacagcggagctgggtgagctcttgctgctgcgtgtacacaaggagcgctacgctttcttccgcaaggactcttggtactgtagccgcatctgtgtcaccgaaccggatggtagtgtatcccacttcccctgctatcagtggattgaaggctactgcaccgtggagctgaggccaggaacagcaagaactatttgtcaggactctcttcccctcctcctggatcacaggacacgggagctccgggcccgacaagaatgctaccgctggaagatctatgcccctggcttcccctgcatggtagacgtcaacagctttcaggagatggagtcagacaagaaatttgccttgacaaagacgacaacttgtgtagaccagggtgacagcagtgggaatcggtacctgcccggcttccccatgaaaattgacatcccatccctgatgtacatggagcccaatgttcgatactcagccaccaagacgatctcgctgctcttcaatgccatccctgcgtccttgggaatgaagcttcgagggctgttggatcgcaagggctcctggaagaagctggatgacatgcagaacatcttctggtgccataagaccttcacgacaaagtatgtcacagagcactggtgtgaagatcacttctttgggtaccagtacctgaatggtgtcaatcccgtcatgctccactgcatctctagcttgcccagcaagctgcctgtcaccaatgacatggtggcccccttgctgggacaggacacatgcctgcagacagagctagagagggggaacatcttcctagcggactactggatcctggcggaggcccccacccactgcctaaacggccgccagcagtacgtggccgccccactgtgcctgctgtggctcagcccccagggggcgctggtgcccttggccatccagctcagccagacccccgggcctgacagccccatcttcctgcccactgactccgaatgggactggctgctggccaagacgtgggtgcgcaactctgagttcctggtgcacgaaaacaacacgcactttctgtgcacgcatttgctgtgcgaggccttcgccatggccacgctgcgccagctgccgctctgccaccccatctacaagctcctactcccccacactcgatacacgctgcaggtgaacaccatcgcgagggccacgctgctcaaccccgagggcctcgtggaccaggtcacgtccatcgggaggcaaggcctcatctacctcatgagcacgggcctggcccacttcacctacaccaatttctgccttccggacagcctgcgggcccgcggcgtcctggctatccccaactaccactaccgagacgacggcctgaagatctgggcggccattgagagctttgtctcagaaatcgtgggctactattatcccagtgacgcatctgtgcagcaggattcggagctgcaggcctggactggcgagatttttgctcaggcgttcctgggccgggaaagctcaggtttcccaagccggctgtgcaccccaggagagatggtgaagttcctcactgcaatcatcttcaattgctctgcccagcacgctgctgtcaacagtgggcagcatgactttggggcctggatgcccaatgctccatcatccatgaggcagcccccaccccagaccaaggggaccaccaccctgaagacttacctagacaccctccctgaagtgaacatcagctgtaacaacctcctcctcttctggttggttagccaagaacccaaggaccagaggcccctgggcacctacccagatgagcacttcacagaggaggccccgaggcggagcatcgccgccttccagagccgcctggcccagatctcaagggacatccaggagcggaaccagggtctggcactgccctacacctacctggaccctcccctcattgagaacagcgtctccatctaaccacccccaaataccacccaagaagaaagaaaggtccaagcatgaggaggaccagttcctcaggtcctccagacccttccatcctccctgttctcagttcacctgaaccttctcttctgcacatggagacttttgcagccaagatggctctgacatcatacaaactgggccctgagctgtgagagaccagcacagcagcgtccaggttaaaagccgctgaccaaagtccaatgcacaatagcccctccgaaaggaaggaaccgcttcacttcttgccccacttggggcagcctcttgttccagcctcttggaatgcccagcttgggtttctgagcttttctccctcatcctccccaatccccaaactccttctcctaccatgcctttctacgttctctttcttccaagcctagagccaccagcccagcttccttctctggaaaagcctggaaactgggcacagaaggactgtgtgcctgggtctaacatgtggtcccctttgtccctagcacctttaaggggaggggaagaattggagggcagcttgcctggacccctaacggctgttctcaggaacaggttcccaggcctggggtgtttgtggagatctgtctttctccaaagatttcatccaactcccctttcatcccactccctttcatcccatttttttctttctgtccttgagcccagtgagttcaataaaaaccaaaatatttggctctc

SEQ ID NO: 2329 - DNA, 3362 bp, Homo sapiens
  source 1..3362: mol_type = unassigned DNA
gcaggtgccctgtgctcatctctgcctgggaatggggaggaacagatcttgggggacattggggagtgggcggacaagcactccagggcatcagtccgggccgctgaccaggcggagggcagtgtcccaattatacaggcgttacctccttttctccatctcagcatctgatccctccctccgcagtggaacccaggctcctgatatccatctgggtgagccagccagagggaccggctgtgtcagaggcaagcaaacaagtattagagtgcaagactgtgggcggagagaggaagcccgagccgccagcagggagcttcggagagagaaagcccaggaacatcccagagagagctgggcccatcctcagccctacccagccccgcagcccctagccctccgcccagaaacccagccctgtccggcgtgccgctcttctcctccaggccggctgctgctgcggccagcgttgccggggcatcccttcctccttcccatcatggcagtgtaccgcctgtgtgtgaccactggtccctacctgagggccggcacactggacaacatctctgtcacactggtgggcacgtgtggtgaaagccccaagcagcggctagatcgaatgggcagggacttcgcccctggatcggtacagaagtacaaggtgcgttgcacagcggagctgggtgagctcttgctgctgcgtgtacacaaggagcgctacgctttcttccgcaaggactcttggtactgtagccgcatctgtgtcaccgaaccggatggtagtgtatcccacttcccctgctatcagtggattgaaggctactgcaccgtggagctgaggccaggaacagcaagaactatttgtcaggactctcttcccctcctcctggatcacaggacacgggagctccgggcccgacaagaatgctaccgctggaagatctatgcccctggcttcccctgcatggtagacgtcaacagctttcaggagatggagtcagacaagaaatttgccttgacaaagacgacaacttgtgtagaccagggtgacagcagtgggaatcggtacctgcccggcttccccatgaaaattgacatcccatccctgatgtacatggagcccaatgttcgatactcagccaccaagacgatctcgctgctcttcaatgccatccctgcgtccttgggaatgaagcttcgagggctgttggatcgcaagggctcctggaagaagctggatgacatgcagaacatcttctggtgccataagaccttcacgacaaagtatgtcacagagcactggtgtgaagatcacttctttgggtaccagtacctgaatggtgtcaatcccgtcatgctccactgcatctctagcttgcccagcaagctgcctgtcaccaatgacatggtggcccccttgctgggacaggacacatgcctgcagacagagctagagagggggaacatcttcctagcggactactggatcctggcggaggcccccacccactgcctaaacggccgccagcagtacgtggccgccccactgtgcctgctgtggctcagcccccagggggcgctggtgcccttggccatccagctcagccagacccccgggcctgacagccccatcttcctgcccactgactccgaatgggactggctgctggccaagacgtgggtgcgcaactctgagttcctggtgcacgaaaacaacacgcactttctgtgcacgcatttgctgtgcgaggccttcgccatggccacgctgcgccagctgccgctctgccaccccatctacaagctcctactcccccacactcgatacacgctgcaggtgaacaccatcgcgagggccacgctgctcaaccccgagggcctcgtggaccaggtcacgtccatcgggaggcaaggcctcatctacctcatgagcacgggcctggcccacttcacctacaccaatttctgccttccggacagcctgcgggcccgcggcgtcctggctatccccaactaccactaccgagacgacggcctgaagatctgggcggccattgagagctttgtctcagaaatcgtgggctactattatcccagtgacgcatctgtgcagcaggattcggagctgcaggcctggactggcgagatttttgctcaggcgttcctgggccgggaaagctcaggtttcccaagccggctgtgcaccccaggagagatggtgaagttcctcactgcaatcatcttcaattgctctgcccagcacgctgctgtcaacagtgggcagcatgactttggggcctggatgcccaatgctccatcatccatgaggcagcccccaccccagaccaaggggaccaccaccctgaagacttacctagacaccctccctgaagtgaacatcagctgtaacaacctcctcctcttctggttggttagccaagaacccaaggaccagaggcccctgggcacctacccagatgagcacttcacagaggaggccccgaggcggagcatcgccgccttccagagccgcctggcccagatctcaagggacatccaggagcggaaccagggtctggcactgccctacacctacctggaccctcccctcattgagaacagcgtctccatctaaccacccccaaataccacccaagaagaaagaaaggtccaagcatgaggaggaccagttcctcaggtcctccagacccttccatcctccctgttctcagttcacctgaaccttctcttctgcacatggagacttttgcagccaagatggctctgacatcatacaaactgggccctgagctgtgagagaccagcacagcagcgtccaggttaaaagccgctgaccaaagtccaatgcacaatagcccctccgaaaggaaggaaccgcttcacttcttgccccacttggggcagcctcttgttccagcctcttggaatgcccagcttgggtttctgagcttttctccctcatcctccccaatccccaaactccttctcctaccatgcctttctacgttctctttcttccaagcctagagccaccagcccagcttccttctctggaaaagcctggaaactgggcacagaaggactgtgtgcctgggtctaacatgtggtcccctttgtccctagcacctttaaggggaggggaagaattggagggcagcttgcctggacccctaacggctgttctcaggaacaggttcccaggcctggggtgtttgtggagatctgtctttctccaaagatttcatccaactcccctttcatcccactccctttcatcccatttttttctttctgtccttgagcccagtgagttcaataaaaaccaaaatatttggctctca

SEQ ID NO: 2330 - DNA, 3232 bp, Homo sapiens
  source 1..3232: mol_type = unassigned DNA
agtgcaactctccactgtttagtgattcacacggatgattcacacgtaggaatgcagtggaacccaggctcctgatatccatctgggtgagccagccagagggaccggctgtgtcagaggcaagcaaacaagtattagagtgcaagactgtgggcggagagaggaagcccgagccgccagcagggagcttcggagagagaaagcccaggaacatcccagagagagctgggcccatcctcagccctacccagccccgcagcccctagccctccgcccagaaacccagccctgtccggcgtgccgctcttctcctccaggccggctgctgctgcggccagcgttgccggggcatcccttcctccttcccatcatggcagtgtaccgcctgtgtgtgaccactggtccctacctgagggccggcacactggacaacatctctgtcacactggtgggcacgtgtggtgaaagccccaagcagcggctagatcgaatgggcagggacttcgcccctggatcggtacagaagtacaaggtgcgttgcacagcggagctgggtgagctcttgctgctgcgtgtacacaaggagcgctacgctttcttccgcaaggactcttggtactgtagccgcatctgtgtcaccgaaccggatggtagtgtatcccacttcccctgctatcagtggattgaaggctactgcaccgtggagctgaggccaggaacagcaagaactatttgtcaggactctcttcccctcctcctggatcacaggacacgggagctccgggcccgacaagaatgctaccgctggaagatctatgcccctggcttcccctgcatggtagacgtcaacagctttcaggagatggagtcagacaagaaatttgccttgacaaagacgacaacttgtgtagaccagggtgacagcagtgggaatcggtacctgcccggcttccccatgaaaattgacatcccatccctgatgtacatggagcccaatgttcgatactcagccaccaagacgatctcgctgctcttcaatgccatccctgcgtccttgggaatgaagcttcgagggctgttggatcgcaagggctcctggaagaagctggatgacatgcagaacatcttctggtgccataagaccttcacgacaaagtatgtcacagagcactggtgtgaagatcacttctttgggtaccagtacctgaatggtgtcaatcccgtcatgctccactgcatctctagcttgcccagcaagctgcctgtcaccaatgacatggtggcccccttgctgggacaggacacatgcctgcagacagagctagagagggggaacatcttcctagcggactactggatcctggcggaggcccccacccactgcctaaacggccgccagcagtacgtggccgccccactgtgcctgctgtggctcagcccccagggggcgctggtgcccttggccatccagctcagccagacccccgggcctgacagccccatcttcctgcccactgactccgaatgggactggctgctggccaagacgtgggtgcgcaactctgagttcctggtgcacgaaaacaacacgcactttctgtgcacgcatttgctgtgcgaggccttcgccatggccacgctgcgccagctgccgctctgccaccccatctacaagctcctactcccccacactcgatacacgctgcaggtgaacaccatcgcgagggccacgctgctcaaccccgagggcctcgtggaccaggtcacgtccatcgggaggcaaggcctcatctacctcatgagcacgggcctggcccacttcacctacaccaatttctgccttccggacagcctgcgggcccgcggcgtcctggctatccccaactaccactaccgagacgacggcctgaagatctgggcggccattgagagctttgtctcagaaatcgtgggctactattatcccagtgacgcatctgtgcagcaggattcggagctgcaggcctggactggcgagatttttgctcaggcgttcctgggccgggaaagctcaggtttcccaagccggctgtgcaccccaggagagatggtgaagttcctcactgcaatcatcttcaattgctctgcccagcacgctgctgtcaacagtgggcagcatgactttggggcctggatgcccaatgctccatcatccatgaggcagcccccaccccagaccaaggggaccaccaccctgaagacttacctagacaccctccctgaagtgaacatcagctgtaacaacctcctcctcttctggttggttagccaagaacccaaggaccagaggcccctgggcacctacccagatgagcacttcacagaggaggccccgaggcggagcatcgccgccttccagagccgcctggcccagatctcaagggacatccaggagcggaaccagggtctggcactgccctacacctacctggaccctcccctcattgagaacagcgtctccatctaaccacccccaaataccacccaagaagaaagaaaggtccaagcatgaggaggaccagttcctcaggtcctccagacccttccatcctccctgttctcagttcacctgaaccttctcttctgcacatggagacttttgcagccaagatggctctgacatcatacaaactgggccctgagctgtgagagaccagcacagcagcgtccaggttaaaagccgctgaccaaagtccaatgcacaatagcccctccgaaaggaaggaaccgcttcacttcttgccccacttggggcagcctcttgttccagcctcttggaatgcccagcttgggtttctgagcttttctccctcatcctccccaatccccaaactccttctcctaccatgcctttctacgttctctttcttccaagcctagagccaccagcccagcttccttctctggaaaagcctggaaactgggcacagaaggactgtgtgcctgggtctaacatgtggtcccctttgtccctagcacctttaaggggaggggaagaattggagggcagcttgcctggacccctaacggctgttctcaggaacaggttcccaggcctggggtgtttgtggagatctgtctttctccaaagatttcatccaactcccctttcatcccactccctttcatcccatttttttctttctgtccttgagcccagtgagttcaataaaaaccaaaatatttggctctc

SEQ ID NO: 2331 - DNA, 1912 bp, Homo sapiens
  source 1..1912: mol_type = unassigned DNA
atggaatccactaagaaggggcgagaccagtgaggattcaactaaagggagcgagaaggggcggggacccgggaggaggaagtggagtggccaccgaggaagaggggagtggtcggggtggggcacaggatggtggagagactgtcaacaacttttaatgagctcccttggcgtcctagcctagcccccaggcactgggagcattgcagaaagagaaagatactgtccctgtcctctaggtgtttccagtctagttggggagacaaaacaaatacacattaaatagataacaaacaactccaacttgtaaggctataatagatacgtgtagagcatatgtataatgcactgtattcaggaattccaagcagttcgaacgtcatgacccctcagaagttgacccagaagctggtgaaggaggcccagagaaagatacagggtgaggcacagtgaatctgctggaccagcttcaagaacaatatgtcagcctatccactgccacctcccacagctccagactcgtgggtgcttcctggatgtgaccagccatagaatttatcaccctggcaaggaccctggtacttggaagcttggagaaagtgattcagggctcttacccgcagtgggcaggactgctgacggctcccagctggattttcctgcaactgccctcaatgaagcaagctgttccacccaaggttgatgcaggacaaagagggtctcgctctgtcgcccaggctggagtgcagtggcgagtcactacagcctcgacctctccggctcaagccatcctcccgtctctgtctcccaaagtgctgggattacagcggtgagccactgtgcctggcttactgcctcatcttgttccctgaggttctagacctctagggtgttgtccggaaagaacagggccatgtggaagtcagcaaagagagaggccgattgaacagcaggctcttctcaggcatcgccaagtgactgattaggattggccaccagggggtgccatggagccacagtctatgaagggacagaagaggccttttgggggaccctggaggttgaaggtgctgggaggccctccttggcttaggaggacacttccaaagctggggcgccccaaggaggcaccagtggccagaatgtccacgcagagcacccaccccctgaaacctgaggccccacgtctgccacctgggatccccgagtccccgagctgtcagcggcgccacacactccctgccagtgagtttcgctgcctcaccccggaggacgctgtcagcgcctttgagatcgagcgtgaagccttcatctccgtcttgggcgtctgccccctgtacctggatgagatccggcacttcctgaccctatgtccagagctgtccctgggctggttcgaggagggctgccttgtggccttcatcatcggctcgctctgggacaaggagagactcatgcaggagtcactgacgctgcacaggtctgggggccacatagcccacctgcatgtgctggccgtgcaccgcgccttccggcagcagggcaggggccccatcctgctgtggcgctacctgcaccacctgggcagccagccggccgtgcgccgggccgcgctcatgtgcgaggacgcgctggtacccttctatgagaggttcagcttccacgccgtgggcccctgcgccatcaccgtgggctccctcaccttcatggagctccactgctccctgcggggccaccccttcctgcgcaggaacagcggctgctgaactgggctgcccacctggctgccaacatgatccccgtctctgccctgggctcctcttagctcagctgagcatggagacagcagtttccagagagtggagagagcagggctaaataaagaggagataaggtggcttctcacggcctg

SEQ ID NO: 2332 - DNA, 1025 bp, Homo sapiens
  source 1..1025: mol_type = unassigned DNA
cgagaggtggggtggggggattacaaacctctaacagcaccacaggctgcccggggaacatctgctactacagccttgcagcccggagtcccggattttactggttcccgtgcctgcggacaggcccccagggctagcggctttgtggagggaacactgggtatcctctccacagtccaggtgctgggaggccctccttggcttaggaggacacttccaaagctggggcgccccaaggaggcaccagtggccagaatgtccacgcagagcacccaccccctgaaacctgaggccccacgtctgccacctgggatccccgagtccccgagctgtcagcggcgccacacactccctgccagtgagtttcgctgcctcaccccggaggacgctgtcagcgcctttgagatcgagcgtgaagccttcatctccgtcttgggcgtctgccccctgtacctggatgagatccggcacttcctgaccctatgtccagagctgtccctgggctggttcgaggagggctgccttgtggccttcatcatcggctcgctctgggacaaggagagactcatgcaggagtcactgacgctgcacaggtctgggggccacatagcccacctgcatgtgctggccgtgcaccgcgccttccggcagcagggcaggggccccatcctgctgtggcgctacctgcaccacctgggcagccagccggccgtgcgccgggccgcgctcatgtgcgaggacgcgctggtacccttctatgagaggttcagcttccacgccgtgggcccctgcgccatcaccgtgggctccctcaccttcatggagctccactgctccctgcggggccaccccttcctgcgcaggaacagcggctgctgaactgggctgcccacctggctgccaacatgatccccgtctctgccctgggctcctcttagctcagctgagcatggagacagcagtttccagagagtggagagagcagggctaaataaagaggagataaggtggcttctcacggcctg

SEQ ID NO: 2333 - DNA, 3845 bp, Homo sapiens
  source 1..3845: mol_type = unassigned DNA
agcaggtccagagctgctggtgctcccgttccccagaccctacccctatccccagtggagccggagtgcgggcgcgccccaccaccgccctcaccatggtgctgttggcagcagcggtctgcacaaaagcaggaaaggctattgtttctcgacagtttgtggaaatgacccgaactcggattgagggcttattagcagcttttccaaagctcatgaacactggaaaacaacatacgtttgttgaaacagagagtgtaagatatgtctaccagcctatggagaaactgtatatggtactgatcactaccaaaaacagcaacattttagaagatttggagaccctaaggctcttctcaagagtgatccctgaatattgccgagccttagaagagaatgaaatatctgagcactgttttgatttgatttttgcttttgatgaaattgtcgcactgggataccgggagaatgttaacttggcacagatcagaaccttcacagaaatggattctcatgaggagaaggtgttcagagccgtcagagagactcaagaacgtgaagctaaggctgagatgcgtcgtaaagcaaaggaattacaacaggcccgaagagatgcagagagacagggcaaaaaagcaccaggatttggcggatttggcagctctgcagtatctggaggcagcacagctgccatgatcacagagaccatcattgaaactgataaaccaaaagtggcacctgcaccagccaggccttcaggccccagcaaggctttaaaacttggagccaaaggaaaggaagtagataactttgtggacaaattaaaatctgaaggtgaaaccatcatgtcctctagtatgggcaagcgtacttctgaagcaaccaaaatgcatgctccacccattaatatggaaagtgtacatatgaagattgaagaaaagataacattaacctgtggacgagacggaggattacagaatatggagttgcatggcatgatcatgcttaggatctcagatgacaagtatggccgaattcgtcttcatgtggaaaatgaagataagaaaggggtgcagctacagacccatccaaatgtggataaaaaacttttcactgcagagtctctaattggcctgaagaatccagagaagtcatttccagtcaacagtgacgtaggggtgctaaagtggagactacaaaccacagaggaatcttttattccactgacaattaattgctggccctcggagagtggaaatggctgtgatgtcaacatagaatatgagctacaagaagataatttagaactgaatgatgtggttatcaccatcccactcccgtctggtgtcggcgcgcctgttatcggtgagatcgatggggagtatcgacatgacagtcgacgaaataccctggagtggtgcctgcctgtgattgatgccaaaaataagagtggcagcctggagtttagcattgctgggcagcccaatgacttcttccctgttcaagtttcctttgtctccaagaaaaattactgtaacatacaggttaccaaagtgacccaggtagatggaaacagccccgtcaggttttccacagagaccactttcctagtggataagtatgaaattctgtaataccaagaagagggagctgaaaaggaaaattttcagattaataaagaagacgccaatgatggctgaagagtttttcccagatttacaagccactggagaccccttttttctgatacaatgcacgattctctgcgcgcaaggaccctcgactcacccccatgtttcagtgtcacagagacattctttgataaggaaatggcacaaacataaagggaaaggctgctaattttctttggcagattgtattggccagcaggaaagcaagctctccagagaatgcccccagttaaatacctcctctacctttacctaagttgctcctttatttttattttattattattattattattattattattttttgagatggagtctcactttgtaacccaggctggaatgcaatggcatgatctcagctcactgcaacctccgcctcctgggttcaagcaagtctcctgcctcagcctccgagtagctgggactacaggtgcacgccaccacgcctggctaattttttgtattttagtagagacggggtttcaccgtgttgcccaggctggtcgcgaactcctgagctcaggcaatccgcccacctcagcctcccaaagtgttgggattacaggcatgagccaccatgcccagctgctcctttattttaatccctaaatataatccctaaatatagttatatttcatacttagtttgtttttaaaaagttttctctgtagaaaattttaatcattcataccctttacctttaggtttttctttctatacattcagtcaggcactgggatcatctgtttacaggcattatatttatttggcactcctggaacaagtatatctaacccattcttgatttttggactattcaggtgaactatttgaggggtatggggtctagaagttaaaagatacgcatgtcttctgttcttttcccgtatcaattcattccttcatctctttgccaagttgttttcctttcagggcctgtccttccagtttagaacagtaccatgaatcccacttgtgtcaatattaaagatagctgagaagcacctttcaaatggcacagtccctcttcaagatgtctaaaagaatggttatgtctgtccagttagggatttcacatccacatgtaatcatgtctgctgctgttgctacccaaattttcatttctccacattttgggtacttaagctaaaacgtaatggccacagtctgtaatccattcacattcctcagtttcaccacctccctcttccagactgcactctctgtcatcagtcccctcctttctaacagaaatggggttatgattttgaaggctgtgggttcagggagtctttgccaatcctgttggccctaaactatcaaggaggctccatttcaccatttgattttttgcatttcaggaggcaactgattgtttcgatatgtacatattactcacgtataccccatttccttccagtcagcccaacattttccaccagtctgtccccatctctgaaatccttccttctctttccccctaagtcttttgagtgtcatcatgtactggtggtttctcggttccatctcatccatttccttttcaatggagactacagcgtcagccagctcagccttggcttttaactcaatattccagtccataggggtggttaaaagttgctgcaaggctgcaggcactggcagtgggaagaggcagacgactagatgacttctgcacttttagctggttgaaaagtaccactcccactctgaacatctggccgtccctgcaaagagtgtactgtgcttgaagcagagcactcacacataaatggctgtgtgtggaattgcttgccaaagaagtttctagcctttccctttcccctaactgcatcagggaagaattcttatctctagcttggtttccacatgaggtttttctgagaagggcttgggacaagaagtctgtcatgttagttaagcaggcaagaaatcctactaatccagttttgtttgaaagttgtttgtccgtatgattttttaaaagtcaagtttaatttcaaaaaaccttttttttctgagattacttttggggtaatatttaaaatgagagacattttgtaaccctgtaaaatacatagggaatataacattccagtgtatacaaagaaggcaaattctttaatcaaataaagcgcattataaaatga

SEQ ID NO: 2334 - DNA, 4038 bp, Homo sapiens
  source 1..4038: mol_type = unassigned DNA
gaagcggcagcggttcctgtcaagggggcagcaggtccagagctgctggtgctcccgttccccagaccctacccctatccccagtggagccggagtgcgggcgcgccccaccaccgccctcaccatgataacttgatttaaaacatcgtccagtgtacctgagagatggcagaatgtaatttggtggcaatcctaataagttctattgacaaccctttagataagaacttggataatggggggaattcatgcttggactttaggccactgaacagcttttctcagcctcaggtgctgttggcagcagcggtctgcacaaaagcaggaaaggctattgtttctcgacagtttgtggaaatgacccgaactcggattgagggcttattagcagcttttccaaagctcatgaacactggaaaacaacatacgtttgttgaaacagagagtgtaagatatgtctaccagcctatggagaaactgtatatggtactgatcactaccaaaaacagcaacattttagaagatttggagaccctaaggctcttctcaagagtgatccctgaatattgccgagccttagaagagaatgaaatatctgagcactgttttgatttgatttttgcttttgatgaaattgtcgcactgggataccgggagaatgttaacttggcacagatcagaaccttcacagaaatggattctcatgaggagaaggtgttcagagccgtcagagagactcaagaacgtgaagctaaggctgagatgcgtcgtaaagcaaaggaattacaacaggcccgaagagatgcagagagacagggcaaaaaagcaccaggatttggcggatttggcagctctgcagtatctggaggcagcacagctgccatgatcacagagaccatcattgaaactgataaaccaaaagtggcacctgcaccagccaggccttcaggccccagcaaggctttaaaacttggagccaaaggaaaggaagtagataactttgtggacaaattaaaatctgaaggtgaaaccatcatgtcctctagtatgggcaagcgtacttctgaagcaaccaaaatgcatgctccacccattaatatggaaagtgtacatatgaagattgaagaaaagataacattaacctgtggacgagacggaggattacagaatatggagttgcatggcatgatcatgcttaggatctcagatgacaagtatggccgaattcgtcttcatgtggaaaatgaagataagaaaggggtgcagctacagacccatccaaatgtggataaaaaacttttcactgcagagtctctaattggcctgaagaatccagagaagtcatttccagtcaacagtgacgtaggggtgctaaagtggagactacaaaccacagaggaatcttttattccactgacaattaattgctggccctcggagagtggaaatggctgtgatgtcaacatagaatatgagctacaagaagataatttagaactgaatgatgtggttatcaccatcccactcccgtctggtgtcggcgcgcctgttatcggtgagatcgatggggagtatcgacatgacagtcgacgaaataccctggagtggtgcctgcctgtgattgatgccaaaaataagagtggcagcctggagtttagcattgctgggcagcccaatgacttcttccctgttcaagtttcctttgtctccaagaaaaattactgtaacatacaggttaccaaagtgacccaggtagatggaaacagccccgtcaggttttccacagagaccactttcctagtggataagtatgaaattctgtaataccaagaagagggagctgaaaaggaaaattttcagattaataaagaagacgccaatgatggctgaagagtttttcccagatttacaagccactggagaccccttttttctgatacaatgcacgattctctgcgcgcaaggaccctcgactcacccccatgtttcagtgtcacagagacattctttgataaggaaatggcacaaacataaagggaaaggctgctaattttctttggcagattgtattggccagcaggaaagcaagctctccagagaatgcccccagttaaatacctcctctacctttacctaagttgctcctttatttttattttattattattattattattattattattttttgagatggagtctcactttgtaacccaggctggaatgcaatggcatgatctcagctcactgcaacctccgcctcctgggttcaagcaagtctcctgcctcagcctccgagtagctgggactacaggtgcacgccaccacgcctggctaattttttgtattttagtagagacggggtttcaccgtgttgcccaggctggtcgcgaactcctgagctcaggcaatccgcccacctcagcctcccaaagtgttgggattacaggcatgagccaccatgcccagctgctcctttattttaatccctaaatataatccctaaatatagttatatttcatacttagtttgtttttaaaaagttttctctgtagaaaattttaatcattcataccctttacctttaggtttttctttctatacattcagtcaggcactgggatcatctgtttacaggcattatatttatttggcactcctggaacaagtatatctaacccattcttgatttttggactattcaggtgaactatttgaggggtatggggtctagaagttaaaagatacgcatgtcttctgttcttttcccgtatcaattcattccttcatctctttgccaagttgttttcctttcagggcctgtccttccagtttagaacagtaccatgaatcccacttgtgtcaatattaaagatagctgagaagcacctttcaaatggcacagtccctcttcaagatgtctaaaagaatggttatgtctgtccagttagggatttcacatccacatgtaatcatgtctgctgctgttgctacccaaattttcatttctccacattttgggtacttaagctaaaacgtaatggccacagtctgtaatccattcacattcctcagtttcaccacctccctcttccagactgcactctctgtcatcagtcccctcctttctaacagaaatggggttatgattttgaaggctgtgggttcagggagtctttgccaatcctgttggccctaaactatcaaggaggctccatttcaccatttgattttttgcatttcaggaggcaactgattgtttcgatatgtacatattactcacgtataccccatttccttccagtcagcccaacattttccaccagtctgtccccatctctgaaatccttccttctctttccccctaagtcttttgagtgtcatcatgtactggtggtttctcggttccatctcatccatttccttttcaatggagactacagcgtcagccagctcagccttggcttttaactcaatattccagtccataggggtggttaaaagttgctgcaaggctgcaggcactggcagtgggaagaggcagacgactagatgacttctgcacttttagctggttgaaaagtaccactcccactctgaacatctggccgtccctgcaaagagtgtactgtgcttgaagcagagcactcacacataaatggctgtgtgtggaattgcttgccaaagaagtttctagcctttccctttcccctaactgcatcagggaagaattcttatctctagcttggtttccacatgaggtttttctgagaagggcttgggacaagaagtctgtcatgttagttaagcaggcaagaaatcctactaatccagttttgtttgaaagttgtttgtccgtatgattttttaaaagtcaagtttaatttcaaaaaaccttttttttctgagattacttttggggtaatatttaaaatgagagacattttgtaaccctgtaaaatacatagggaatataacattccagtgtatacaaagaaggcaaattctttaatcaaataaagcgcattataaaatga

SEQ ID NO: 2335 - DNA, 1709 bp, Homo sapiens
  source 1..1709: mol_type = unassigned DNA
gacgtggcttggggccgccatcttggcaagaggcgaagcggcagcggttcctgtcaagggggcagcaggtccagagctgctggtgctcccgttccccagaccctacccctatccccagtggagccggagtgcgggcgcgccccaccaccgccctcaccatgatccctgaatattgccgagccttagaagagaatgaaatatctgagcactgttttgatttgatttttgcttttgatgaaattgtcgcactgggataccgggagaatgttaacttggcacagatcagaaccttcacagaaatggattctcatgaggagaaggtgttcagagccgtcagagagactcaagaacgtgaagctaaggctgagatgcgtcgtaaagcaaaggaattacaacaggcccgaagagatgcagagagacagggcaaaaaagcaccaggatttggcggatttggcagctctgcagtatctggaggcagcacagctgccatgatcacagagaccatcattgaaactgataaaccaaaagtggcacctgcaccagccaggccttcaggccccagcaaggctttaaaacttggagccaaaggaaaggaagtagataactttgtggacaaattaaaatctgaaggtgaaaccatcatgtcctctagtatgggcaagcgtacttctgaagcaaccaaaatgcatgctccacccattaatatggaaagtgtacatatgaagattgaagaaaagataacattaacctgtggacgagacggaggattacagaatatggagttgcatggcatgatcatgcttaggatctcagatgacaagtatggccgaattcgtcttcatgtggaaaatgaagataagaaaggggtgcagctacagacccatccaaatgtggataaaaaacttttcactgcagagtctctaattggcctgaagaatccagagaagtcatttccagtcaacagtgacgtaggggtgctaaagtggagactacaaaccacagaggaatcttttattccactgacaattaattgctggccctcggagagtggaaatggctgtgatgtcaacatagaatatgagctacaagaagataatttagaactgaatgatgtggttatcaccatcccactcccgtctggtgtcggcgcgcctgttatcggtgagatcgatggggagtatcgacatgacagtcgacgaaataccctggagtggtgcctgcctgtgattgatgccaaaaataagagtggcagcctggagtttagcattgctgggcagcccaatgacttcttccctgttcaagtttcctttgtctccaagaaaaattactgtaacatacaggttaccaaagtgacccaggtagatggaaacagccccgtcaggttttccacagagaccactttcctagtggataagtatgaaattctgtaataccaagaagagggagctgaaaaggaaaattttcagattaataaagaagacgccaatgatggctgaagagtttttcccagatttacaagccactggagaccccttttttctgatacaatgcacgattctctgcgcgcaaggaccctcgactcacccccatgtttcagtgtcacagagacattctttgataaggaaatggcacaaacataaagggaaaggctgctaattttctttggcagattgtattggccagcaggaaagcaagctctccagagaatg

SEQ ID NO: 2336 - DNA, 2238 bp, Homo sapiens
  source 1..2238: mol_type = unassigned DNA
gaagcggcagcggttcctgtcaagggggcagcaggtccagagctgctggtgctcccgttccccagaccctacccctatccccagtggagccggagtgcgggcgcgccccaccaccgccctcaccatggtgctgttggcagcagcggtctgcacaaaagcaggaaaggctattgtttctcgacagtttgtggaaatgacccgaactcggattgagggcttattagcagcttttccaaagctcatgaacactggaaaacaacatacgtttgttgaaacagagagtgtaagatatgtctaccagcctatggagaaactgtatatggtactgatcactaccaaaaacagcaacattttagaagatttggagaccctaaggctcttctcaagagtgatccctgaatattgccgagccttagaagagaatgaaatatctgagcactgttttgatttgatttttgcttttgatgaaattgtcgcactgggataccgggagaatgttaacttggcacagatcagaaccttcacagaaatggattctcatgaggagaaggtgttcagagccgtcagagagactcaagaacgtgaagctaaggctgagatgcgtcgtaaagcaaaggaattacaacaggcccaaagtgttgggattacaggcatgagccaccatgcccagctgctcctttattttaatccctaaatataatccctaaatatagttatatttcatacttagtttgtttttaaaaagttttctctgtagaaaattttaatcattcataccctttacctttaggtttttctttctatacattcagtcaggcactgggatcatctgtttacaggcattatatttatttggcactcctggaacaagtatatctaacccattcttgatttttggactattcaggtgaactatttgaggggtatggggtctagaagttaaaagatacgcatgtcttctgttcttttcccgtatcaattcattccttcatctctttgccaagttgttttcctttcagggcctgtccttccagtttagaacagtaccatgaatcccacttgtgtcaatattaaagatagctgagaagcacctttcaaatggcacagtccctcttcaagatgtctaaaagaatggttatgtctgtccagttagggatttcacatccacatgtaatcatgtctgctgctgttgctacccaaattttcatttctccacattttgggtacttaagctaaaacgtaatggccacagtctgtaatccattcacattcctcagtttcaccacctccctcttccagactgcactctctgtcatcagtcccctcctttctaacagaaatggggttatgattttgaaggctgtgggttcagggagtctttgccaatcctgttggccctaaactatcaaggaggctccatttcaccatttgattttttgcatttcaggaggcaactgattgtttcgatatgtacatattactcacgtataccccatttccttccagtcagcccaacattttccaccagtctgtccccatctctgaaatccttccttctctttccccctaagtcttttgagtgtcatcatgtactggtggtttctcggttccatctcatccatttccttttcaatggagactacagcgtcagccagctcagccttggcttttaactcaatattccagtccataggggtggttaaaagttgctgcaaggctgcaggcactggcagtgggaagaggcagacgactagatgacttctgcacttttagctggttgaaaagtaccactcccactctgaacatctggccgtccctgcaaagagtgtactgtgcttgaagcagagcactcacacataaatggctgtgtgtggaattgcttgccaaagaagtttctagcctttccctttcccctaactgcatcagggaagaattcttatctctagcttggtttccacatgaggtttttctgagaagggcttgggacaagaagtctgtcatgttagttaagcaggcaagaaatcctactaatccagttttgtttgaaagttgtttgtccgtatgattttttaaaagtcaagtttaatttcaaaaaaccttttttttctgagattacttttggggtaatatttaaaatgagagacattttgtaaccctgtaaaatacatagggaatataacattccagtgtatacaaagaaggcaaattctttaatcaaataaagcgcattataaaatg

SEQ ID NO: 2337 - DNA, 2512 bp, Homo sapiens
  source 1..2512: mol_type = unassigned DNA
agcactgcctggaagtgtggggtgagagctcctcctaggacacccctttccccttggggaaagaattgtgcccccaggcccttccccgcggaggtccctctcctccttccccctcatctccccttcctgggacagaaagtgcctccacctgcatccccaggggcccggcctccagggcccgctggccccacagcaggcaagctgagatgacggtcaagctggatttcgaggagtgtctcaaggactcaccccgtttccgagcctctattgagctggtggaagccgaagtgtcagaattggagacccgtctggaaaagctcctgaaactgggcactggtctcctggaaagtgggcgccattaccttgctgccagccgcgccttcgttgtcggcatttgtgacctggcccgcctgggtccaccagagcccatgatggcggagtgtctggaaaaattcaccgtgagcctgaaccacaagctggacagccatgcggagcttctagatgccacccaacacacactgcagcagcagatccagaccctggtcaaggaaggtctgcggggtttccgagaggctcgccgggatttctggcggggggctgagagcctggaggctgccctgacccacaacgcagaggttcccaggcgccgggcccaggaggcagaagaggcaggagctgctttgaggacggctcgagctgggtaccggggacgggcactggattatgccctgcagatcaacgtgattgaggacaagaggaagtttgacatcatggagtttgtgctgcgtttggtggaggcccaggctacccatttccagcagggccatgaggagctgagccggctgtcccagtatcgaaaggagctgggcgcccagttgcaccagctggtcttgaattcagcacgagagaagagggacatggagcagagacacgtgctgctgaaacagaaggagctgggtggggaggagccagaaccaagcttaagagaggggcctggtggcctggtgatggaaggacatctcttcaaacgggccagcaacgcatttaagacctggagcagacgctggttcaccattcagagcaaccaactggtttaccagaagaagtacaaggaccctgtgactgtggtggtggatgaccttcgtctctgcacagtgaaactctgccctgactcagaaaggcggttctgctttgaggtggtgtccaccagcaagtcctgcctcctccaggctgactcagagcgcctcctgcagctgtgggtcagtgctgtgcagagcagcattgcttctgccttcagtcaggctcgccttgatgacagcccccggggtccaggccagggctcaggacacctggccataggctctgctgccaccctgggctctggtggaatggccaggggaagggagcctgggggagtcgggcacgtggtggcccaggtccagagtgtggatggcaatgcccagtgctgcgactgccgggagccagccccggagtgggccagcatcaaccttggtgtcaccctctgcattcagtgttccggcatccacaggagccttggtgttcacttctccaaagtccggtctctgacccttgactcatgggagccagaactagtgaagctcatgtgtgagctgggaaatgtcatcatcaaccagatctatgaggcccgcgtggaggccatggcagtgaagaaaccagggcccagctgctcccggcaggagaaggaggcctggattcacgctaaatacgtggagaagaagttcctgaccaagctgcctgagattcgagggcgaagaggtggccgggggcgcccaagggggcagcctcctgtgcccccaaagccttccatcaggccccggccagggagcttgagatccaagccagagcccccctctgaggacctgggaagcctgcaccctggggccctactgtttcgagcgtctgggcatcctccatctcttcccaccatggctgatgcccttgcccatggagctgatgtcaactgggtcaatgggggccaagataatgccacaccgctgatccaggccacagctgctaattctcttctggcctgtgagtttctcctccagaacggggcgaacgtgaaccaagcggacagtgcgggccggggcccgctgcaccacgcaaccattcttggccacacggggctcgcctgcctgttcctgaaacggggagctgatctgggggctcgagactctgaaggcagggaccctctgaccatcgccatggaaacagccaacgctgacatcgtcaccctgctacgactggcaaagatgagggaggctgaagcggcccaggggcaggcaggagatgagacgtatcttgacatcttccgcgacttctccctcatggcgtcagacgacccggagaagctgagccgtcgcagtcatgacctccacacgctgtgacccgaggcccacggggcccgcgcctgcctcccttccccgccaccgggccctctgccattaaagcctccgtgcttcgctcttcc

SEQ ID NO: 2338 - DNA, 7160 bp, Homo sapiens
  source 1..7160: mol_type = unassigned DNA
cgtttccctgcggccagcgctctacttggggcgggaggaagaggggcgggactggggcctgactagtcgtcgccgtcttcgcggctgctatgaccagcgggcgaggcgcccttcgcagctccgcgcaacgctagtcgcggccgtgcgcccgccgtagccgtctgcgtcccagcgcggccgctcccgcggccccctcggctttgccagcgccgcctgcgaggcggaggcaggatgaagatgactgtggatttcgaggagtgtctgaaggactcgccccgcttcagggcagctttggaagaagtagaaggtgatgtggcagaattggaactaaaacttgataagcttgtgaaactttgtattgcaatgattgatactggaaaagccttttgtgttgcaaataaacagttcatgaatgggattcgagacctggctcagtattctagtaatgatgctgtcgttgagacaagtttgaccaagttttctgacagtcttcaagaaatgataaattttcacacaatcctgtttgaccaaactcagagatcaattaaggcacagcttcagaactttgttaaagaagatcttagaaaattcaaagatgccaagaagcaattcgaaaaagtcagtgaagaaaaagaaaatgcgttagtaaaaaatgcccaagtacaaagaaacaaacaacatgaagttgaagaagccaccaacattctgacagcaacaagaaaatgtttccgacacatagccctcgattatgtgcttcagattaatgttcttcaatcaaaaaggagatcagaaatcctaaaatcaatgttgtcatttatgtatgcccatttggccttctttcatcaaggatatgatctgtttagtgaacttggaccctacatgaaggatcttggtgcacagttggatcgactggttgtggatgcagcaaaggagaaaagagaaatggagcaaaaacattccaccattcaacaaaaggatttctccagtgatgattctaagttagaatataacgtagatgctgcaaatggcatagttatggaaggatatctgttcaaacgagccagcaatgccttcaaaacttggaacaggcgctggttttcaatacagaataatcagttggtttaccagaaaaaatttaaggataatccgactgtggtagttgaagacctcaggctttgcacagtgaaacattgtgaagacatagagcgacgattctgctttgaggtggtctcgccaacaaaaagttgcatgctccaggcagattccgaaaagctgcgccaggcatggattaaggctgttcagaccagtattgctactgcttatagagagaagggtgatgaatcagagaagctggataagaaatcatctccatccacaggaagcctagattctggaaatgagtccaaagagaaattattgaaaggagaaagtgcgcttcagcgggtccagtgtatccctggcaatgccagctgttgtgactgtggcctggcagatccacggtgggccagcatcaacctgggcatcaccttgtgtatcgagtgctccggaattcaccggagccttggggttcatttttcaaaagtacgatctttaactttagacacctgggagccagaacttttaaagcttatgtgtgagttggggaatgatgttataaatcgagtttatgaagctaatgtggaaaaaatgggaataaagaaaccccaaccaggacaaagacaggagaaggaggcatatatcagagcaaaatatgtggagaggaaatttgtggataaatattctatatcattatcacctcctgagcagcaaaaaaagtttgtctctaaaagttctgaagaaaagaggctgagcatttctaaatttgggccaggggaccaagtcagagcatctgcccaaagttcagtcagaagtaatgacagtggaattcagcagagctctgatgatggaagagaatctttaccctccacggtgtcagccaatagtttatatgagcctgaaggagaaaggcaagattcttctatgtttcttgactcgaaacatcttaatccaggacttcagctttatagggcgtcatatgaaaaaaaccttcctaaaatggctgaggctttggctcatggtgcagacgtgaactgggccaattcagaggaaaacaaagcgacaccacttattcaggctgtattagggggctctttggtgacgtgtgagttcctcctacagaatggtgctaatgtcaaccaaagagatgtccaagggcggggaccattgcaccatgccaccgtcttagggcacacagggcaggtatgtttattcctaaaacgaggtgccaatcaacatgccactgatgaagaagggaaagaccctttgagcatagctgtggaagcagccaatgctgatatagtcaccttgttacgtttagcaagaatgaatgaagagatgcgggaatcagaaggactttatggacagccaggtgatgaaacttatcaggacatatttcgtgatttttcccaaatggcatccaataatccagagaaactaaatcgtttccagcaagattcacagaaattctgaatttttttaaaaatgggaaaatatgaaatctggtgaccccctaatgtatacagctaaaaaatcacaatttttttactgctttaattctacttaattttggtagatattgaatggcttggaaaagaggtacccattcatatatttataaattaaaacatagttatctagtagtaggagaggaacctagtttaggacctcttttattaaaaaagcctatttaaagggctatttctgtagacagaagttcagtctagatttaggccatctctaggttacaagatgataggaggttagacaaaagtgattcttttgccaatgggtggtggcattgatttttttcctccatgcatcttgcccaggatcactcagtcaagcatgtcttcatcaagtggaagccaactgtcctgcctgcctcaagaatatgtgttttctttagcttccctgaggctttttggtggttcagaaataggtgtgtgtgttgatgtgtttttggtaacctagctttcatacacataatatatgatttattagaactagagaatgtgttttccccgtttgttcataaatgcggtcggttatacttcttaggtgacaggttattgtccagtactttaatgtatgtatgtataatggctgtacaggtagaccataattcagtcctttagatttattttatgcagcaaaaagaagctcttttttttttttaatcacaaaaaaaaaccccagttcaaaatgtgtagttcttcattgttgggttgattccccaaaaccttgacagatgtatcgatggaataaaagtatgttttaaaggttacttgaatgtcacaaaattatgccttcatcaaaactttaaaggaaaaatcaatttataaaatcatgtaggccatttttatatttgaaatttgtccttttaaagatagttttgctgttgctcctagtgaaagaaaaatctctgtacaaaggagaaaaagaaccccacttattcttagttaatactaaaatatatagcaataaattgctgtttattttttctacatctattttgtgtacttgtacacagtgtacattcttttaaattatatcgtgtatatagctttagtattcggttacatgattcacagacccctgaattccaaaatattatggataaacattaccatttatatgctacaaattagtctgattccatctttgaaaatgtcttaaagtataaaataattaatttgctttttttttttttttttcccgagatggcgtcttgctgtgtcacccaggctggagtgcagtggcacgatctcagctcactgcagcctcctcctcttgggttcaagcaattctcctgcctcagcctcccgagtagctgggactacaggcacccgccaccattccgagctaatttctatatttttagtaaagacgggtttcaccattttggccaggttggtctcgaactcctgacctcaggtgatcagcctgctttagcctcccagagtgctgggattacaggcgtgagccaccgcacccagcctaatttgccttttgattccttcccattgttgtcaacaattaagtctattcttcttttagaaattatatgtaaatgatattattgatactctttctaaataagaggttttaaaatatataaaaactttatgatccaattatagataaattttctaacatttcccagtcactagggttttataagttgattaaacatcaaatcagaatctagccaagcaggaattatattgaaataagttcacattacagaaaaggttccataatttggccaaactgcatgcatgtaatgcttatttagtaatggtcactgtatgttagataaggataaaaatatatttgtgaattacttctgaggaaatgctaacttccacagcattgtatttaattataacaataacaggaacattaaatctttatctttgctgtttcacctcaaagtcatagatcatctggctttttaggcaccttcactaaaggcaaaaatctgatttgtagtttttattagcatgtaccttgaaattatttgaccaagaagctcaaagaaaagaagtacgttaaagaaaaagaaaaaacctcacttttcctttatagtgtcccttcctgttttaattcctaaagatcctgacttttatctgaggaagtctaggtagttttccttttggatctggccattggtgcgtgtttcattcagatcacctctggaatctctgtggttgtgaaggcaattccttatgagactcttgcctcctgtggcttacgtgatgaattgttaatatggcagtaattaattagtatctacttaaatttagtggtcagaaatgtatttgaagtgccttaaagatgatcatggttcagaatatcttcagagaaagcaaaatctttaatattgcagggagcctagcaatacaagtacacatttctgtggcttgatttcttgaatatgctgagacccaatttggactacatttggcagaaatgatggagtaaacagcaaggctttaaattaaattaatagttacaaggtaggttggctcttaggtgaatttagccatgtcaactaatagcttttatatggtatgtaacaaatctgaattatgttatgctgtgaattattcagtgcattataagaaatcttagttaatcatgcttttgggcttcattagtcaatgtgattggccttttattttctttccataacttatctgctattattagtttcttattccttattattaatctgttagctcattatcattagcttactaacttgaaagttagattaatatcaaaataagaatagcagcactatgaagagttaataaaatgcaatttcatgttagagctagaataaaagtaattgagcagtcatttgcaaatgcttcattataacatttatgtgcttaagatttctaaggttttaaaaagttacctttaatacaatccttagaaactcagaaatttcctgatattcattagattatggtgtttgcctaatttataccggttttcactgtatattttaatgaactttgattggttacttttccagacatacagatttaatttggaatatgaactttggttcttcatgagtgcattttgaaaaagaaaaaaagtacacattcagaatctggccaatttaagtttgtattttaaaaatattttatgcatgttaagtatggtcgcagtaaatgaaattgtgtttaagactaaatttactaccgttttgaacagacattcccagatcattcttatattgtcagataacacttgtgtataatatcactttggatcatggacatgagctggaaaaatgatgtatttttgtagattgtatgtccagaatgactttagaaccgcatgatacggtggaaggagcactggactagtcgtcactaccctttttggattcagggctcctcacaattaaaatgagtgtaatgaaacaaggtgaaaatatagaagcatccctttgtatactgttttgctacttacagtgtacttggcattgctttatctcactggattctcatggtaggatttctgagatcttaatctaagctccaaagttgtctacttttttgatcctagggtgctccttttgttttacagagcagggtcacttgatttgctagctggtggcagaattggcaccattacccaggtctgactgaccaccagtcagaggcactttatttgtatcatgaaatgatttgaaatcattgtaaagcagcgaagtctgataatgaatgccagctttccttgtgctttgataacaaagactccaaatattctggagaacctggataaaagtttgaagggctagattgggatttgaagacaaaattgtaggaaatcttacatttttgcaataacaaacattaatgaaagcaaaacattataaaagtaattttaattcaccacatacttatcaatttcttgatgcttccaaatgacatctacagatatggttttgtggacatctttttctgtttacataaatttatccacttaaaatgtgataatgtggagacaaagcaagatttgattacataaacttttctctgcattggtcttttcactatcttatttgctaacttttcttatttttcttcaacctccccaccctccattttttggatattaaacagggaaagcttgctacattataaagattgttggcaccatttattttacacaaaggctaaaggttaacttttggaaatgatgagctacttttatatatgtgtttactcatgctttgtgatatttctggatcattccagtcataaagacttattacatgtactatttcttgctacctgtgaaaaggtatattttaaagaatgtataaccaacagtccatttactttttattagtatgtagaggatttgtatctaattcatgaatgtagttttacagtagtttgtcattgtaaatggagcaaagtacattatcttctaaaatgtacattatgtaagaattgtaaatatacttaagtaatttgtatgccaaaaaattacaataagtcaataaagatctcacctctggcttagttctttca

SEQ ID NO: 2339 - DNA, 4942 bp, Homo sapiens
  source 1..4942: mol_type = unassigned DNA
acttttcgctttctcagtgttttcaggaagtgtgtgtgttggccacggctgcaggaggtgggggagacacaaagcaggaagcctccgggagaccagagctgggtgcagacatacacacacacatacacacagacacacagagtcacacacactcacacacactctctctctctctccctctgtctttctctctctctctctctctctgtcctttcctcctggacagatccacagttatacacagaaacaaacacacacgcacgtagagaagtgattcacaaacacttaaagacataaatcacaggtgcaaagccatacctgggctcaaaaacctccaagagaacgcagcctcagacccacccaggggccaggggccaggctgtttgcgagaccagcccaggcgggacccaggcttgcacgggcaggtacacgacattcttgggcatacgcagcccgcctggccggagctgtgggagtcctcagccccaagacccagcaggcgtctgaggcctgcccactaaggaggaggagtcattgctgccatcattatcatcccctccccagccacagtctgaggagcccctgtccaccctcccccaggggcctccccagcctccctctccacctccctgccccccggagatacctccaaagccggtacgcctgttcccagagttcgatgactctgactacgatgaggtcccagaggaggggccgggggccccagccagagtgatgaccaagaaggaggagcccccaccgagccgagtcccacgggccgtgcgcgtggccagtctgctgagcgagggagaggaactgtctggggacgaccaaggggatgaggaagaggatgaccacgcctatgagggcgtccccaatggcggatggcataccagcagcctgagcttgtccttgcccagcacaatagctgcgccacaccccatggacgggccgcctgggggctccacccccgtcacaccagtcatcaaggctggctggctggacaagaacccaccgcagggatcttacatctatcagaaacgatgggtgagactggatactgatcacctgcgatactttgacagtaacaaggacgcttactctaagcgctttatctctgtggcctgcatctcccacgtggctgccatcggggaccagaagtttgaagtgatcacaaacaaccgaacctttgccttccgggcagagagtgatgtggagcggaaggagtggatgcaggccctgcagcaggccatggctgagcagcgtgcccgggcccggctctctagcgcttatctgctgggagttccaggctcagagcagcctgaccgcgctggcagcctggagcttcgtggcttcaagaataagctgtacgtggccgtggtcggggacaaagtgcagctctacaagaatctagaggagtaccacctgggcattggcatcaccttcatcgacatgagcgtgggcaacgtgaaggaagtggaccggcgcagcttcgacctcaccacgccctaccgcatcttcagcttctctgctgactcagagctagagaaggagcagtggttggaggccatgcagggagccatcgctgaggccctgtctacctcggaggtggccgagcgcatctgggctgcagcccccaacaggttctgtgctgactgcggggctcctcagcctgactgggcctccatcaacctctgtgttgttatctgcaagcgctgtgcaggggagcaccgtggcctgggcgctggcgtctccaaggtgcggagcctgaagatggacaggaaggtgtggacagaaacacttatcgagctcttcttacagctggggaatggcgctgggaaccgcttctgggcagccaacgtgccccccagtgaggccctgcagcccagcagcagccccagcacccggcggtgccacctggaggccaagtaccgtgagggcaagtaccgccgctaccacccgctctttggcaaccaggaggagctggacaaggccctgtgtgctgcagtcaccaccacagacctggctgagacccaggcgctcctgggctgtggggctgggatcaactgcttctcgggggaccctgaggcccccacgcccctggctcttgcagagcaggcggggcagacgctgcagatggaattccttcggaacaaccggaccacagaggtgcctcggctggactcgatgaagcccctggaaaagcactactcagttgtcctgccgaccgtgagccacagtggcttcctctacaagactgcctctgccggcaagctgctacaggaccgccgggcccgggaagagttcagccggcgctggtgtgtccttggtgacggggtcctgagctactttgagaatgagcgggcagtgacccccaatggagagattcgggccagcgagattgtgtgcctggcagtgccccctcctgacacccatggctttgagcacacctttgaggtgtacacggagggagaacggctgtacctgtttgggctggagagtgcggagcaggctcatgagtgggtcaagtgtattgctaaggcattcgtgcctcccctagccgaggatctgctggcccgggattttgagcggctgggacgcctaccctacaaagctggcctgagcctacagcgggcccaggagggctggttctctctcagtggctcggagctccgtgctgtcttcccggaggggccctgcgaagagccgctgcaactacggaaactgcaggagctttccatccagggggacagtgagaaccaggtgctggtgctggtggagcgaaggaggacactgtacatacagggcgagcggcggctggacttcatgggttggctgggggccatccagaaagcagccgccagcatgggggacacgctgtcggagcagcagcttggggactcggatatcccggtgatcgtgtaccgctgtgtggactacatcacgcagtgcggcctgacctccgagggcatctaccgcaagtgtgggcagacatcgaagacacagcggctgctggagagcctgcggcaggatgcgcgctctgtgcacctcaaggagggcgagcagcacgtggatgatgtttcctcggcgctcaagcgcttcctgcgcgacctgcctgatgggctcttcactcgcgcccagcgcctaacctggctggaggcctcagagattgaggacgaggaggagaaggtctccaggtaccgagagctgctggtgcggctgccccctgtcaaccgggccacagtgaaggcccttatcagccacctgtactgtgttcagtgcttctcagacacgaaccagatgaacgtgcacaacctggcaattgtgtttgggcccacgctcttccagacagatgggcaggactacaaggctggccgtgtggtggaagacctcattaaccactatgtggtggtgtttagtgtggatgaggaagagctcaggaagcagcgggaggagatcactgccattgtgaagatgcgcgtggctggcactgccagtgggacccagcatgccggtgacttcatctgcacagtgtatctggaagagaagaaggcagagactgagcagcatatcaaggtcccagcatccatgactgctgaggagctcaccctggagatcctggatcgccggaacgtgggcatcagggagaaggactattggacctgctttgaggtcaacgagagggaggaggcagagcgccccctgcactttgcggagaaggtgctgcccatcctgcacgggctgggcacggacagccacctggtggtgaagaagcaccaggccatggaggccatgctgctgtacctggccagccgtgtcggtgacaccaagcatggcatgatgaagttccgtgaggaccgcagcctcctgggcctgggcctgccctcaggtggcttccacgatcgctacttcatcctcaacagcagctgcttgcggctctacaaggaggtccggagccagaggccgtggagcggggcccctgagaccagtcaccggcctgagaaggagtggcctattaagagtctcaaagtctacctgggagtgaagaagaaactcaggccacccacctgctggggcttcacagtggtgcatgagacagagaaacatgagaagcagcagtggtacctctgctgtgacacacagatggagctccgggagtggttcgctacctttctgtttgtgcagcatgacggcctggtgtggccctcagagccctcacgcgtgtcccgggcagtgcctgaggtccggctgggtagtgtgtcactgatcccccttcgaggtagtgaaaatgaaatgcgccggagtgtggctgccttcaccgcggaccctctgtctcttctgcgcaacgtctgagcacaggagcccatccttggctctaggattccgccgctggaagccttctgttcagacaccccttatgctccaaggcctgatgtgagccagcggggggtgcatgggaaactgcaccccacaacccacatcctccatcctgactgcagcatggggttccccggcaggggtgggaggcagcaggggtcagcctgggcaggaacctctcccaactctgtccaggtgttcagacctcttggcccaacctgctcaccccaccgggttcactgtccttgtggggctggagagatgggcataagtcaggaacttgggaggaccaccaccctttcagaggcgtgaggccctggggccctgccggaagggagccccctgctcctcccaacaaactccagaacagcagaaagcgggtgctgtagaggagcactcagctcacggggagggagctcttggctgagcttctacagggctgagagctgcgctttggggacttcagccttccttccagtctgggctgagtggggggtccagactacctgatgccccttccccaatttggggactttttgataatataaatatatctgtatatttt

SEQ ID NO: 2340 - DNA, 2353 bp, Homo sapiens
  source 1..2353: mol_type = unassigned DNA
gcctgtcagggtgttgtgggggtgcccagctgcctgtcagaccctgaggactaccagacagagagtgggcagccatttcccgggaggcttccccttcccccacctcactctcttgccatacgggggtcaggagtcacgtgtagccacagcgctctgggccaggggtcggggctctggtgtggctcccccaggccctggctgtatgtgggtgggcatgtggcctccccccaccctgtgtgttaggaactcgtgtcctgtcccggagtgtctgtctctgtttcacttcttgtgttcccgtgtctgtctgtcttgcatccctagcccgcagtctttttctctgtccctttatctttctgtttttgtctgtgtcctaggtcggtttctgccactggctctcctgtccctgtgatctgggtctctgtgtggtctccgctggcagggggaggggagtgtgaggaaacagaactaaaagtgctgggctgtgtgggtcggggctgtgtggacagagggggcgtggcagccccgggtgggtgtgatctgtggcttgaagggaaggatgacgctgagtgggtctcgggggcaggaggagcccccaccgagccgagtcccacgggccgtgcgcgtggccagtctgctgagcgagggagaggaactgtctggggacgaccaaggggatgaggaagaggatgaccacgcctatgagggcgtccccaatggcggatggcataccagcagcctgagcttgtccttgcccagcacaatagctgcgccacaccccatggacgggccgcctgggggctccacccccgtcacaccagtcatcaaggctggctggctggacaagaacccaccgcagggatcttacatctatcagaaacgatgggtgagactggatactgatcacctgcgatactttgacagtaacaaggacgcttactctaagcgctttatctctgtggcctgcatctcccacgtggctgccatcggggaccagaagtttgaagtgatcacaaacaaccgaacctttgccttccgggcagagagtgatgtggagcggaaggagtggatgcaggccctgcagcaggccatggctgagcagcgtgcccgggcccggctctctagcgcttatctgctgggagttccaggctcagagcagcctgaccgcgctggcagcctggagcttcgtggcttcaagaataagctgtacgtggccgtggtcggggacaaagtgcagctctacaagaatctagaggagtaccacctgggcattggcatcaccttcatcgacatgagcgtgggcaacgtgaaggaagtggaccggcgcagcttcgacctcaccacgccctaccgcatcttcagcttctctgctgactcagagctagagaaggagcagtggttggaggccatgcagggagccatcgctgaggccctgtctacctcggaggtggccgagcgcatctgggctgcagcccccaacaggttctgtgctgactgcggggctcctcagcctgactgggcctccatcaacctctgtgttgttatctgcaagcgctgtgcaggggagcaccgtggcctgggcgctggcgtctccaaggtgcggagcctgaagatggacaggaaggtgtggacagaaacacttatcgagctcttcttacagctggggaatggcgctgggaaccgcttctgggcagccaacgtgccccccagtgaggccctgcagcccagcagcagccccagcacccggcggtgccacctggaggccaagtaccgtgagggcaagtaccgccgctaccacccgctctttggcaaccaggaggagctggacaaggccctgtgtgctgcagtcaccaccacagacctggctgagacccaggcgctcctgggctgtggggctgggatcaactgcttctcgggggaccctgaggcccccacgcccctggctcttgcagagcaggcggggcagacgctgcagatggaattccttcggaacaaccggaccacagaggtgcctcggctggactcgatgaagcccctggaaaagcactactcagttgtcctgccgaccgtgagccacagtggcttcctctacaagactgcctctgccggcaagctgctacaggaccgccgggcccgggaagagttcagccggcgctggtgtgtccttggtgacggggtcctgagctactttgagaatgagcgggcagtgacccccaatggagagattcgggccagcgagattgtgtgcctggcagtgccccctcctgacacccatggctttgagcacacctttgaggtgtacacggagggagaacggctgtacctgtgggctggagagtgcggagcaggctcatga

SEQ ID NO: 2341 - DNA, 5767 bp, Homo sapiens
  source 1..5767: mol_type = unassigned DNA
gattcacaaggaatgaccctcttcatcgcctctcctaattcagtcctcacaacagtccttttacaaatgggacaacaggttagaggaagtcaggcagatttccagcatcatagagagtaaaggaccagggaaggatcaggattcaaggactgcacccaggctctgcttccagcttgctgtgtgactttgggtaattttgttcccttagggaactgagctttctcatttgtaaatgcaaacaggctgttgggaggatcaaatgagatccaggggtgaaaacagcttagtttactttcaggaatttacccacgcggtatataaaggcaaaatattattatagtcaggtgattgtagattgaggaacccatttcctcattctgcaaattgcaaacctgagggcccaaagagggacaggggcttgccccaggtctcagcaggctgtgagcaagagctaaagcctaatcctcctgcctttgggcctggagcccttccttgtaccccaggggtcagtgtctttgttggatacaggcttagattgactgactgtaccctgagaacctaggggagtccctgttcccaattcttctcctacccccaccttggcctgatggaggaagaccctgctgtgttgagatgagcaccagagccaagaagctgaggaggatctggagaattctggaggaagaggagagtgttgctggagctgtacagaccctgcttctcagctcccgcctcaggccgagatgaggagcccttcagaatagctgctgtctctgggaggacccgggcgtccttggcagcccagctgctctggacaaagccctgccagtcaggcctccgctggcaggaaccatggcagaggctggggatgctgcgctatcggtggccgagtggctgcgggcattgcacctggagcagtacacggggctctttgagcagcatggcctggtgtgggccactgagtgccaaggcctcagcgacacccgcctgatggacatgggcatgctactccctggtcaccgccgccgcatcctggctggcctgctccgtgcccatacctcaccggcccctgcaccccgccccaccccacggcctgtgcccatgaagcgccacatcttccgctcaccacctgtgcctgccactccacccgagccgctgcccaccactacagaggatgaggggctccccgctgccccacccatcccgccccggaggagctgccttccgcccacctgcttcaccaccccatccacagctgccccagaccctgtgctgcccccgctgcctgctaagcggcatttggcagagctgagcgttccacccgtgccgccccgcaccggacccccccgcctgctggtgagcctgcccactaaggaggaggagtcattgctgccatcattatcatcccctccccagccacagtctgaggagcccctgtccaccctcccccaggggcctccccagcctccctctccacctccctgccccccggagatacctccaaagccggtacgcctgttcccagagttcgatgactctgactacgatgaggtcccagaggaggggccgggggccccagccagagtgatgaccaagaaggaggagcccccaccgagccgagtcccacgggccgtgcgcgtggccagtctgctgagcgagggagaggaactgtctggggacgaccaaggggatgaggaagaggatgaccacgcctatgagggcgtccccaatggcggatggcataccagcagcctgagcttgtccttgcccagcacaatagctgcgccacaccccatggacgggccgcctgggggctccacccccgtcacaccagtcatcaaggctggctggctggacaagaacccaccgcagggatcttacatctatcagaaacgatgggtgagactggatactgatcacctgcgatactttgacagtaacaaggacgcttactctaagcgctttatctctgtggcctgcatctcccacgtggctgccatcggggaccagaagtttgaagtgatcacaaacaaccgaacctttgccttccgggcagagagtgatgtggagcggaaggagtggatgcaggccctgcagcaggccatggctgagcagcgtgcccgggcccggctctctagcgcttatctgctgggagttccaggctcagagcagcctgaccgcgctggcagcctggagcttcgtggcttcaagaataagctgtacgtggccgtggtcggggacaaagtgcagctctacaagaatctagaggagtaccacctgggcattggcatcaccttcatcgacatgagcgtgggcaacgtgaaggaagtggaccggcgcagcttcgacctcaccacgccctaccgcatcttcagcttctctgctgactcagagctagagaaggagcagtggttggaggccatgcagggagccatcgctgaggccctgtctacctcggaggtggccgagcgcatctgggctgcagcccccaacaggttctgtgctgactgcggggctcctcagcctgactgggcctccatcaacctctgtgttgttatctgcaagcgctgtgcaggggagcaccgtggcctgggcgctggcgtctccaaggtgcggagcctgaagatggacaggaaggtgtggacagaaacacttatcgagctcttcttacagctggggaatggcgctgggaaccgcttctgggcagccaacgtgccccccagtgaggccctgcagcccagcagcagccccagcacccggcggtgccacctggaggccaagtaccgtgagggcaagtaccgccgctaccacccgctctttggcaaccaggaggagctggacaaggccctgtgtgctgcagtcaccaccacagacctggctgagacccaggcgctcctgggctgtggggctgggatcaactgcttctcgggggaccctgaggcccccacgcccctggctcttgcagagcaggcggggcagacgctgcagatggaattccttcggaacaaccggaccacagaggtgcctcggctggactcgatgaagcccctggaaaagcactactcagttgtcctgccgaccgtgagccacagtggcttcctctacaagactgcctctgccggcaagctgctacaggaccgccgggcccgggaagagttcagccggcgctggtgtgtccttggtgacggggtcctgagctactttgagaatgagcgggcagtgacccccaatggagagattcgggccagcgagattgtgtgcctggcagtgccccctcctgacacccatggctttgagcacacctttgaggtgtacacggagggagaacggctgtacctgtttgggctggagagtgcggagcaggctcatgagtgggtcaagtgtattgctaaggcattcgtgcctcccctagccgaggatctgctggcccgggattttgagcggctgggacgcctaccctacaaagctggcctgagcctacagcgggcccaggagggctggttctctctcagtggctcggagctccgtgctgtcttcccggaggggccctgcgaagagccgctgcaactacggaaactgcaggagctttccatccagggggacagtgagaaccaggtgctggtgctggtggagcgaaggaggacactgtacatacagggcgagcggcggctggacttcatgggttggctgggggccatccagaaagcagccgccagcatgggggacacgctgtcggagcagcagcttggggactcggatatcccggtgatcgtgtaccgctgtgtggactacatcacgcagtgcggcctgacctccgagggcatctaccgcaagtgtgggcagacatcgaagacacagcggctgctggagagcctgcggcaggatgcgcgctctgtgcacctcaaggagggcgagcagcacgtggatgatgtttcctcggcgctcaagcgcttcctgcgcgacctgcctgatgggctcttcactcgcgcccagcgcctaacctggctggaggcctcagagattgaggacgaggaggagaaggtctccaggtaccgagagctgctggtgcggctgccccctgtcaaccgggccacagtgaaggcccttatcagccacctgtactgtgttcagtgcttctcagacacgaaccagatgaacgtgcacaacctggcaattgtgtttgggcccacgctcttccagacagatgggcaggactacaaggctggccgtgtggtggaagacctcattaaccactatgtggtggtgtttagtgtggatgaggaagagctcaggaagcagcgggaggagatcactgccattgtgaagatgcgcgtggctggcactgccagtgggacccagcatgccggtgacttcatctgcacagtgtatctggaagagaagaaggcagagactgagcagcatatcaaggtcccagcatccatgactgctgaggagctcaccctggagatcctggatcgccggaacgtgggcatcagggagaaggactattggacctgctttgaggtcaacgagagggaggaggcagagcgccccctgcactttgcggagaaggtgctgcccatcctgcacgggctgggcacggacagccacctggtggtgaagaagcaccaggccatggaggccatgctgctgtacctggccagccgtgtcggtgacaccaagcatggcatgatgaagttccgtgaggaccgcagcctcctgggcctgggcctgccctcaggtggcttccacgatcgctacttcatcctcaacagcagctgcttgcggctctacaaggaggtccggagtcaccggcctgagaaggagtggcctattaagagtctcaaagtctacctgggagtgaagaagaaactcaggccacccacctgctggggcttcacagtggtgcatgagacagagaaacatgagaagcagcagtggtacctctgctgtgacacacagatggagctccgggagtggttcgctacctttctgtttgtgcagcatgacggcctggtgtggccctcagagccctcacgcgtgtcccgggcagtgcctgaggtccggctgggtagtgtgtcactgatcccccttcgaggtagtgaaaatgaaatgcgccggagtgtggctgccttcaccgcggaccctctgtctcttctgcgcaacgtctgagcacaggagcccatccttggctctaggattccgccgctggaagccttctgttcagacaccccttatgctccaaggcctgatgtgagccagcggggggtgcatgggaaactgcaccccacaacccacatcctccatcctgactgcagcatggggttccccggcaggggtgggaggcagcaggggtcagcctgggcaggaacctctcccaactctgtccaggtgttcagacctcttggcccaacctgctcaccccaccgggttcactgtccttgtggggctggagagatgggcataagtcaggaacttgggaggaccaccaccctttcagaggcgtgaggccctggggccctgccggaagggagccccctgctcctcccaacaaactccagaacagcagaaagcgggtgctgtagaggagcactcagctcacggggagggagctcttggctgagcttctacagggctgagagctgcgctttggggacttcagccttccttccagtctgggctgagtggggggtccagactacctgatgccccttccccaatttggggactttttgataatataaatatatctgtatattttacccta

SEQ ID NO: 2342 - DNA, 4778 bp, Homo sapiens
  source 1..4778: mol_type = unassigned DNA
gcctgtcagggtgttgtgggggtgcccagctgcctgtcagaccctgaggactaccagacagagagtgggcagccatttcccgggaggcttccccttcccccacctcactctcttgccatacgggggtcaggagtcacgtgtagccacagcgctctgggccaggggtcggggctctggtgtggctcccccaggccctggctgtatgtgggtgggcatgtggcctccccccaccctgtgtgttaggaactcgtgtcctgtcccggagtgtctgtctctgtttcacttcttgtgttcccgtgtctgtctgtcttgcatccctagcccgcagtctttttctctgtccctttatctttctgtttttgtctgtgtcctaggtcggtttctgccactggctctcctgtccctgtgatctgggtctctgtgtggtctccgctggcagggggaggggagtgtgaggaaacagaactaaaagtgctgggctgtgtgggtcggggctgtgtggacagagggggcgtggcagccccgggtgggtgtgatctgtggcttgaagggaaggatgacgctgagtgggtctcgggggcaggaggagcccccaccgagccgagtcccacgggccgtgcgcgtggccagtctgctgagcgagggagaggaactgtctggggacgaccaaggggatgaggaagaggatgaccacgcctatgagggcgtccccaatggcggatggcataccagcagcctgagcttgtccttgcccagcacaatagctgcgccacaccccatggacgggccgcctgggggctccacccccgtcacaccagtcatcaaggctggctggctggacaagaacccaccgcagggatcttacatctatcagaaacgatgggtgagactggatactgatcacctgcgatactttgacagtaacaaggacgcttactctaagcgctttatctctgtggcctgcatctcccacgtggctgccatcggggaccagaagtttgaagtgatcacaaacaaccgaacctttgccttccgggcagagagtgatgtggagcggaaggagtggatgcaggccctgcagcaggccatggctgagcagcgtgcccgggcccggctctctagcgcttatctgctgggagttccaggctcagagcagcctgaccgcgctggcagcctggagcttcgtggcttcaagaataagctgtacgtggccgtggtcggggacaaagtgcagctctacaagaatctagaggagtaccacctgggcattggcatcaccttcatcgacatgagcgtgggcaacgtgaaggaagtggaccggcgcagcttcgacctcaccacgccctaccgcatcttcagcttctctgctgactcagagctagagaaggagcagtggttggaggccatgcagggagccatcgctgaggccctgtctacctcggaggtggccgagcgcatctgggctgcagcccccaacaggttctgtgctgactgcggggctcctcagcctgactgggcctccatcaacctctgtgttgttatctgcaagcgctgtgcaggggagcaccgtggcctgggcgctggcgtctccaaggtgcggagcctgaagatggacaggaaggtgtggacagaaacacttatcgagctcttcttacagctggggaatggcgctgggaaccgcttctgggcagccaacgtgccccccagtgaggccctgcagcccagcagcagccccagcacccggcggtgccacctggaggccaagtaccgtgagggcaagtaccgccgctaccacccgctctttggcaaccaggaggagctggacaaggccctgtgtgctgcagtcaccaccacagacctggctgagacccaggcgctcctgggctgtggggctgggatcaactgcttctcgggggaccctgaggcccccacgcccctggctcttgcagagcaggcggggcagacgctgcagatggaattccttcggaacaaccggaccacagaggtgcctcggctggactcgatgaagcccctggaaaagcactactcagttgtcctgccgaccgtgagccacagtggcttcctctacaagactgcctctgccggcaagctgctacaggaccgccgggcccgggaagagttcagccggcgctggtgtgtccttggtgacggggtcctgagctactttgagaatgagcgggcagtgacccccaatggagagattcgggccagcgagattgtgtgcctggcagtgccccctcctgacacccatggctttgagcacacctttgaggtgtacacggagggagaacggctgtacctgtttgggctggagagtgcggagcaggctcatgagtgggtcaagtgtattgctaaggcattcgtgcctcccctagccgaggatctgctggcccgggattttgagcggctgggacgcctaccctacaaagctggcctgagcctacagcgggcccaggagggctggttctctctcagtggctcggagctccgtgctgtcttcccggaggggccctgcgaagagccgctgcaactacggaaactgcaggagctttccatccagggggacagtgagaaccaggtgctggtgctggtggagcgaaggaggacactgtacatacagggcgagcggcggctggacttcatgggttggctgggggccatccagaaagcagccgccagcatgggggacacgctgtcggagcagcagcttggggactcggatatcccggtgatcgtgtaccgctgtgtggactacatcacgcagtgcggcctgacctccgagggcatctaccgcaagtgtgggcagacatcgaagacacagcggctgctggagagcctgcggcaggatgcgcgctctgtgcacctcaaggagggcgagcagcacgtggatgatgtttcctcggcgctcaagcgcttcctgcgcgacctgcctgatgggctcttcactcgcgcccagcgcctaacctggctggaggcctcagagattgaggacgaggaggagaaggtctccaggtaccgagagctgctggtgcggctgccccctgtcaaccgggccacagtgaaggcccttatcagccacctgtactgtgttcagtgcttctcagacacgaaccagatgaacgtgcacaacctggcaattgtgtttgggcccacgctcttccagacagatgggcaggactacaaggctggccgtgtggtggaagacctcattaaccactatgtggtggtgtttagtgtggatgaggaagagctcaggaagcagcgggaggagatcactgccattgtgaagatgcgcgtggctggcactgccagtgggacccagcatgccggtgacttcatctgcacagtgtatctggaagagaagaaggcagagactgagcagcatatcaaggtcccagcatccatgactgctgaggagctcaccctggagatcctggatcgccggaacgtgggcatcagggagaaggactattggacctgctttgaggtcaacgagagggaggaggcagagcgccccctgcactttgcggagaaggtgctgcccatcctgcacgggctgggcacggacagccacctggtggtgaagaagcaccaggccatggaggccatgctgctgtacctggccagccgtgtcggtgacaccaagcatggcatgatgaagttccgtgaggaccgcagcctcctgggcctgggcctgccctcaggtggcttccacgatcgctacttcatcctcaacagcagctgcttgcggctctacaaggaggtccggagccagaggccgtggagcggggcccctgagaccagtcaccggcctgagaaggagtggcctattaagagtctcaaagtctacctgggagtgaagaagaaactcaggccacccacctgctggggcttcacagtggtgcatgagacagagaaacatgagaagcagcagtggtacctctgctgtgacacacagatggagctccgggagtggttcgctacctttctgtttgtgcagcatgacggcctggtgtggccctcagagccctcacgcgtgtcccgggcagtgcctgaggtccggctgggtagtgtgtcactgatcccccttcgaggtagtgaaaatgaaatgcgccggagtgtggctgccttcaccgcggaccctctgtctcttctgcgcaacgtctgagcacaggagcccatccttggctctaggattccgccgctggaagccttctgttcagacaccccttatgctccaaggcctgatgtgagccagcggggggtgcatgggaaactgcaccccacaacccacatcctccatcctgactgcagcatggggttccccggcaggggtgggaggcagcaggggtcagcctgggcaggaacctctcccaactctgtccaggtgttcagacctcttggcccaacctgctcaccccaccgggttcactgtccttgtggggctggagagatgggcataagtcaggaacttgggaggaccaccaccctttcagaggcgtgaggccctggggccctgccggaagggagccccctgctcctcccaacaaactccagaacagcagaaagcgggtgctgtagaggagcactcagctcacggggagggagctcttggctgagcttctacagggctgagagctgcgctttggggacttcagccttccttccagtctgggctgagtggggggtccagactacctgatgccccttccccaatttggggactttttgataatataaatatatctgtatatttt

SEQ ID NO: 2343 - DNA, 5145 bp, Homo sapiens
  source 1..5145: mol_type = unassigned DNA
aatttggcggtggcggtgtaagtcggtggcggcgccggtacgcctggtccccgcgtggagtctttactcaaaacagctcccgcctcaggccgagatgaggagcccttcagaatagctgctgtctctgggaggacccgggcgtccttggcagcccagctgctctggacaaagccctgccagtcaggcctccgctggcaggaaccatggcagaggctggggatgctgcgctatcggtggccgagtggctgcgggcattgcacctggagcagtacacggggctctttgagcagcatggcctggtgtgggccactgagtgccaaggcctcagcgacacccgcctgatggacatgggcatgctactccctggtcaccgccgccgcatcctggctggcctgctccgtgcccatacctcaccggcccctgcaccccgccccaccccacggcctgtgcccatgaagcgccacatcttccgctcaccacctgtgcctgccactccacccgagccgctgcccaccactacagaggatgaggggctccccgctgccccacccatcccgccccggaggagctgccttccgcccacctgcttcaccaccccatccacagctgccccagaccctgtgctgcccccgctgcctgctaagcggcatttggcagagctgagcgttccacccgtgccgccccgcaccggacccccccgcctgctggtgagcctgcccactaaggaggaggagtcattgctgccatcattatcatcccctccccagccacagtctgaggagcccctgtccaccctcccccaggggcctccccagcctccctctccacctccctgccccccggagatacctccaaagccggtacgcctgttcccagagttcgatgactctgactacgatgaggtcccagaggaggggccgggggccccagccagagtgatgaccaagaaggaggagcccccaccgagccgagtcccacgggccgtgcgcgtggccagtctgctgagcgagggagaggaactgtctggggacgaccaaggggatgaggaagaggatgaccacgcctatgagggcgtccccaatggcggatggcataccagcagcctgagcttgtccttgcccagcacaatagctgcgccacaccccatggacgggccgcctgggggctccacccccgtcacaccagtcatcaaggctggctggctggacaagaacccaccgcagggatcttacatctatcagaaacgatgggtgagactggatactgatcacctgcgatactttgacagtaacaaggacgcttactctaagcgctttatctctgtggcctgcatctcccacgtggctgccatcggggaccagaagtttgaagtgatcacaaacaaccgaacctttgccttccgggcagagagtgatgtggagcggaaggagtggatgcaggccctgcagcaggccatggctgagcagcgtgcccgggcccggctctctagcgcttatctgctgggagttccaggctcagagcagcctgaccgcgctggcagcctggagcttcgtggcttcaagaataagctgtacgtggccgtggtcggggacaaagtgcagctctacaagaatctagaggagtaccacctgggcattggcatcaccttcatcgacatgagcgtgggcaacgtgaaggaagtggaccggcgcagcttcgacctcaccacgccctaccgcatcttcagcttctctgctgactcagagctagagaaggagcagtggttggaggccatgcagggagccatcgctgaggccctgtctacctcggaggtggccgagcgcatctgggctgcagcccccaacaggttctgtgctgactgcggggctcctcagcctgactgggcctccatcaacctctgtgttgttatctgcaagcgctgtgcaggggagcaccgtggcctgggcgctggcgtctccaaggtgcggagcctgaagatggacaggaaggtgtggacagaaacacttatcgagctcttcttacagctggggaatggcgctgggaaccgcttctgggcagccaacgtgccccccagtgaggccctgcagcccagcagcagccccagcacccggcggtgccacctggaggccaagtaccgtgagggcaagtaccgccgctaccacccgctctttggcaaccaggaggagctggacaaggccctgtgtgctgcagtcaccaccacagacctggctgagacccaggcgctcctgggctgtggggctgggatcaactgcttctcgggggaccctgaggcccccacgcccctggctcttgcagagcaggcggggcagacgctgcagatggaattccttcggaacaaccggaccacagaggtgcctcggctggactcgatgaagcccctggaaaagcactactcagttgtcctgccgaccgtgagccacagtggcttcctctacaagactgcctctgccggcaagctgctacaggaccgccgggcccgggaagagttcagccggcgctggtgtgtccttggtgacggggtcctgagctactttgagaatgagcgggcagtgacccccaatggagagattcgggccagcgagattgtgtgcctggcagtgccccctcctgacacccatggctttgagcacacctttgaggtgtacacggagggagaacggctgtacctgtttgggctggagagtgcggagcaggctcatgagtgggtcaagtgtattgctaaggcattcgtgcctcccctagccgaggatctgctggcccgggattttgagcggctgggacgcctaccctacaaagctggcctgagcctacagcgggcccaggagggctggttctctctcagtggctcggagctccgtgctgtcttcccggaggggccctgcgaagagccgctgcaactacggaaactgcaggagctttccatccagggggacagtgagaaccaggtgctggtgctggtggagcgaaggaggacactgtacatacagggcgagcggcggctggacttcatgggttggctgggggccatccagaaagcagccgccagcatgggggacacgctgtcggagcagcagcttggggactcggatatcccggtgatcgtgtaccgctgtgtggactacatcacgcagtgcggcctgacctccgagggcatctaccgcaagtgtgggcagacatcgaagacacagcggctgctggagagcctgcggcaggatgcgcgctctgtgcacctcaaggagggcgagcagcacgtggatgatgtttcctcggcgctcaagcgcttcctgcgcgacctgcctgatgggctcttcactcgcgcccagcgcctaacctggctggaggcctcagagattgaggacgaggaggagaaggtctccaggtaccgagagctgctggtgcggctgccccctgtcaaccgggccacagtgaaggcccttatcagccacctgtactgtgttcagtgcttctcagacacgaaccagatgaacgtgcacaacctggcaattgtgtttgggcccacgctcttccagacagatgggcaggactacaaggctggccgtgtggtggaagacctcattaaccactatgtggtggtgtttagtgtggatgaggaagagctcaggaagcagcgggaggagatcactgccattgtgaagatgcgcgtggctggcactgccagtgggacccagcatgccggtgacttcatctgcacagtgtatctggaagagaagaaggcagagactgagcagcatatcaaggtcccagcatccatgactgctgaggagctcaccctggagatcctggatcgccggaacgtgggcatcagggagaaggactattggacctgctttgaggtcaacgagagggaggaggcagagcgccccctgcactttgcggagaaggtgctgcccatcctgcacgggctgggcacggacagccacctggtggtgaagaagcaccaggccatggaggccatgctgctgtacctggccagccgtgtcggtgacaccaagcatggcatgatgaagttccgtgaggaccgcagcctcctgggcctgggcctgccctcaggtggcttccacgatcgctacttcatcctcaacagcagctgcttgcggctctacaaggaggtccggagccagaggccgtggagcggggcccctgagaccagtcaccggcctgagaaggagtggcctattaagagtctcaaagtctacctgggagtgaagaagaaactcaggccacccacctgctggggcttcacagtggtgcatgagacagagaaacatgagaagcagcagtggtacctctgctgtgacacacagatggagctccgggagtggttcgctacctttctgtttgtgcagcatgacggcctggtgtggccctcagagccctcacgcgtgtcccgggcagtgcctgaggtccggctgggtagtgtgtcactgatcccccttcgaggtagtgaaaatgaaatgcgccggagtgtggctgccttcaccgcggaccctctgtctcttctgcgcaacgtctgagcacaggagcccatccttggctctaggattccgccgctggaagccttctgttcagacaccccttatgctccaaggcctgatgtgagccagcggggggtgcatgggaaactgcaccccacaacccacatcctccatcctgactgcagcatggggttccccggcaggggtgggaggcagcaggggtcagcctgggcaggaacctctcccaactctgtccaggtgttcagacctcttggcccaacctgctcaccccaccgggttcactgtccttgtggggctggagagatgggcataagtcaggaacttgggaggaccaccaccctttcagaggcgtgaggccctggggccctgccggaagggagccccctgctcctcccaacaaactccagaacagcagaaagcgggtgctgtagaggagcactcagctcacggggagggagctcttggctgagcttctacagggctgagagctgcgctttggggacttcagccttccttccagtctgggctgagtggggggtccagactacctgatgccccttccccaatttggggactttttgataatataaatatatctgtatatttt

SEQ ID NO: 2344 - DNA, 3883 bp, Homo sapiens
  source 1..3883: mol_type = unassigned DNA
acctccaagagaacgcagcctcagacccacccaggggccaggggccaggctgtttgcgagaccagcccaggcgggacccaggcttgcacgggcaggtacacgacattcttgggcatacgcagcccgcctggccggagctgtgggagtcctcagccccaagacccagcaggcgtctgaggcctgcccactaaggaggaggagtcattgctgccatcattatcatcccctccccagccacagtctgaggagcccctgtccaccctcccccaggggcctccccagcctccctctccacctccctgccccccggagatacctccaaagccggtacgcctgttcccagagttcgatgactctgactacgatgaggtcccagaggaggggccgggggccccagccagagtgatgaccaagaaggaggagcccccaccgagccgagtcccacgggccgtgcgcgtggccagtctgctgagcgagggagaggaactgtctggggacgaccaaggggatgaggaagaggatgaccacgcctatgagggcgtccccaatggcggatggcataccagcagcctgagcttgtccttgcccagcacaatagctgcgccacaccccatggacgggccgcctgggggctccacccccgtcacaccagtcatcaaggctggctggctggacaagaacccaccgcagggatcttacatctatcagaaacgatgggtgagactggatactgatcacctgcgatactttgacagtaacaaggacgcttactctaagcgctttatctctgtggcctgcatctcccacgtggctgccatcggggaccagaagtttgaagtgatcacaaacaaccgaacctttgccttccgggcagagagtgatgtggagcggaaggagtggatgcaggccctgcagcaggccatggctgagcagcgtgcccgggcccggctctctagcgcttatctgctgggagttccaggctcagagcagcctgaccgcgctggcagcctggagcttcgtggcttcaagaataagctgtacgtggccgtggtcggggacaaagtgcagctctacaagaatctagaggagtaccacctgggcattggcatcaccttcatcgacatgagcgtgggcaacgtgaaggaagtggaccggcgcagcttcgacctcaccacgccctaccgcatcttcagcttctctgctgactcagagctagagaaggagcagtggttggaggccatgcagggagccatcgctgaggccctgtctacctcggaggtggccgagcgcatctgggctgcagcccccaacaggttctgtgctgactgcggggctcctcagcctgactgggcctccatcaacctctgtgttgttatctgcaagcgctgtgcaggggagcaccgtggcctgggcgctggcgtctccaaggtgcggagcctgaagatggacaggaaggtgtggacagaaacacttatcgaggccctgtgtgctgcagtcaccaccacagacctggctgagacccaggcgctcctgggctgtggggctgggatcaactgcttctcgggggaccctgaggcccccacgcccctggctcttgcagagcaggcggggcagacgctgcagatggaattccttcggaacaaccggaccacagaggtgcctcggctggactcgatgaagcccctggaaaagcactactcagttgtcctgccgaccgtgagccacagtggcttcctctacaagactgcctctgccggcaagctgctacaggaccgccgggcccgggaagagttcagccggcgctggtgtgtccttggtgacggggtcctgagctactttgagaatgagcgggcagtgacccccaatggagagattcgggccagcgagattgtgtgcctggcagtgccccctcctgacacccatggctttgagcacacctttgaggtgtacacggagggagaacggctgtacctgtttgggctggagagtgcggagcaggctcatgagtgggtcaagtgtattgctaaggcattcgtgcctcccctagccgaggatctgctggcccgggattttgagcggctgggacgcctaccctacaaagctggcctgagcctacagcgggcccaggagggctggttctctctcagtggctcggagctccgtgctgtcttcccggaggggccctgcgaagagccgctgcaactacggaaactgcaggagctttccatccagggggacagtgagaaccaggtgctggtgctggtggagcgaaggaggacactgtacatacagggcgagcggcggctggacttcatgggttggctgggggccatccagaaagcagccgccagcatgggggacacgctgtcggagcagcagcttggggactcggatatcccggtgatcgtgtaccgctgtgtggactacatcacgcagtgcggcctgacctccgagggcatctaccgcaagtgtgggcagacatcgaagacacagcggctgctggagagcctgcggcaggatgcgcgctctgtgcacctcaaggagggcgagcagcacgtggatgatgtttcctcggcgctcaagcgcttcctgcgcgacctgcctgatgggctcttcactcgcgcccagcgcctaacctggctggaggcctcagagattgaggacgaggaggagaaggtctccaggtaccgagagctgctggtgcggctgccccctgtcaaccgggccacagtgaaggcccttatcagccacctgtactgtgttcagtgcttctcagacacgaaccagatgaacgtgcacaacctggcaattgtgtttgggcccacgctcttccagacagatgggcaggactacaaggctggccgtgtggtggaagacctcattaaccactatgtggtggtgtttagtgtggatgaggaagagctcaggaagcagcgggaggagatcactgccattgtgaagatgcgcgtggctggcactgccagtgggacccagcatgccggtgacttcatctgcacagtgtatctggaagagaagaaggcagagactgagcagcatatcaaggtcccagcatccatgactgctgaggagctcaccctggagatcctggatcgccggaacgtgggcatcagggagaaggactattggacctgctttgaggtcaacgagagggaggaggcagagcgccccctgcactttgcggagaaggtgctgcccatcctgcacgggctgggcacggacagccacctggtggtgaagaagcaccaggccatggaggccatgctgctgtacctggccagccgtgtcggtgacaccaagcatggcatgatgaagttccgtgaggaccgcagcctcctgggcctgggcctgccctcaggtggcttccacgatcgctacttcatcctcaacagcagctgcttgcggctctacaaggaggtccggagtcaccggcctgagaaggagtggcctattaagagtctcaaagtctacctgggagtgaagaagaaactcaggccacccacctgctggggcttcacagtggtgcatgagacagagaaacatgagaagcagcagtggtacctctgctgtgacacacagatggagctccgggagtggttcgctacctttctgtttgtgcagcatgacggcctggtgtggccctcagagccctcacgcgtgtcccgggcagtgcctgaggtccggctgggtagtgtgtcactgatcccccttcgaggtagtgaaaatgaaatgcgccggagtgtggctgccttcaccgcggaccctctgtctcttctgcgcaacgtctgagcacaggagcccatccttggctctaggattccgccgctggaagccttctgttcagacaccccttatgctccaaggc

SEQ ID NO: 2345 - DNA, 4914 bp, Homo sapiens
  source 1..4914: mol_type = unassigned DNA
atggcagaggctggggatgctgcgctatcggtggccgagtggctgcgggcattgcacctggagcagtacacggggctctttgagcagcatggcctggtgtgggccactgagtgccaaggcctcagcgacacccgcctgatggacatgggcatgctactccctggtcaccgccgccgcatcctggctggcctgctccgtgcccatacctcaccggcccctgcaccccgccccaccccacggcctgtgcccatgaagcgccacatcttccgctcaccacctgtgcctgccactccacccgagccgctgcccaccactacagaggatgaggggctccccgctgccccacccatcccgccccggaggagctgccttccgcccacctgcttcaccaccccatccacagctgccccagaccctgtgctgcccccgctgcctgctaagcggcatttggcagagctgagcgttccacccgtgccgccccgcaccggacccccccgcctgctggtgagcctgcccactaaggaggaggagtcattgctgccatcattatcatcccctccccagccacagtctgaggagcccctgtccaccctcccccaggggcctccccagcctccctctccacctccctgccccccggagatacctccaaagccggtacgcctgttcccagagttcgatgactctgactacgatgaggtcccagaggaggggccgggggccccagccagagtgatgaccaagaaggaggagcccccaccgagccgagtcccacgggccgtgcgcgtggccagtctgctgagcgagggagaggaactgtctggggacgaccaaggggatgaggaagaggatgaccacgcctatgagggcgtccccaatggcggatggcataccagcagcctgagcttgtccttgcccagcacaatagctgcgccacaccccatggacgggccgcctgggggctccacccccgtcacaccagtcatcaaggctggctggctggacaagaacccaccgcagggatcttacatctatcagaaacgatgggtgagactggatactgatcacctgcgatactttgacagtaacaaggacgcttactctaagcgctttatctctgtggcctgcatctcccacgtggctgccatcggggaccagaagtttgaagtgatcacaaacaaccgaacctttgccttccgggcagagagtgatgtggagcggaaggagtggatgcaggccctgcagcaggccatggctgagcagcgtgcccgggcccggctctctagcgcttatctgctgggagttccaggctcagagcagcctgaccgcgctggcagcctggagcttcgtggcttcaagaataagctgtacgtggccgtggtcggggacaaagtgcagctctacaagaatctagaggagtaccacctgggcattggcatcaccttcatcgacatgagcgtgggcaacgtgaaggaagtggaccggcgcagcttcgacctcaccacgccctaccgcatcttcagcttctctgctgactcagagctagagaaggagcagtggttggaggccatgcagggagccatcgctgaggccctgtctacctcggaggtggccgagcgcatctgggctgcagcccccaacaggttctgtgctgactgcggggctcctcagcctgactgggcctccatcaacctctgtgttgttatctgcaagcgctgtgcaggggagcaccgtggcctgggcgctggcgtctccaaggtgcggagcctgaagatggacaggaaggtgtggacagaaacacttatcgagctcttcttacagctggggaatggcgctgggaaccgcttctgggcagccaacgtgccccccagtgaggccctgcagcccagcagcagccccagcacccggcggtgccacctggaggccaagtaccgtgagggcaagtaccgccgctaccacccgctctttggcaaccaggaggagctggacaaggccctgtgtgctgcagtcaccaccacagacctggctgagacccaggcgctcctgggctgtggggctgggatcaactgcttctcgggggaccctgaggcccccacgcccctggctcttgcagagcaggcggggcagacgctgcagatggaattccttcggaacaaccggaccacagaggtgcctcggctggactcgatgaagcccctggaaaagcactactcagttgtcctgccgaccgtgagccacagtggcttcctctacaagactgcctctgccggcaagctgctacaggaccgccgggcccgggaagagttcagccggcgctggtgtgtccttggtgacggggtcctgagctactttgagaatgagcgggcagtgacccccaatggagagattcgggccagcgagattgtgtgcctggcagtgccccctcctgacacccatggctttgagcacacctttgaggtgtacacggagggagaacggctgtacctgtttgggctggagagtgcggagcaggctcatgagtgggtcaagtgtattgctaaggcattcgtgcctcccctagccgaggatctgctggcccgggattttgagcggctgggacgcctaccctacaaagctggcctgagcctacagcgggcccaggagggctggttctctctcagtggctcggagctccgtgctgtcttcccggaggggccctgcgaagagccgctgcaactacggaaactgcaggagctttccatccagggggacagtgagaaccaggtgctggtgctggtggagcgaaggaggacactgtacatacagggcgagcggcggctggacttcatgggttggctgggggccatccagaaagcagccgccagcatgggggacacgctgtcggagcagcagcttggggactcggatatcccggtgatcgtgtaccgctgtgtggactacatcacgcagtgcggcctgacctccgagggcatctaccgcaagtgtgggcagacatcgaagacacagcggctgctggagagcctgcggcaggatgcgcgctctgtgcacctcaaggagggcgagcagcacgtggatgatgtttcctcggcgctcaagcgcttcctgcgcgacctgcctgatgggctcttcactcgcgcccagcgcctaacctggctggaggcctcagagattgaggacgaggaggagaaggtctccaggtaccgagagctgctggtgcggctgccccctgtcaaccgggccacagtgaaggcccttatcagccacctgtactgtgttcagtgcttctcagacacgaaccagatgaacgtgcacaacctggcaattgtgtttgggcccacgctcttccagacagatgggcaggactacaaggctggccgtgtggtggaagacctcattaaccactatgtggtggtgtttagtgtggatgaggaagagctcaggaagcagcgggaggagatcactgccattgtgaagatgcgcgtggctggcactgccagtgggacccagcatgccggtgacttcatctgcacagtgtatctggaagagaagaaggcagagactgagcagcatatcaaggtcccagcatccatgactgctgaggagctcaccctggagatcctggatcgccggaacgtgggcatcagggagaaggactattggacctgctttgaggtcaacgagagggaggaggcagagcgccccctgcactttgcggagaaggtgctgcccatcctgcacgggctgggcacggacagccacctggtggtgaagaagcaccaggccatggaggccatgctgctgtacctggccagccgtgtcggtgacaccaagcatggcatgatgaagttccgtgaggaccgcagcctcctgggcctgggcctgccctcaggtggcttccacgatcgctacttcatcctcaacagcagctgcttgcggctctacaaggaggtccggagtcaccggcctgagaaggagtggcctattaagagtctcaaagtctacctgggagtgaagaagaaactcaggccacccacctgctggggcttcacagtggtgcatgagacagagaaacatgagaagcagcagtggtacctctgctgtgacacacagatggagctccgggagtggttcgctacctttctgtttgtgcagcatgacggcctggtgtggccctcagagccctcacgcgtgtcccgggcagtgcctgaggtccggctgggtagtgtgtcactgatcccccttcgaggtagtgaaaatgaaatgcgccggagtgtggctgccttcaccgcggaccctctgtctcttctgcgcaacgtctgagcacaggagcccatccttggctctaggattccgccgctggaagccttctgttcagacaccccttatgctccaaggcctgatgtgagccagcggggggtgcatgggaaactgcaccccacaacccacatcctccatcctgactgcagcatggggttccccggcaggggtgggaggcagcaggggtcagcctgggcaggaacctctcccaactctgtccaggtgttcagacctcttggcccaacctgctcaccccaccgggttcactgtccttgtggggctggagagatgggcataagtcaggaacttgggaggaccaccaccctttcagaggcgtgaggccctggggccctgccggaagggagccccctgctcctcccaacaaactccagaacagcagaaagcgggtgctgtagaggagcactcagctcacggggagggagctcttggctgagcttctacagggctgagagctgcgctttggggacttcagccttccttccagtctgggctgagtggggggtccagactacctgatgccccttccccaatttggggactttttgataatataaatatatctgtatattttaccct

SEQ ID NO: 2346 - DNA, 7514 bp, Homo sapiens
  source 1..7514: mol_type = unassigned DNA
agcggcggccgaggcgaggcgcgggagcacctgagcaaggcgcgggcgccgggctcggcgtttccggagctgagcgcgggtccgcggcccgcgctccccgcctccaggtgcggcggccgcgacacgccggccccactaacagcgccgcccgcgcggccgccgccaggcagcagaggcgactgcggacagccggcggggaccgggaaagaggaggcctggcgcctccggcagaggggcgaggaccgagcgcccaaggctgggagagacgccggcgctgagcttcccagcgccgcctcacctcgcttttcgaactccgcgacccgagcgcaaggcttaagcaggtaaagcagtcactgtgaagaaaataacattttaagaaacttttctgtcacaattgatagaggaaaagccagtagagaagtacatcttcttgtgtgtgtgtctcatcgtgccactttttgtaactcagcttagtaatgaagccaccattatgtcctcagtcagtgaagtaaatgtggatataaaagatttcctaatgagcattaatttggagcagtatctcttacatttccatgagtctggttttactactgtgaaggactgtgcagcaataaatgacagcctgctgcagaaaattggaatatcacctacaggtcaccgtaggaggatacttaaacagttacagataatcttgtcaaaaatgcaagatattccaatatatgcaaatgttcataaaactaagaagaatgatgacccttcaaaggattaccatgttccatcttctgatcagaatatctgcatagaactttccaattctggtagtgttcagacatctagcccaccgcagttggagactgttagaaaaaatcttgaagacagtgatgcaagtgtggaaagaagccagtatcctcaatcagatgataagctgtctcctcctaaacgcgacttccccactgcagaggaaccacacctgaatttgggttctttgaatgattctttatttggtagtgacaatattaaaatagaatcattgattacaaagaagactgtggatcacacagttgaagaacaacaaacagaaaaagttaaattgatcacagaaaatctcagtaagctccctaatgcagactctgaatgcctttcttttgttggctgttcaacatcaggaacaaattctggaaatggaacaaatggtttattagaaggatcaccaccatccccattctttaagtttcaaggagaaatgattgtaaatgacttgtatgttccatcatcaccaatcctagcacctgtgagaagtcgtagcaagttggtttcaagaccatctcgatcttttctgctaagacatcgacctgtaccagagattccagggtcaacaaaaggagtttctgggagctatttccgtgaaagaagaaatgttgctacctcaactgaaaaatctgtggcatggcaaaattcaaatgaggagaattcatcttccatctttccttatggagagacctttctcttccagagactagaaaattccaagaagcgatctataaagaatgaatttttgacccagggagaagcactcaaaggggaagcagctactgcaacaaactcttttatcatcaaatcaagcatatacgataacagaaaggagaaaataagcgaggacaaggtggaagatatttggatacctcgagaggacaaaaacaattttttgatagacactgcttctgaatcagaatactcaacagtagaagaatgctttcagagtttaagaagaaaaaattcaaaggcatctaaatctaggactcaaaaagccttgattttggactccgttaataggcacagttatccgttaagctcaacaagtggaaatgctgattcatcagccgtttcttcacaggcaatatctccctatgcctgcttttatggagcatctgcaaagaaggttaaatcaggatggctggataaactctctcctcaaggaaaacgcatgtttcaaaagagatgggtgaaatttgatggccttagcatttcttactacaataatgagaaggagatgtattcgaaaggaataattcccctttctgctatatcaacagtacgagttcaaggagacaacaaatttgaagttgttacaacacaaagaacttttgtttttagagtagaaaaagaagaggagagaaatgactggatcagcatactattaaatgcactgaaatcacaatcccttacctcgcagtctcaagctgttgttacacctgagaaatgtggatatcttgaattgagaggctataaggcaaaaatttttactgtgttaagtggaaacagtgtgtggctttgcaaaaacgaacaggattttaagagtggacttggtattaccataattcctatgaatgtagcaaatgtaaagcaagtggaccgaactgtgaaacaatcttttgaaataatcactccctacaggagtttcagctttacagccgagactgaaaaggagaaacaagactggattgaagctgtgcagcaatcaatagcagaaactctctctgattatgaagtagctgagaagatttggttcaatgaatccaacaggagctgtgcagattgtaaagccccagatcctgactgggcatccatcaatctctgtgttgtcatctgtaagaagtgtgcaggacagcatagatctttaggaccaaaagattccaaggttagaagtctaaaaatggatgctagcatttggagcaatgaactcatcgagctttttattgtcattggaaacaaaagagcaaatgacttttgggctggtaatcttcaaaaggatgaagaattacatatggactcaccagtagaaaagagaaaaaactttattactcagaaatataaagaaggaaaattcagaaaaactcttttggcatctctcaccaaagaagaattaaataaggctctatgtgctgctgtagtgaaaccggatgttctagaaacaatggctttgctgttcagtggagcagatgtcatgtgtgccaccggagaccccgtgcatagcaccccctatctgctagccaagaaagctgggcaaagtctgcaaatggaatttctctaccataacaaattctcagatttccctcaacatgatattcattccgagggtgtattaagtcaagagtcttcccagtccacattcctctgtgactttttatatcaagctccttctgctgcttctaaactctcttcagagaaaaaactgcttgaagagacaaataaaaaatggtgtgttttggaaggaggcttcttgagttactatgaaaatgataagtctaccacacctaatggcaccattaatatcaatgaagttatctgcctggctatacacaaagaggacttctatttaaatactgggcccatctttatctttgagatctacttaccctccgaacgtgtgtttttatttggagctgaaacatctcaagctcaaagaaaatggacagaggcaatagccaagcattttgttcccttatttgctgaaaacttaacagaagctgactatgatttgattggtcaactcttctacaaagactgccatgccctggatcagtggagaaaaggctggtttgctatggacaaatccagcttgcatttttgccttcaaatgcaagaagttcagggagatagaatgcacttaagaagactgcaagagctaacaatcagcacaatggttcaaaatggggaaaaactggatgttttactcttggtagaaaaagggagaacattatacatccatgggcataccaagttggatttcacagtctggcatactgcaattgaaaaagcagcaggtacagatggtaatgctttacaagatcagcagctcagcaaaaatgacgttcccattatagtgaacagctgtatagcatttgttacacagtatggtttaggatgcaaatatatctatcaaaagaatggtgatcctttgcatataagtgaactcctggagagtttcaaaaaggatgcaagaagctttaaattgagggctggaaaacatcagcttgaagatgtgacggctgtgttgaaaagttttctctctgacattgatgatgcactgcttactaaggagctctacccatattggatctctgctttagatacgcaagatgacaaggaaagaattaaaaaatatggagcatttatacgttctcttccaggggtcaaccgagcaacactagcagctatcattgaacacctgtatagggttcagaaatgctcagaaatcaatcacatgaatgcccataatttggccttggtcttttcatcctgtttgtttcaaacgaagggacaaactagtgaagaagtgaatgtaattgaggacctaattaataattatgtagaaatatttgaggttaaagaagatcaagtcaaacaaatggacatagaaaatagctttattaccaagtggaaagacacccaagtttcccaggctggagatttgttaattgaagtatatgtagaaaggaaggaacccgactgtagtattataattcggatatctcctgtgatggaagcagaagaattaactaatgatatattagcgataaaaaatattattcctacaaaaggtgatatttgggccacatttgaagtcattgaaaatgaagagctagagcgtcctcttcactacaaggaaaatgtactggagcaggtgcttcggtggagttcattagctgaacctggctctgcttacctggtggtgaagagattcttaaccgctgacacaattaaacactgcagtgaccggagtacactgggaagcatcaaagaaggaatcttgaaaatcaaagaagaaccatccaaaatactatctggaaataagtttcaagaccggtattttgttttacgagatgggtttctctttctttacaaggatgtgaagagtagtaaacatgacaagatgttttctctcagttccatgaagttttatcgtggagtgaaaaagaaaatgaagcctccaacaagctggggattgaccgcatattctgagaaacatcactggcacctgtgttgtgatagttcacgaactcagacggagtggatgaccagtatctttattgcccagcatgaatatgatatatggccaccagctggaaaggaacgaaaacgttcaataaccaaaaatcccaaaattggaggtttgcctctgattcctatacagcatgaggggaatgcaaccttggcccggaaaaatattgagagtgcaagagcagaacttgaaaggctgcggctcagtgaaaagtgtgataaagagtccgtggactctagcttaaaggagagagcttccatggtggcccactgcctggagcacaaggacgataaacttcgaaatcgaccccgaaaacatcggagtttcaactgcctggaggacacagagcctgaagccccacttgggcaaccaaaaggccataaaggcctaaagacattgaggaagactgaggacaggaatagcaaagctactttggactctgatcataagttaccatcaagggtaattgaagaacttaatgtggttctacaacggtcaagaacccttccaaaagaattacaggatgagcagattttgaagtaggaaataaaatgaattgctccccagattatttttttaatattgtatgcaatctttatgtgtaactccaaaactgaactataagataattcataagaatttgcctattgataggcaaatttgtctatgcttaggcatttaaggagcatttaaaaatatgtatatatgtgactgaatgtaagattaactttattttggtctgaacaaaccttgtaaagttccattgtattaacgtgtgtaagaagacattgggttacttaggtggtcagtccttttaaagtagttgtctgttaagtggtataatttatgagcagaaatctcaaactgtactgtattgtataaaatgctgtgtttaaatgaagcctaagaaactatctgtaacatattttgcactttgagaaaccttgtatattaaattaccatatgtttttaggtttacagaagttctaccttagggaaaagaaagggaagtaaattgaaaaaggggggagaatttattgtagtggctgcctaaaaaccactggagtttttaaaagaagcaaggagttaaatgtcctgcaaaacaaggaagtgagctaagattcattctagttcactaatgaccagaacttgtcaatgagaaaccacttgttaagaaaaagtccagtgtttatttctcaagagtaatattcggccaacagatgtaaataatagcactagccactcttattaatatttatagtgttagaaaaccagccacattacagattcactacgtttgagctcattgttggtggctgctaagaggaaacttacactgcattggagaggttgtgtacacaggacctggcctggatgctgattgcactgtcattgtatgcaagcattttgtcttttttcagaatttctgactatacttttggtacgaacaaaattcatcaccacagggtcctgttgttttgtttgatttttagatttttttaaattattattaaggttgtaatgtttttctccgagttgtcagaaataactggaagaatacaatatatggccattatggagccaggggctagttggtggtttactatacatttgggggctacctggtcacatttaatctaggtttttttttctttttttaagtaaaggtgtggtctcttccctgtacttatgaataaggacaaagccctatttttgtttccacataaagatcagctactgaattggtgaatttcctgacagacaatgctatctaaccatagttcatgttaggggaagcatttttccatcagtttctttaaaattggattgtctggtgagttttgatattaaacattatgtagctaagttttttttttttagcatttcttttttatttttcaatctatattcacaggcccatacttcagtcagtccaatcatagtacagtgatgtggtggtagatgctatgaatttcttcattgtaaaatacggatcatttgtattttggggtgataaaatagttcaccatgggtatgagatatttattctttaaatcaaagtaaattagaatttttaaaaagcacaaaactgcaggacagtttatgaaataggtggcactattagggaatcttcctttaaagcaagaaatcatgttatttagaaagaaaaactaatcttaaacatactatttctaataaatatttatatttttatgaaataaagaggtatgtggaaattaatatttggtgatgttggacagtggaaaagtatctagagtttttacctgccttatctgaattcttcttgaaacttgagcttaaactctaatagctgtttccctttctattctgaacaactgtctccatttttcaagtgtgagagataagggctaatgatgacatctcatttattttgagtaaacattaaaattgttttacaagtctacttgaa

SEQ ID NO: 2347 - DNA, 631 bp, Homo sapiens
  source 1..631: mol_type = unassigned DNA
ggatccggatagacagctggacactccctccattcctctcccctacctttaaataagaagaagctgtagtgagtttcaggcaccaagttatttactcggtagagatcatgaatttgcccgggtgtctgtgctgccccgcaccctgcttgttaaccacgttaagacgactggcctgttaattaactttaattacgatcatttggcttccacctgcctgaacccgataccttacacgggaacctgtatgatgtgagtttaccagattgatctttcttgtttacttttggagacagttctcttgggagaagtggtgtccatcctatttaataaagcttaagcaggtaaagcagtcactgtgaagaaaataacattttaagaaacttttctgtcacaattgatagaggaaaagccagtagagaagtacatcttcttgtgtgtgtgtctcatcgtgccactttttgtaactcagcttagtaatgaagccaccattatgtcctcagtcagtgaagtaaatgtggatataaaagatttcctaatgagcattaatttggagcagtatctcttacatttccatgagtctggttttactactgtgaaggactgtgcagcaataaatgacagcctgctgcag

SEQ ID NO: 2348 - DNA, 6051 bp, Homo sapiens
  source 1..6051: mol_type = unassigned DNA
ggtcgttttctgatgtgacggctgagacatgagatcttcagcctccaggctctccagtttttcgtcgagagattcactatggaatcggatgccggaccagatctctgtctcggagttcatcgccgagaccaccgaggactacaactcgcccaccacgtccagcttcaccacgcggctgcacaactgcaggaacaccgtcacgctgctggaggaggctctagaccaagatagaacagcccttcagaaagtgaagaagtctgtaaaagcaatatataattctggtcaagatcatgtacaaaatgaagaaaactatgcacaagttcttgataagtttgggagtaattttttaagtcgagacaaccccgaccttggcaccgcgtttgtcaagttttctactcttacaaaggaactgtccacactgctgaaaaatctgctccagggtttgagccacaatgtgatcttcaccttggattctttgttaaaaggagacctaaagggagtcaaaggagatctcaagaagccatttgacaaagcctggaaagattatgagacaaagtttacaaaaattgagaaagagaaaagagagcacgcaaaacaacatgggatgatccgcacagagataacaggagctgagattgcggaagaaatggagaaggaaaggcgcctctttcagctccaaatgtgtgaatatctcattaaagttaatgaaatcaagaccaaaaagggtgtggatctgctgcagaatcttataaagtattaccatgcacagtgcaatttctttcaagatggcttgaaaacagctgataagttgaaacagtacattgaaaaactggctgctgatttatataatataaaacagacccaggatgaagaaaagaaacagctaactgcactccgagacttaataaaatcctctcttcaactggatcagaaagaagcaagacaggattctcagagccggcaaggaggatacagcatgcatcagctccagggcaataaggaatatggcagtgaaaagaaggggtacctgctaaagaaaagtgacgggatccggaaagtatggcagaggaggaagtgttcagtcaagaatgggattctgaccatctcacatgccacatctaacaggcaaccagccaagttgaaccttctcacctgccaagtaaaacctaatgccgaagacaaaaaatcttttgacctgatatcacataatagaacatatcactttcaggcagaagatgagcaggattatgtagcatggatatcagtattgacaaatagcaaagaagaggccctaaccatggccttccgtggagagcagagtgcgggagagaacagcctggaagacctgacaaaagccattattgaggatgtccagcggctcccagggaatgacatttgctgcgattgtggctcatcagaacccacctggctttcaaccaacttgggtattttgacctgtatagaatgttctggcatccatagggaaatgggggttcatatttctcgcattcagtctttggaactagacaaattaggaacttctgaactcttgctggccaagaatgtaggaaacaatagttttaatgatattatggaagcaaatttacccagcccctcaccaaaacccaccccttcaagtgatatgactgtacgaaaagaatatatcactgcaaagtatgtagatcataggttttcaaggaagacctgttcaacttcatcagctaaactaaatgaattgcttgaggccatcaaatccagggatttacttgcactaattcaagtctatgcagaaggggtagagctaatggaaccactgctggaacctgggcaggagcttggggagacagcccttcaccttgccgtccgaactgcagatcagacatctctccatttggttgacttccttgtacaaaactgtgggaacctggataagcagacggccctgggaaacacagttctacactactgtagtatgtacagtaaacctgagtgtttgaagcttttgctcaggagcaagcccactgtggatatagttaaccaggctggagaaactgccctagacatagcaaagagactaaaagctacccagtgtgaagatctgctttcccaggctaaatctggaaagttcaatccacacgtccacgtagaatatgagtggaatcttcgacaggaggagatagatgagagcgatgatgatctggatgacaaaccaagccctatcaagaaagagcgctcacccagacctcagagcttctgccactcctccagcatctccccccaggacaagctggcactgccaggattcagcactccaagggacaaacagcggctctcctatggagccttcaccaaccagatcttcgtttccacaagcacagactcgcccacatcaccaaccacggaggctccccctctgcctcctaggaacgccgggaaaggtccaactggcccaccttcaacactccctctaagcacccagacctctagtggcagctccaccctatccaagaagaggcctcctcccccaccacccggacacaagagaaccctatccgaccctcccagcccactacctcatgggcccccaaacaaaggcgcagttccttggggtaacgatgggggtccatcctcttcaagtaagactacaaacaagtttgagggactatcccagcagtcgagcaccagttctgcaaagactgcccttggcccaagagttcttcctaaactacctcagaaagtggcactaaggaaaacagatcatctctccctagacaaagccaccatcccgcccgaaatctttcagaaatcatcacagttggcagagttgccacaaaagccaccacctggagacctgcccccaaagcccacagaactggcccccaagccccaaattggagatttgccgcctaagccaggagaactgccccccaaaccacagctgggggacctgccacccaaaccccaactctcagacttacctcccaaaccacagatgaaggacctgccccccaaaccacagctgggagacctgctagcaaaatcccagactggagatgtctcacccaaggctcagcaaccctctgaggtcacactgaagtcacacccattggatctatccccaaatgtgcagtccagagacgccatccaaaagcaagcatctgaagactccaacgacctcacgcctactctgccagagacgcccgtaccactgcccagaaaaatcaatacggggaaaaataaagtgaggcgagtgaagaccatttatgactgccaggcagacaacgatgacgagctcacattcatcgagggagaagtgattatcgtcacaggggaagaggaccaggagtggtggattggccacatcgaaggacagcctgaaaggaagggggtctttccagtgtcctttgttcatatcctgtctgactagcaaaacgcagaaccttaagattgtccacatccttcatgcaagactgctgccttcatgtaaccctgggcacagtgtgtatatagctgctgttacagagtaagaaactcatggaagggccacctcaggagggggatataatgtgtgttgtaaatatcctgtggttttctgccttcaccagtatgagggtagcctcggacccggcgcgccttactggtttgccaaagccatccttggcatctagcacttacatctctctatgctgttctacaagcaaacaaacaaaaataggagtataggaactgctggctttgcaaatagaagtggtctccagcaaccgttgaaaggcatagaattgactctgttcctaacaatgcagtattctcaattgtgttactgaaaatgcaacattagcaaagaggtgggttctgttttccaggtgaaacttttagctccatgacagaccagcctgtagttatctgtgtacacagtttacagctacaaaaacctactttggtatttattacagaaaagtgctcagttaaatgtaagtgttattccttcagcaaaatattcactgacccaaaactctttatggcattttacaatgcacacagcctcatgcaagtttagacaagtggatttatactgtcttatgagtgcccgcccctgatatattacctcattatgcaaaaataacatatctttcatgactattttgacaaaagtttaaaacacatatgaagttcaaatttcaggaaccaaggactgccagaaaatattagcctctacattacgcatgcatttagaagcttacctgaaatctgccttttataaaggaatagtatggataagtggaattgtacattttttaaacttgattgccattaaagcagaaattataaggttgcaacaatatttgtttctaatcactggctttctcaagagtatggattgacatattgtgttatgaatgcacatctctcagatgtgttgaagcatccattgcatccattttttattattttcttagttttgttcttggacaaatttaaacttttaaaagattattcaagatgaatttaaaagtcaacccttcacacagtttccctactgtatgtagaatccaggtgctgaaaccaagtgtttcttttcccatgctctttgttaaaccccaattatagataatttttccagtcttaagctctgtccaccttcaagtcaattcataaccaagtttttgaacgctgctatgaattgcactgtgaaaagcactcttccctctcagttttcttttcatcccagccatgtttatcagatccttaagaacattgtatttcagtcttttacatcagtctgaattttggaaaagaatgcaatagttgtactccacagtcagtggaactgttccctgagtccgaggctcatgtgtcattctggcactacatttgcttaaattgctattttggcaacagcacagaaaactaatatttttaagcagagaatcttggcaatgagtgagagatgttaatttcacagaagcacaactcccaacccaacccttaggaaaagccctcttccatcgttacagtgctcagtgaatattaatttagttctgcttaagtggttgctatacaaactttgaatagccacctaataaataaaccttgcatgacaaacctgcaaaatattttatcagctgttattggaaagtgattttaagcaattgcttcctcagtgtcagggcacatgtgaatttccacaccaaacagagcatgaggaaccagttgacatgctgggttgtgactggcagctttagcagcctcggtactgaagccacaccagtgtccggatggaagtctgcatctgaggttgctcagtgtcccggtcattcatttacacattttaacttgcattaaagagctgttcttttctgtggcctagactcttttcactgatctcaaaataaactggtttttttcaaaaaaaaaaaaaaaacaaaaacaaaaaaaaaacacaaaagctgcatgtctaaaattacatggagttagtgtctattctttttccccttttgcagcaacttacacagcatttttaacaccttttttttctagtttttttgttcggttttgttttccatcaggaatttgagttctctctaacccagcttactgtgggacataggaaaactcagtagaaatacctttggtgatcttgttgagtttaagtctgatcttgatcttaaactcagtaagccactatctgcaattttgtacattatatagtattttgaagatatggaaccttatgaaaaaaaaatagcaaattagttctttttcccccagaggggaaagttatgttctgcaaatagtgtgtgtcttattttactgttgaacagcaattgctatttatttttttattgcctagaacttcaacatgttgtataggaatcctgtagtgccactagttaaatgccgaattctcatctggatgttaccatcaaacatcagtacacttgtcatttcacatgtgtttaatgtgacagtttttcagtactgtatgtgttaatttctactttttttaatatttaaaattgcttttaaataaacatattctcagttgatccc

SEQ ID NO: 2349 - DNA, 6042 bp, Homo sapiens
  source 1..6042: mol_type = unassigned DNA
ggtcgttttctgatgtgacggctgagacatgagatcttcagcctccaggctctccagtttttcgtcgagagattcactatggaatcggatgccggaccagatctctgtctcggagttcatcgccgagaccaccgaggactacaactcgcccaccacgtccagcttcaccacgcggctgcacaactgcaggaacaccgtcacgctgctggaggaggctctagaccaagatagaacagcccttcagaaagtgaagaagtctgtaaaagcaatatataattctggtcaagatcatgtacaaaatgaagaaaactatgcacaagttcttgataagtttgggagtaattttttaagtcgagacaaccccgaccttggcaccgcgtttgtcaagttttctactcttacaaaggaactgtccacactgctgaaaaatctgctccagggtttgagccacaatgtgatcttcaccttggattctttgttaaaaggagacctaaagggagtcaaaggagatctcaagaagccatttgacaaagcctggaaagattatgagacaaagtttacaaaaattgagaaagagaaaagagagcacgcaaaacaacatgggatgatccgcacagagataacaggagctgagattgcggaagaaatggagaaggaaaggcgcctctttcagctccaaatgtgtgaatatctcattaaagttaatgaaatcaagaccaaaaagggtgtggatctgctgcagaatcttataaagtattaccatgcacagtgcaatttctttcaagatggcttgaaaacagctgataagttgaaacagtacattgaaaaactggctgctgatttatataatataaaacagacccaggatgaagaaaagaaacagctaactgcactccgagacttaataaaatcctctcttcaactggatcagaaagaagattctcagagccggcaaggaggatacagcatgcatcagctccagggcaataaggaatatggcagtgaaaagaaggggtacctgctaaagaaaagtgacgggatccggaaagtatggcagaggaggaagtgttcagtcaagaatgggattctgaccatctcacatgccacatctaacaggcaaccagccaagttgaaccttctcacctgccaagtaaaacctaatgccgaagacaaaaaatcttttgacctgatatcacataatagaacatatcactttcaggcagaagatgagcaggattatgtagcatggatatcagtattgacaaatagcaaagaagaggccctaaccatggccttccgtggagagcagagtgcgggagagaacagcctggaagacctgacaaaagccattattgaggatgtccagcggctcccagggaatgacatttgctgcgattgtggctcatcagaacccacctggctttcaaccaacttgggtattttgacctgtatagaatgttctggcatccatagggaaatgggggttcatatttctcgcattcagtctttggaactagacaaattaggaacttctgaactcttgctggccaagaatgtaggaaacaatagttttaatgatattatggaagcaaatttacccagcccctcaccaaaacccaccccttcaagtgatatgactgtacgaaaagaatatatcactgcaaagtatgtagatcataggttttcaaggaagacctgttcaacttcatcagctaaactaaatgaattgcttgaggccatcaaatccagggatttacttgcactaattcaagtctatgcagaaggggtagagctaatggaaccactgctggaacctgggcaggagcttggggagacagcccttcaccttgccgtccgaactgcagatcagacatctctccatttggttgacttccttgtacaaaactgtgggaacctggataagcagacggccctgggaaacacagttctacactactgtagtatgtacagtaaacctgagtgtttgaagcttttgctcaggagcaagcccactgtggatatagttaaccaggctggagaaactgccctagacatagcaaagagactaaaagctacccagtgtgaagatctgctttcccaggctaaatctggaaagttcaatccacacgtccacgtagaatatgagtggaatcttcgacaggaggagatagatgagagcgatgatgatctggatgacaaaccaagccctatcaagaaagagcgctcacccagacctcagagcttctgccactcctccagcatctccccccaggacaagctggcactgccaggattcagcactccaagggacaaacagcggctctcctatggagccttcaccaaccagatcttcgtttccacaagcacagactcgcccacatcaccaaccacggaggctccccctctgcctcctaggaacgccgggaaaggtccaactggcccaccttcaacactccctctaagcacccagacctctagtggcagctccaccctatccaagaagaggcctcctcccccaccacccggacacaagagaaccctatccgaccctcccagcccactacctcatgggcccccaaacaaaggcgcagttccttggggtaacgatgggggtccatcctcttcaagtaagactacaaacaagtttgagggactatcccagcagtcgagcaccagttctgcaaagactgcccttggcccaagagttcttcctaaactacctcagaaagtggcactaaggaaaacagatcatctctccctagacaaagccaccatcccgcccgaaatctttcagaaatcatcacagttggcagagttgccacaaaagccaccacctggagacctgcccccaaagcccacagaactggcccccaagccccaaattggagatttgccgcctaagccaggagaactgccccccaaaccacagctgggggacctgccacccaaaccccaactctcagacttacctcccaaaccacagatgaaggacctgccccccaaaccacagctgggagacctgctagcaaaatcccagactggagatgtctcacccaaggctcagcaaccctctgaggtcacactgaagtcacacccattggatctatccccaaatgtgcagtccagagacgccatccaaaagcaagcatctgaagactccaacgacctcacgcctactctgccagagacgcccgtaccactgcccagaaaaatcaatacggggaaaaataaagtgaggcgagtgaagaccatttatgactgccaggcagacaacgatgacgagctcacattcatcgagggagaagtgattatcgtcacaggggaagaggaccaggagtggtggattggccacatcgaaggacagcctgaaaggaagggggtctttccagtgtcctttgttcatatcctgtctgactagcaaaacgcagaaccttaagattgtccacatccttcatgcaagactgctgccttcatgtaaccctgggcacagtgtgtatatagctgctgttacagagtaagaaactcatggaagggccacctcaggagggggatataatgtgtgttgtaaatatcctgtggttttctgccttcaccagtatgagggtagcctcggacccggcgcgccttactggtttgccaaagccatccttggcatctagcacttacatctctctatgctgttctacaagcaaacaaacaaaaataggagtataggaactgctggctttgcaaatagaagtggtctccagcaaccgttgaaaggcatagaattgactctgttcctaacaatgcagtattctcaattgtgttactgaaaatgcaacattagcaaagaggtgggttctgttttccaggtgaaacttttagctccatgacagaccagcctgtagttatctgtgtacacagtttacagctacaaaaacctactttggtatttattacagaaaagtgctcagttaaatgtaagtgttattccttcagcaaaatattcactgacccaaaactctttatggcattttacaatgcacacagcctcatgcaagtttagacaagtggatttatactgtcttatgagtgcccgcccctgatatattacctcattatgcaaaaataacatatctttcatgactattttgacaaaagtttaaaacacatatgaagttcaaatttcaggaaccaaggactgccagaaaatattagcctctacattacgcatgcatttagaagcttacctgaaatctgccttttataaaggaatagtatggataagtggaattgtacattttttaaacttgattgccattaaagcagaaattataaggttgcaacaatatttgtttctaatcactggctttctcaagagtatggattgacatattgtgttatgaatgcacatctctcagatgtgttgaagcatccattgcatccattttttattattttcttagttttgttcttggacaaatttaaacttttaaaagattattcaagatgaatttaaaagtcaacccttcacacagtttccctactgtatgtagaatccaggtgctgaaaccaagtgtttcttttcccatgctctttgttaaaccccaattatagataatttttccagtcttaagctctgtccaccttcaagtcaattcataaccaagtttttgaacgctgctatgaattgcactgtgaaaagcactcttccctctcagttttcttttcatcccagccatgtttatcagatccttaagaacattgtatttcagtcttttacatcagtctgaattttggaaaagaatgcaatagttgtactccacagtcagtggaactgttccctgagtccgaggctcatgtgtcattctggcactacatttgcttaaattgctattttggcaacagcacagaaaactaatatttttaagcagagaatcttggcaatgagtgagagatgttaatttcacagaagcacaactcccaacccaacccttaggaaaagccctcttccatcgttacagtgctcagtgaatattaatttagttctgcttaagtggttgctatacaaactttgaatagccacctaataaataaaccttgcatgacaaacctgcaaaatattttatcagctgttattggaaagtgattttaagcaattgcttcctcagtgtcagggcacatgtgaatttccacaccaaacagagcatgaggaaccagttgacatgctgggttgtgactggcagctttagcagcctcggtactgaagccacaccagtgtccggatggaagtctgcatctgaggttgctcagtgtcccggtcattcatttacacattttaacttgcattaaagagctgttcttttctgtggcctagactcttttcactgatctcaaaataaactggtttttttcaaaaaaaaaaaaaaaacaaaaacaaaaaaaaaacacaaaagctgcatgtctaaaattacatggagttagtgtctattctttttccccttttgcagcaacttacacagcatttttaacaccttttttttctagtttttttgttcggttttgttttccatcaggaatttgagttctctctaacccagcttactgtgggacataggaaaactcagtagaaatacctttggtgatcttgttgagtttaagtctgatcttgatcttaaactcagtaagccactatctgcaattttgtacattatatagtattttgaagatatggaaccttatgaaaaaaaaatagcaaattagttctttttcccccagaggggaaagttatgttctgcaaatagtgtgtgtcttattttactgttgaacagcaattgctatttatttttttattgcctagaacttcaacatgttgtataggaatcctgtagtgccactagttaaatgccgaattctcatctggatgttaccatcaaacatcagtacacttgtcatttcacatgtgtttaatgtgacagtttttcagtactgtatgtgttaatttctactttttttaatatttaaaattgcttttaaataaacatattctcagttgatccc

SEQ ID NO: 2350 - DNA, 5507 bp, Homo sapiens
  source 1..5507: mol_type = unassigned DNA
cccttcctgcgccgcgctcggctcccgcgcctcgcctggcctggccgctgccgcgggcgagcactgtgcgctgggcagccccgggcccgcgcctcccgcccagccggcgcttcccggtcgcagttcgctttcccacccgagagccgcgagcgcccggccgaacccgcgatggaataatgcccagcggcccgccaggtcccggtcgttttctgatgtgacggctgagacatgagatcttcagcctccaggctctccagtttttcgtcgagagattcactatggaatcggatgccggaccagatctctgtctcggagttcatcgccgagaccaccgaggactacaactcgcccaccacgtccagcttcaccacgcggctgcacaactgcaggaacaccgtcacgctgctggaggaggctctagaccaagatagaacagcccttcagaaagtgaagaagtctgtaaaagcaatatataattctggtcaagatcatgtacaaaatgaagaaaactatgcacaagttcttgataagtttgggagtaattttttaagtcgagacaaccccgaccttggcaccgcgtttgtcaagttttctactcttacaaaggaactgtccacactgctgaaaaatctgctccagggtttgagccacaatgtgatcttcaccttggattctttgttaaaaggagacctaaagggagtcaaaggagatctcaagaagccatttgacaaagcctggaaagattatgagacaaagtttacaaaaattgagaaagagaaaagagagcacgcaaaacaacatgggatgatccgcacagagataacaggagctgagattgcggaagaaatggagaaggaaaggcgcctctttcagctccaaatgtgtgaatatctcattaaagttaatgaaatcaagaccaaaaagggtgtggatctgctgcagaatcttataaagtattaccatgcacagtgcaatttctttcaagatggcttgaaaacagctgataagttgaaacagtacattgaaaaactggctgctgatttatataatataaaacagacccaggatgaagaaaagaaacagctaactgcactccgagacttaataaaatcctctcttcaactggatcagaaagaagattctcagagccggcaaggaggatacagcatgcatcagctccagggcaataaggaatatggcagtgaaaagaaggggtacctgctaaagaaaagtgacgggatccggaaagtatggcagaggaggaagtgttcagtcaagaatgggattctgaccatctcacatgccacatctaacaggcaaccagccaagttgaaccttctcacctgccaagtaaaacctaatgccgaagacaaaaaatcttttgacctgatatcacataatagaacatatcactttcaggcagaagatgagcaggattatgtagcatggatatcagtattgacaaatagcaaagaagaggccctaaccatggccttccgtggagagcagagtgcgggagagaacagcctggaagacctgacaaaagccattattgaggatgtccagcggctcccagggaatgacatttgctgcgattgtggctcatcagaacccacctggctttcaaccaacttgggtattttgacctgtatagaatgttctggcatccatagggaaatgggggttcatatttctcgcattcagtctttggaactagacaaattaggaacttctgaactcttgctggccaagaatgtaggaaacaatagttttaatgatattatggaagcaaatttacccagcccctcaccaaaacccaccccttcaagtgatatgactgtacgaaaagaatatatcactgcaaagtatgtagatcataggttttcaaggaagacctgttcaacttcatcagctaaactaaatgaattgcttgaggccatcaaatccagggatttacttgcactaattcaagtctatgcagaaggggtagagctaatggaaccactgctggaacctgggcaggagcttggggagacagcccttcaccttgccgtccgaactgcagatcagacatctctccatttggttgacttccttgtacaaaactgtgggaacctggataagcagacggccctgggaaacacagttctacactactgtagtatgtacagtaaacctgagtgtttgaagcttttgctcaggagcaagcccactgtggatatagttaaccaggctggagaaactgccctagacatagcaaagagactaaaagctacccagtgtgaagatctgctttcccaggctaaatctggaaagttcaatccacacgtccacgtagaatatgagtggaatcttcgacaggaggagatagatgagagcgatgatgatctggatgacaaaccaagccctatcaagaaagagcgctcacccagacctcagagcttctgccactcctccagcatctccccccaggacaagctggcactgccaggattcagcactccaagggacaaacagcggctctcctatggagccttcaccaaccagatcttcgtttccacaagcacagactcgcccacatcaccaaccacggaggctccccctctgcctcctaggaacgccgggaaaggtccaactggcccaccttcaacactccctctaagcacccagacctctagtggcagctccaccctatccaagaagaggcctcctcccccaccacccggacacaagagaaccctatccgaccctcccagcccactacctcatgggcccccaaacaaaggcgcagttccttggggtaacgatgggggtccatcctcttcaagtaagactacaaacaagtttgagggactatcccagcagtcgagcaccagttctgcaaagactgcccttggcccaagagttcttcctaaactacctcagaaagtggcactaaggaaaacagatcatctctccctagacaaagccaccatcccgcccgaaatctttcagaaatcatcacagttggcagagttgccacaaaagccaccacctggagacctgcccccaaagcccacagaactggcccccaagccccaaattggagatttgccgcctaagccaggagaactgccccccaaaccacagctgggggacctgccacccaaaccccaactctcagacttacctcccaaaccacagatgaaggacctgccccccaaaccacagctgggagacctgctagcaaaatcccagactggagatgtctcacccaaggctcagcaaccctctgaggtcacactgaagtcacacccattggatctatccccaaatgtgcagtccagagacgccatccaaaagcaagcatctgaagactccaacgacctcacgcctactctgccagagacgcccgtaccactgcccagaaaaatcaatacggggaaaaataaagtgaggcgagtgaagaccatttatgactgccaggcagacaacgatgacgagctcacattcatcgagggagaagtgattatcgtcacaggggaagaggaccaggagtggtggattggccacatcgaaggacagcctgaaaggaagggggtctttccagtgtcctttgttcatatcctgtctgactagcaaaacgcagaaccttaagattgtccacatccttcatgcaagactgctgccttcatgtaaccctgggcacagtgtgtatatagctgctgttacagagtaagaaactcatggaagggccacctcaggagggggatataatgtgtgttgtaaatatcctgtggttttctgccttcaccagtatgagggtagcctcggacccggcgcgccttactggtttgccaaagccatccttggcatctagcacttacatctctctatgctgttctacaagcaaacaaacaaaaataggagtataggaactgctggctttgcaaatagaagtggtctccagcaaccgttgaaaggcatagaattgactctgttcctaacaatgcagtattctcaattgtgttactgaaaatgcaacattagcaaagaggtgggttctgttttccaggtgaaacttttagctccatgacagaccagcctgtagttatctgtgtacacagtttacagctacaaaaacctactttggtatttattacagaaaagtgctcagttaaatgtaagtgttattccttcagcaaaatattcactgacccaaaactctttatggcattttacaatgcacacagcctcatgcaagtttagacaagtggatttatactgtcttatgagtgcccgcccctgatatattacctcattatgcaaaaataacatatctttcatgactattttgacaaaagtttaaaacacatatgaagttcaaatttcaggaaccaaggactgccagaaaatattagcctctacattacgcatgcatttagaagcttacctgaaatctgccttttataaaggaatagtatggataagtggaattgtacattttttaaacttgattgccattaaagcagaaattataaggttgcaacaatatttgtttctaatcactggctttctcaagagtatggattgacatattgtgttatgaatgcacatctctcagatgtgttgaagcatccattgcatccattttttattattttcttagttttgttcttggacaaatttaaacttttaaaagattattcaagatgaatttaaaagtcaacccttcacacagtttccctactgtatgtagaatccaggtgctgaaaccaagtgtttcttttcccatgctctttgttaaaccccaattatagataatttttccagtcttaagctctgtccaccttcaagtcaattcataaccaagtttttgaacgctgctatgaattgcactgtgaaaagcactcttccctctcagttttcttttcatcccagccatgtttatcagatccttaagaacattgtatttcagtcttttacatcagtctgaattttggaaaagaatgcaatagttgtactccacagtcagtggaactgttccctgagtccgaggctcatgtgtcattctggcactacatttgcttaaattgctattttggcaacagcacagaaaactaatatttttaagcagagaatcttggcaatgagtgagagatgttaatttcacagaagcacaactcccaacccaacccttaggaaaagccctcttccatcgttacagtgctcagtgaatattaatttagttctgcttaagtggttgctatacaaactttgaatagccacctaataaataaaccttgcatgacaaacctgcaaaatattttatcagctgttattggaaagtgattttaagcaattgcttcctcagtgtcagggcacatgtgaatttccacaccaaacagagcatgaggaaccagttgacatgctgggttgtgactggcagctttagcagcctcggtactgaagccacaccagtgtccggatggaagtctgcatctgaggttgctcagtgtcccggtcat

SEQ ID NO: 2351 - DNA, 2045 bp, Homo sapiens
  source 1..2045: mol_type = unassigned DNA
gcgaagaaggtgtgccgggggctggttggaggcgcgggcggcggggccaatgtggcggtgacgtcacggggcgggcggacgctggcgcgggtaggtaagagcagcggcgggcggtggcgctcactcccggcttccaaccgcgcggagcctctgccttggagattctcagtgctgcggatcatgtccctaaggggcagcctctcgcgtctcctccagacgcgagtgcattccatcctgaagaaatccgtccactccgtggctgtgataggagccccgttctcacaagggcagaaaagaaaaggagtggagcatggtcccgctgccataagagaagctggcttgatgaaaaggctctccagtttgggctgccacctaaaagactttggagatttgagttttactccagtccccaaagatgatctctacaacaacctgatagtgaatccacgctcagtgggtcttgccaaccaggaactggctgaggtggttagcagagctgtgtcagatggctacagctgtgtcacactgggaggagaccacagcctggcaatcggtaccattagtggccatgcccgacactgcccagacctttgtgttgtctgggttgatgcccatgctgacatcaacacaccccttaccacttcatcaggaaatctccatggacagccagtttcatttctcctcagagaactacaggataaggtaccacaactcccaggattttcctggatcaaaccttgtatctcttctgcaagtattgtgtatattggtctgagagacgtggaccctcctgaacattttattttaaagaactatgatatccagtatttttccatgagagatattgatcgacttggtatccagaaggtcatggaacgaacatttgatctgctgattggcaagagacaaagaccaatccatttgagttttgatattgatgcatttgaccctacactggctccagccacaggaactcctgttgtcgggggactaacctatcgagaaggcatgtatattgctgaggaaatacacaatacagggttgctatcagcactggatcttgttgaagtcaatcctcagttggccacctcagaggaagaggcgaagactacagctaacctggcagtagatgtgattgcttcaagctttggtcagacaagagaaggagggcatattgtctatgaccaacttcctactcccagttcaccagatgaatcagaaaatcaagcacgtgtgagaatttaggagacactgtgcactgacatgtttcacaacaggcattccagaattatgaggcattgaggggatagatgaatactaaatggttgtctgggtcaatactgccttaatgagaacatttacacattctcacaattgtaaagtttcccctctattttggtgaccaatactactgtaaatgtatttggttttttgcagttcacagggtattaatatgctacagtactatgtaaatttaaagaagtcataaacagcatttattaccttggtatatcatactggtcttgttgctgttgttccttcacatttaagtggtttttcatctttcctccctcctcccacagcctggctatacagtgcatccttgaactgtcagcccacagcagcaatatgcttattctatccacatccctaacatcatgcattcacaaggtcaaagttctggtccacaaacccttccctatagaagttcaatggctgcgaaagaatttgtagtaaaccaggcctcccaggatggcgagctccagtaagatgataatggaaagcagcagcttgttggttgtcactctacaaagagaagcaaagtggggagtagtcagaagtttggataaccttccttctaaacattttggggttagacctgggaccacggctggatactctgaggctgtatgtttgatcacacagccacttagcaggaagtactcataaggttctttagctgtcacttagggataacactgtctacctcacagaaatgttaaactgagacaataaaaaccaaagcataaaaatggattctgaaa

SEQ ID NO: 2352 - DNA, 361 bp, Homo sapiens
  source 1..361: mol_type = unassigned DNA
gaagcgagaggaggaggagaagaaagcggagttcgagcggcagcgaaaaattcgacagcaagaaatagaagaaaaactcatcgaggaagaaacagcacgaagagtagaagaattggtagcaaaaagggtggaggaagaactggagaaaaggaaggatgaaattgaacgagaagttctccgaagggtggaggaagccaaacgcatcatggaaaagcagttgctcgaagaactcgagcgacagagacaagctgagcttgccgcacaaaaagctagagagaggaagctggcgcgtatggcagccgaggagcacactctgcaggacactggacaagacagaggaagaacgtgcaaaacgtgagga

SEQ ID NO: 2353 - DNA, 821 bp, Homo sapiens
  source 1..821: mol_type = unassigned DNA
gactccttagcagcggagcagcccacggcctgcctgtactgcctgttacatgggccctctggtttgatgtcatcagtggaaatagaagcagggaactgacattctgatttggcatttgcttcgacagcaagaaatagaagaaaaactcatcgaggaagaaacagcacgaagagtagaagaattggtagcaaaaagggtggaggaagaactggagaaaaggaaggatgaaattgaacgagaagttctccgaagggtggaggaagccaaacgcatcatggaaaagcagttgctcgaagaactcgagcgacagagacaagctgagcttgccgcacaaaaagctagagagaggaagctggcgcgtatggcagccgaggagcacactctgcaggacactggacaagacagaggaagaacgtgcaaaacgtgaggagctagagcgaatactggaagagaataaccgaaaaattgcagaagcacaagccaaactggccgaagaacagttgagaattgttgaagaacaaagaaagattcatgaggaaaggatgaaactagaacaagaacgacaacgtcaacaaaaagaagaacaaaaaattatcctgggcaaggggaagtccaggccaaaactgtccttctcattaaaaacccaggattaaattgcaaactctgaactttttacaaagaaaaatggaaaaactttgtatggtagcttcatgttgaagtggttttttgtttttgtttttgtttttttaatttgtaaaatctggaaagttagcttgttctaataggggctatgctctgcaattcccttttttttttttttt

SEQ ID NO: 2354 - DNA, 3390 bp, Homo sapiens
  source 1..3390: mol_type = unassigned DNA
attgtgggaagggcggccggtgcagccgcagctgccatcttaggggcgcctggcgctacgggtttctcgttggaggcggccttcgtggcagctgtagacgccgggaaaaggcataaagtccgttggccgacacctttctttcctccggcctcggtagaaccgccagcccgcgtccgaaggcggaggcgaggggaactggccgcgtgaggggcctgaggcgagcggttagagcgtctcccggaaggatgggccggtctcggagccggagctcgtcccgctccaagcacaccaagagcagcaagcacaacaagaagcgcagccggtcccggtcgcgatcccgggacaaggagcgcgtgcggaagcgttccaaatctcgggaaagtaaacggaaccggcggcgggagtcgcggtcccgttcgcgctccaccaacacggccgtgtcccggcgcgagcgggaccgggagcgcgcctcgtccccgcccgaccgcatcgacatcttcgggcgcacggtgagcaagcgcagcagcctggacgagaagcagaagcgagaggaggaggagaagaaagcggagttcgagcggcagcgaaaaattcgacagcaagaaatagaagaaaaactcatcgaggaagaaacagcacgaagagtagaagaattggtagcaaaaagggtggaggaagaactggagaaaaggaaggatgaaattgaacgagaagttctccgaagggtggaggaagccaaacgcatcatggaaaagcagttgctcgaagaactcgagcgacagagacaagctgagcttgccgcacaaaaagctagagaggaggaagaacgtgcaaaacgtgaggagctagagcgaatactggaagagaataaccgaaaaattgcagaagcacaagccaaactggccgaagaacagttgagaattgttgaagaacaaagaaagattcatgaggaaaggatgaaactagaacaagaacgacaacgtcaacaaaaagaagaacaaaaaattatcctgggcaaggggaagtccaggccaaaactgtccttctcattaaaaacccaggattaaattgcaaactctgaactttttacaaagaaaaatggaaaaactttgtatggtagcttcatgttgaagtggttttttgtttttgtttttgtttttttaatttgtaaaatctggaaagttagcttgttctaataggggctatgctctgcaattccctttttttttttttttttccttccactaagtcaaatccttatcagatcattgttgtattctaaggagtgacgtatttttcacctgtttggattctatattagtggtctgaggaagagcagatcacattgtaaaactatggatggtctgataaggcttttactgaccccactgacttcagagttatactctgtttgctacatcataatgctggttttgctgactttttgtttttttatatatttataaaaaaagaaaaagttggtgattgcattgggaaattcccagggtattactggacctatgtggtgtattgttaaaccagtgtccttgtgatactgttgctcttgatgttcctgatacaggtaaggaaacagttggtcaactctgatacaaagtatatatacagttcagtattgtctctgttcattttgtttttatttcattgacaaaatcaaaccagcattccccattgtgtaaataaatgattttgctgaataaagtaaagtcttaaattcatatgttgaagcaattttttttaatgttatgttaagtcttaaagagggtggttcactttttgatggtcaaccatttagaagtcttagaactatatttcctcttgtttatacttttaacatagggtttatatgtacattaaatatacttgtgaattagtatttaatggctatttttacaaatatcaactttatgctgatagagcaaatggcatcagtgttacctttaagaaagactaacaacatccagaagatttaaattctcaaacctgtgcctctgttttaggatataagtattatcacaaagtatacttaataaaggctagaaaaatgcttttaaattatggaatctgagatcgttttcagagtgggccatcagaaagaacttagctttatactgtcaaaaaaaggctaagatggtcgagtcattttcattgtgtagtgtacttgcacgtttatttttaggacaaacacatttgaactttatgaattttttttttttttttgcatgtgaaatcttatgaatggctttcattttatacactagaatctgcctcatttactcttaacatatgtttaagtatactggtattaaaacattcaagaaaaggatattgatctaaaatgctacctgagatgcataaacatgtcatcaagtagagaaaatatttttatttttgcccaatattttttagacagtttgattattcttaaaaattgaaaacataagctaaagagatgactaaatggtagattattttgtgtgtgcatgctaggaaaaatgctgttgctttagttttgagctcttcaatgagtctaattgtggtaaggaacaatataaaatcagtttaaagatctttaaaggtagaattttaaataggcatgaaatatagtgagaacttttagtaaacatactacttactctaaaatcaaacattttattttcctaaagaatataggttgccaaaaaatattttatctctaaatataggttagctgtaattatttcatgaatttttttttttttcaatgtaactttttttggtgaagattcatggttcctaagttctgtattcaagtttttggaaatgtttatttaaaaactgttctatacaagtgttcaaaacattgtatctaaagagagtagcctggacttaaaatatttgaaatcagcttatgcgtgccttttaattttttttttaagtttcttactgccacatatggtgtgaagtgacagtaagttgcttaatgacatcctgcagtatctgcttgcttttggagactccagtgagatgttgaaattgttcctgtgcttggtaactactttcctctgccaggctatgggaaagaggatgtaattgtgaataatatacaccatccagtctttaatgtgctgcaacaatgtagtaatttgtttttttcatttgttcccactgcctttgtgtacatagaaaacttaaaaatttcccccagtctattagaagttaagatgttccctaatttattaaatatgcctttattcacaatttgtttttttaggttattcttaatgcattatagaattaagtatgactttgtttatttttattacagtatgtagttattgacatattgtggtttgcagaattatcaattgtataaactaaacctttaaatta

SEQ ID NO: 2355 - DNA, 1261 bp, Homo sapiens
  source 1..1261: mol_type = unassigned DNA
ggtgcagccgcagctgccatcttaggggcgcctggcgctacgggtttctcgttggaggcggccttcgtggcagctgtagacgccgggaaaaggcataaagtccgttggccgacacctttctttcctccggcctcggtagaaccgccagcccgcgtccgaaggcggaggcgaggggaactggccgcgtgaggggcctgaggcgagcggttagagcgtctcccggaaggatgggccggtctcggagccggagctcgtcccgctccaagcacaccaagagcagcaagcacaacaagaagcgcgcctcgtccccgcccgaccgcatcgacatcttcgggcgcacggtgagcaagcgcagcagcctggacgagaagcagaagcgagaggaggaggagaagaaagcggagttcgagcggcagcgaaaaattcgacagcaagaaatagaagaaaaactcatcgaggaagaaacagcacgaagagtagaagaattggtagcaaaaagggtggaggaagaactggagaaaaggaaggatgaaattgaacgagaagttctccgaagggtggaggaagccaaacgcatcatggaaaagcagttgctcgaagaactcgagcgacagagacaagctgagcttgccgcacaaaaagctagagaggtaacgctcggtcgtttggaaagtagagacagtccatggcaaaactttcagtgttgggttctgcctcctgctcagttcagaaagagatggaatacagactatctaattcctttctcgtctaaacttaacattgctgcgaaagttaattttttagcctattcagaagtgctgactgataacttaaaagttggaagcttttataaaacatattcaaggatactttttgatttaatggaactggctatttgagaagtgtttgaaacttttgccatggctgcaggacttacattcttttttgggaggacggtggggagacagggagtggtaaagggaaaaggttaaaaatccacctgtggttgtatattcttctattctgtcactctgttacctagactgtgagaggcttttgccttcagtcagattaaaaagagcagggcctaacattgagtgatagcacctgctttgataaataggttttctcactcttctttttttccttcttttatccctcactccctcccctaaaccctgcttcagcacaatggactaattctagcattctgatcataaggccctccattttcctaatgtgtttcaaggaatctttttag

SEQ ID NO: 2356 - DNA, 619 bp, Homo sapiens
  source 1..619: mol_type = unassigned DNA
acagagccaccaagcagtgctgcatacggggtccacctgtgtgcaccaggatgcctgacaccatgctgcccgcctgcttcctcggcctactggccttctcctccgcgtgctacttccagaactgcccgaggggcggcaagagggccatgtccgacctggagctgagacagtgcctcccctgcggccccgggggcaaaggccgctgcttcgggcccagcatctgctgcgcggacgagctgggctgcttcgtgggcacggctgaggcgctgcgctgccaggaggagaactacctgccgtcgccctgccagtccggccagaaggcgtgcgggagcgggggccgctgcgccgccttcggcgtttgctgcaacgacgagagctgcgtgaccgagcccgagtgccgcgagggctttcaccgccgcgcccgcgccagcgaccggagcaacgccacgcagctggacgggccggccggggccttgctgctgcggctggtgcagctggccggggcgcccgagcccttcgagcccgcccagcccgacgcctactgagccccgcgctcgccccaccggcgcgctcttcgcgcccgcccctgcagcacggacaataaacctccgccaatgca

SEQ ID NO: 2357 - DNA, 1525 bp, Homo sapiens
  source 1..1525: mol_type = unassigned DNA
agaccctgcgcttcggacgaggagcccaagtcctccgagacggggagggagcggcccgcgagggctggagctccgaagagggccgagtaggagctgcatggacagcatgcgtctctccgccggtcccgacgcggggccctcgggcaactccagcccatggtggcctctggccaccggcgctggcaacacaagccgggaggccgaagccctcggggagggcaacggcccaccgagggacgtgcgcaacgaggagctggccaaactggagatcgccgtgctggcggtgactttcgcggtggccgtgctgggcaacagcagcgtactgctggctctgcaccggacgccgcgcaagacgtcccgcatgcacctcttcatccgacacctcagcctggccgacctggccgtggcattcttccaggtgctgccgcaaatgtgctgggacatcacctaccgcttccgcggccccgactggctgtgccgcgtggtgaagcacctgcaggtgttcggcatgtttgcgtcggcctacatgctggtagtcatgacagccgaccgctacatcgcggtgtgccacccgctcaagactctgcaacagcccgcgcgccgctcgcgcctcatgatcgcggccgcctgggtgctgagcttcgtgctgagcacgccgcagtacttcgtcttctccatgatcgaggtgaacaatgtcaccaaggcccgcgactgctgggccaccttcatccagccctggggttctcgtgcctacgtgacctggatgacgggcggcatctttgtggcgcccgtggtcatcttgggtacctgctacggcttcatctgctacaacatctggtgcaacgtccgcgggaagacggcgtcgcgccagagcaagggtgcagagcaagcgggtgtggccttccaaaaggggttcctgctcgcaccctgtgtcagcagcgtgaagtccatttcccgggccaagatccgcacggtgaagatgacttttgtgatcgtgacggcttacatcgtctgctgggcgcctttcttcatcatccagatgtggtctgtctgggatcccatgtccgtctggaccgaatcggaaaaccctaccatcaccatcactgcattactgggttccttgaatagctgctgtaatccctggatatacatgttttttagtggccatctccttcaagactgtgttcaaagcttcccatgctgccaaaacatgaaggaaaaattcaacaaagaagatactgacagtatgagcagaagacagactttttattctaacaatcgaagcccaacaaacagtacgggtatgtggaaggactcgcctaaatcttccaagtccatcaaattcattcctgtttcaacttgagccttgcattcatgcaacttgattcttgtgattgactttttggctcattagctgaattgagctagaaatcacaagaacaaatacactttattaatataaccataaatcaattcattgtgtatgagactgtgtttctagttgcattttcatattgctaccaaa

SEQ ID NO: 2358 - DNA, 2237 bp, Homo sapiens
  source 1..2237: mol_type = unassigned DNA
ggcttggctggggcttcctgccctgagcgcgacaccgactgccccggaccgcgcctccaagcaggctgaagggcttccgctcttggcttccagaaaagtttggagaaagagaatttgaggcggattggagggtggtagcccctccccagccttctttccctcccagaagcctcactctgcacagcgtcccccattcttcccgtcctgattccccatcttcctgacccctccttctccctctcctgggtcgatcccagtcacattttctccttccgaatctcatcctccctcctcctctctatcccagtcctctgaacgatttccgcctatttgcaagccttctccctgtcattctcaacgcttctcctttctctccacctcccctgccactccattttatccatcaaacctctccacttgcatccacaccctcccttcatccttccctcccagcaaaccttgctcatggattctgggcctctgtgggatgccaaccccacccctcggggcaccctctctgcccccaatgccacaacaccctggctgggccgggatgaggagctggccaaggtggagatcggagtcctggccactgtcctggtgctggcgaccgggggcaacctggctgtgctgctgaccctgggccagctgggccgcaagcgctcccgcatgcacctgttcgtgctgcacttagccctgacagacctggccgtggcgctcttccaggtgctgccacagctgctgtgggacatcacctaccgcttccagggccccgacctcctgtgcagggccgtcaagtacctgcaggtgctcagcatgtttgcctccacctacatgctgctggccatgacgctggaccgctacctggctgtctgtcaccccctgcgcagcctccagcagccaggccagtccacctacctgctcatcgctgctccctggctgctggccgccatcttcagcctccctcaagtcttcattttttccctgcgggaggtgatccagggctcaggggtgctggactgctgggcagacttcggcttcccttgggggccacgggcctacctcacctggaccaccctggctatcttcgttctgccggtgaccatgctcacggcctgctacagcctcatctgccatgagatctgtaaaaacctaaaagtcaagacacaggcctggcgggtgggaggagggggctggaggacttgggacaggccctcaccttccaccttagctgccaccactcgggggctgccatctcgggtcagcagcatcaacaccatctcacgggccaagatccgaacagtgaagatgacctttgtcatcgtgctggcctacatcgcttgctgggctcccttcttcagtgtccagatgtggtccgtgtgggacaagaatgcccctgatgaagattccaccaatgtggctttcaccatctctatgcttttgggcaacctcaacagctgctgcaacccctggatctacatgggcttcaacagccacctgttaccgcggcccctgcgtcaccttgcctgctgtgggggtccccagcccaggatgcgccggcggctctccgacggcagcctctcgagccgccacaccacgctgctgacccgctccagctgcccggccaccctcagcctcagcctcagcctaaccctcagtgggaggcccaggcctgaagagtcaccaagggacttggagctggcagatggggaaggcaccgctgagaccatcatcttttaggaaagactcgctggggtctggtactgcccccaggactagtggaggttctctgcccacctcgggcactggaaatgagagctgggagggtaagggttggagttagaggagccctgtctaaagcggagcgaaaaggccagaatgggtcccctaccctggtgtcacagctgcccctagtgtgagggctgcctcataagctcccaatctcagacactggcagtcagggagaatcaaactgcctgtctccctggtcctgccatattcatagggtgtccatgcacacatggtgtcccagatctaggcaggcctaggatggtgctgtctaggggtccacgggtggcaggaattcagaggctggccttgtgccctggctacctgtctccattctaacctgactggcacatctcagcctaaccaggagaggggagaagtgaaaaaccgtgaggaggactctatttggatcctggatttgttgttgttgttgttgttgttagagagaa

SEQ ID NO: 2359 - DNA, 1622 bp, Homo sapiens
  source 1..1622: mol_type = unassigned DNA
cttgctcctcaggcagaggctgagtccgcacatcacctccaggccctcagaacacctgccccagccccaccatgctcatggcgtccaccacttccgctgtgcctgggcatccctctctgcccagcctgcccagcaacagcagccaggagaggccactggacacccgggacccgctgctagcccgggcggagctggcgctgctctccatagtctttgtggctgtggccctgagcaatggcctggtgctggcggccctagctcggcggggccggcggggccactgggcacccatacacgtcttcattggccacttgtgcctggccgacctggccgtggctctgttccaagtgctgccccagctggcctggaaggccaccgaccgcttccgtgggccagatgccctgtgtcgggccgtgaagtatctgcagatggtgggcatgtatgcctcctcctacatgatcctggccatgacgctggaccgccaccgtgccatctgccgtcccatgctggcgtaccgccatggaagtggggctcactggaaccggccggtgctagtggcttgggccttctcgctccttctcagcctgccccagctcttcatcttcgcccagcgcaacgtggaaggtggcagcggggtcactgactgctgggcctgctttgcggagccctggggccgtcgcacctatgtcacctggattgccctgatggtgttcgtggcacctaccctgggtatcgccgcctgccaggtgctcatcttccgggagattcatgccagtctggtgccagggccatcagagaggcctggggggcgccgcaggggacgccggacaggcagccccggtgagggagcccacgtgtcagcagctgtggccaagactgtgaggatgacgctagtgattgtggtcgtctatgtgctgtgctgggcacccttcttcctggtgcagctgtgggccgcgtgggacccggaggcacctctggaaggggcgccctttgtgctactcatgttgctggccagcctcaacagctgcaccaacccctggatctatgcatctttcagcagcagcgtgtcctcagagctgcgaagcttgctctgctgtgcccggggacgcaccccacccagcctgggtccccaagatgagtcctgcaccaccgccagctcctccctggccaaggacacttcatcgtgaggagctgttgggtgtcttgcctctagaggctttgagaagctcagctgccttcctggggctggtcctgggagccactgggagggggacccgtggagaattggccagagcctgtggccccgaggctgggacactgtgtggccctggacaagccacagcccctgcctgggtctccacatccccagctgtatgaggagagcttcaggccccaggactgtgggggcccctcaggtcagctcactgagctgggtgtaggaggggctgcagcagaggcctgaggagtggcaggaaagagggagcaggtgcccccaggtgagacagcggtcccaggggcctgaaaaggaaggaccaggctggggccaggggaccttcctgtctccgcctttctaatccctccctcctcattctctccctaataaaaattggagctcattttcc

SEQ ID NO: 2360 - DNA, 1763 bp, Homo sapiens
  source 1..1763: mol_type = unassigned DNA
ttcacgccaccgcccagctgcccaggagcccagccaggactggccatactgccaccgacacgtgcacacacgccaacaggcatctgccatgctggcatctctataagggctccagtccagagaccctgggccattgaacttgctcctcaggcagaggctgagtccgcacatcacctccaggccctcagaacacctgccccagccccaccatgctcatggcgtccaccacttccgctgtgcctgggcatccctctctgcccagcctgcccagcaacagcagccaggagaggccactggacacccgggacccgctgctagcccgggcggagctggcgctgctctccatagtctttgtggctgtggccctgagcaatggcctggtgctggcggccctagctcggcggggccggcggggccactgggcacccatacacgtcttcattggccacttgtgcctggccgacctggccgtggctctgttccaagtgctgccccagctggcctggaaggccaccgaccgcttccgtgggccagatgccctgtgtcgggccgtgaagtatctgcagatggtgggcatgtatgcctcctcctacatgatcctggccatgacgctggaccgccaccgtgccatctgccgtcccatgctggcgtaccgccatggaagtggggctcactggaaccggccggtgctagtggcttgggccttctcgctccttctcagcctgccccagctcttcatcttcgcccagcgcaacgtggaaggtggcagcggggtcactgactgctgggcctgctttgcggagccctggggccgtcgcacctatgtcacctggattgccctgatggtgttcgtggcacctaccctgggtatcgccgcctgccaggtgctcatcttccgggagattcatgccagtctggtgccagggccatcagagaggcctggggggcgccgcaggggacgccggacaggcagccccggtgagggagcccacgtgtcagcagctgtggccaagactgtgaggatgacgctagtgattgtggtcgtctatgtgctgtgctgggcacccttcttcctggtgcagctgtgggccgcgtgggacccggaggcacctctggaaggggcgccctttgtgctactcatgttgctggccagcctcaacagctgcaccaacccctggatctatgcatctttcagcagcagcgtgtcctcagagctgcgaagcttgctctgctgtgcccggggacgcaccccacccagcctgggtccccaagatgagtcctgcaccaccgccagctcctccctggccaaggacacttcatcgtgaggagctgttgggtgtcttgcctctagaggctttgagaagctcagctgccttcctggggctggtcctgggagccactgggagggggacccgtggagaattggccagagcctgtggccccgaggctgggacactgtgtggccctggacaagccacagcccctgcctgggtctccacatccccagctgtatgaggagagcttcaggccccaggactgtgggggcccctcaggtcagctcactgagctgggtgtaggaggggctgcagcagaggcctgaggagtggcaggaaagagggagcaggtgcccccaggtgagacagcggtcccaggggcctgaaaaggaaggaccaggctggggccaggggaccttcctgtctccgcctttctaatccctccctcctcattctctccctaataaaaattggagctcattttccaca

SEQ ID NO: 2361 - DNA, 1307 bp, Homo sapiens
  source 1..1307: mol_type = unassigned DNA
caggccctcagaacacctgccccagccccaccatgctcatggcgtccaccacttccgctgtgcctgggcatccctctctgcccagcctgcccagcaacagcagccaggagaggccactggacacccgggacccgctgctagcccgggcggagctggcgctgctctccatagtctttgtggctgtggccctgagcaatggcctggtgctggcggccctagctcggcggggccggcggggccactgggcacccatacacgtcttcattggccacttgtgcctggccgacctggccgtggctctgttccaagtgctgccccagctggcctggaaggccaccgaccgcttccgtgggccagatgccctgtgtcgggccgtgaagtatctgcagatggtgggcatgtatgcctcctcctacatgatcctggccatgacgctggaccgccaccgtgccatctgccgtcccatgctggcgtaccgccatggaagtggggctcactggaaccggccggtgctagtggcttgggccttctcgctccttctcagcctgccccagctcttcatcttcgcccagcgcaacgtggaaggtggcagcggggtcactgactgctgggcctgctttgcggagccctggggccgtcgcacctatgtcacctggattgccctgatggtgttcgtggcacctaccctgggtatcgccgcctgccaggtgctcatcttccgggagattcatgccagtctggtgccagggccatcagagaggcctggggggcgccgcaggggacgccggacaggcagccccggtgagggagcccacgtgtcagcagctgtggccaagactgtgaggatgacgctagtgattgtggtcgtctatgtgctgtgctgggcacccttcttcctggtgcagctgtgggccgcgtgggacccggaggcacctctggaaggtgggtgtagccgtggctagggctgacggggccacttgggcttggccgcatgcccctgtgccccaccagccatcctgaacccaacctagatcctccacctccacaggggcgccctttgtgctactcatgttgctggccagcctcaacagctgcaccaacccctggatctatgcatctttcagcagcagcgtgtcctcagagctgcgaagcttgctctgctgtgcccggggacgcaccccacccagcctgggtccccaagatgagtcctgcaccaccgccagctcctccctggccaaggacacttcatcgtgaggagctgttgggtgtcttgcctctagaggctttgagaagctcagctgccttcc

SEQ ID NO: 2362 - DNA, 1727 bp, Homo sapiens
  source 1..1727: mol_type = unassigned DNA
gatgcactcgatatctcggctgaagctgcctggcgctagaaccaggaaggcgctgagcttaaactgaagcaagttcggtggacgccggcggcgccctgatctaaagaaacgactcagggactgcggcgcttgcacgtcaacgggaggtgtgagcccaaagaaatgggacgtcggtcatcagatactgaagaagaaagcagaagcaagagaaaaaagaaacaccgtagacggtcctcctcgagcagttcttcagatagtagaacatacagccgaaagaaaggaggaaggaaatcaagatcaaagtcaagatcttggtccagagatcttcagcctcgttcacattcttatgatagaagacgcaggcatcgatcaagcagtagctcttcttatggctccagaaggaaacgaagtcgaagtcgttcaaggggtcgagggaaatcctatagagttcagaggtctaggtcaaaaagcagaacaagaaggtccaggtcaagacctcgtctccgttctcatagtcgtagcagtgaaaggtccagtcacagaagaacgcgtagtcggtctcgggatagagaacgacgtaagggcagagataaagagaaaagagaaaaggagaaggataaagggaaggacaaggaattacataacatcaaacgtggggaatctggaaacatcaaagctggattagaacatctgccaccagctgaacaggccaaagccagactacagctggttcttgaagctgctgcaaaagctgatgaagcattgaaagccaaagaaagaaatgaggaagaagcaaagagaagaaaggaggaagaccaagccaccctggtagaacaagtaaaaagagtaaaagaaattgaagctattgaaagtgattcttttgttcagcagacattcagatcaagtaaagaagtcaaaaagtcagtggaacctagtgaagtgaaacaagcaacttcaacatcaggaccagcatcagcagttgctgatccacccagtactgaaaaagaaatagatcctaccagcatccctactgctatcaagtaccaagatgacaattccctggcccatccaaatttatttatcgagaaagctgatgctgaggaaaaatggttcaagagattaattgctctccgacaagaaagactaatgggcagtcctgtggcctaagtaatatacatatagttggattggattgtcagcagtaacattggaaatttaggtttttaaatcccaatattaactttttactcttaaaaagaattttgctgattatatataaaggtagtctcatttcatttgtctctcatgtaggcttgaatatttgttaatttgaattaaatcaaacattgtaaaaattaaaacaaaatttaagattgcatgaaaatgttatactgttaataaagctaaacataaataagtctgttaaaatgaatggtagacactagtgtttcttagtgcaattcaaaaaatgtcaagatgtcatttaaagacacaattttgattaattatgcatacatgagaattgaattacatgctataaatatgagatttcatcttccgtatggtattcaaccatttttaaatattttatttcaccatattgcaaatttttaggcacaataaaaagcaccctaaacaatgtaagcagaatgtgcatgttaaagaacatatttatggaaaaaaaatttttgaaacttaaataaattggtgattttgcttagagatca

SEQ ID NO: 2363 - DNA, 1443 bp, Homo sapiens
  source 1..1443: mol_type = unassigned DNA
gagcttaaactgaagcaagttcggtggacgccggcggcgccctgatctaaagaaacgactcagggactgcggcgcttgcacgtcaacgggagaaatgggacgtcggtcatcagatactgaagaagaaagcagaagcaagagaaaaaagaaacaccgtagacggtcctcctcgagcagttcttcagatagtagaacatacagccgaaagaaaggaggaaggaaatcaagatcaaagtcaagatcttggtccagagatcttcagcctcgttcacattcttatgatagaagacgcaggcatcgatcaagcagtagctcttcttatggctccagaaggaaacgaagtcgaagtcgttcaaggggtcgagggaaatcctatagagttcagaggtctaggtcaaaaagcagaacaagaagggaatctggaaacatcaaagctggattagaacatctgccaccagctgaacaggccaaagccagactacagctggttcttgaagctgctgcaaaagctgatgaagcattgaaagccaaagaaagaaatgaggaagaagcaaagagaagaaaggaggaagaccaagccaccctggtagaacaagtaaaaagagtaaaagaaattgaagctattgaaagtgattcttttgttcagcagacattcagatcaagtaaagaagtcaaaaagtcagtggaacctagtgaagtgaaacaagcaacttcaacatcaggaccagcatcagcagttgctgatccacccagtactgaaaaagaaatagatcctaccagcatccctactgctatcaagtaccaagatgacaattccctggcccatccaaatttatttatcgagaaagctgatgctgaggaaaaatggttcaagagattaattgctctccgacaagaaagactaatgggcagtcctgtggcctaagtaatatacatatagttggattggattgtcagcagtaacattggaaatttaggtttttaaatcccaatattaactttttactcttaaaaagaattttgctgattatatataaaggtagtctcatttcatttgtctctcatgtaggcttgaatatttgttaatttgaattaaatcaaacattgtaaaaattaaaacaaaatttaagattgcatgaaaatgttatactgttaataaagctaaacataaataagtctgttaaaatgaatggtagacactagtgtttcttagtgcaattcaaaaaatgtcaagatgtcatttaaagacacaattttgattaattatgcatacatgagaattgaattacatgctataaatatgagatttcatcttccgtatggtattcaaccatttttaaatattttatttcaccatattgcaaatttttaggcacaataaaaagcaccctaaacaatgtaagcagaatgtgcatgttaaagaacatatttatggaaaaaaaa

SEQ ID NO: 2364 - DNA, 2411 bp, Homo sapiens
  source 1..2411: mol_type = unassigned DNA
agaaccaggaaggcgctgagcttaaactgaagcaagttcggtggacgccggcggcgccctgatctaaagaaacgactcagggactgcggcgcttgcacgtcaacgggaggtgtgagcccaaagaaatgggacgtcggtcatcagatactgaagaagaaagcagaagcaagagaaaaaagaaacaccgtagacggtcctcctcgagcagttcttcagatagtagaacatacagccgaaagaaaggaggaaggaaatcaagatcaaagtcaagatcttggtccagagatcttcagcctcgttcacattcttatgatagaagacgcaggcatcgatcaagcagtagctcttcttatggctccagaaggaaacgaagtcgaagtcgttcaaggggtcgagggaaatcctatagagttcagaggtctaggtcaaaaagcagaacaagaagggaatctggaaacatcaaagctggattagaacatctgccaccagctgaacaggccaaagccagactacagctggttcttgaagctgctgcaaaagctgatgaagcattgaaagccaaagaaagaaatgaggaagaagcaaagagaagaaaggaggaagaccaagccaccctggtagaacaagtaaaaagagtaaaagaaattgaagctattgaaagtgattcttttgttcagcagacattcagatcaagtaaagaagtcaaaaagtcagtggaacctagtgaagtgaaacaagcaacttcaacatcaggaccagcatcagcagttgctgatccacccagtactgaaaaagaaatagatcctaccagcatccctactgctatcaagtaccaagatgacaattccctggcccatccaaatttatttatcgagaaagctgatgctgaggaaaaatggttcaagagattaattgctctccgacaagaaagactaatgggcagtcctgtggcctaagtaatatacatatagttggattggattgtcagcagtaacattggaaatttaggtttttaaatcccaatattaactttttactcttaaaaagaattttgctgattatatataaaggtagtctcatttcatttgtctctcatgtaggcttgaatatttgttaatttgaattaaatcaaacattgtaaaaattaaaacaaaatttaagattgcatgaaaatgttatactgttaataaagctaaacataaataagtctgttaaaatgaatggtagacactagtgtttcttagtgcaattcaaaaaatgtcaagatgtcatttaaagacacaattttgattaattatgcatacatgagaattgaattacatgctataaatatgagatttcatcttccgtatggtattcaaccatttttaaatattttatttcaccatattgcaaatttttaggcacaataaaaagcaccctaaacaatgtaagcagaatgtgcatgttaaagaacatatttatggaaaaaaaatttttgaaacttaaataaattggtgattttgcttagagatcagcttctactagatgctcctttacaacatgttagcagatctcagctcattgttttagaaatcacatgttcatgctagacctaaccagttggccaaatacctatgatggagaaatcatttctgagaaaactgataagagctctcacttcagtcttacttaccccactgctattccctgtggagaaagccggctaattgttttgataaggctatctgccattgtagaatacctttctctagtagctgaatgacaatcaactatacgttccatactaaacatgccagagataggacttttaggccttgctttacaaaactggtttttaacagctgacatgaatatttcccgtttctattttcttttttttttttttttttttttttttgagacggagtctcgctctatcccccatgctggagtgcagtggcgcgatctcagctcactgcaagctccgcctcccaggttcacgccattttcttgcctcagcctcccgagtagctgggactacaggcacccgctaacatgcccagctaattttttgtgtttttagtagagatggggtttcaccattttagccaggatggtctattttcttctgttgtccagtcactaatttagtctctgcgaagactgtagctcagaacaaaagataagcaaaaaaagtcttcagggtaggactgccaacatataggacattttaatgccatcttctttatatttctgggacattaaaattcaaatctctgttgaaaatgaaaaatgtaaaacttagttgcaaacagtatagaaaataagtgatgatgaaatatttgttttcatacaaacatgctttcccattctaaatagatgctagttttcttttttccttggctgtaaataaaagtgccccaaatgaa

SEQ ID NO: 2365 - DNA, 769 bp, Homo sapiens
  source 1..769: mol_type = unassigned DNA
cggctgaagctgcctggcgctagaaccaggaaggcgctgagcttaaactgaagcaagttcggtggacgccggcggcgccctgatctaaagaaacgactcagggactgcggcgcttgcacgtcaacgggaggtgtgagcccaaaggtctggacccagaaatgggacgtcggtcatcagatactgaagaagaaagcagaagcaagagaaaaaagaaacaccgtagacggtcctcctcgagcagttcttcagatagtagaacatacagccgaaagaaaggaggaaggaaatcaagatcaaagtcaagatcttggtccagagatcttcagcctcgttcacattcttatgatagaagacgcaggcatcgatcaagcagtagctcttcttatggctccagaaggaaacgaagtcgaagtcgttcaaggggtcgagggaaatcctatagagttcagaggtctaggtcaaaaagcagaacaagaaggtccaggtcaagacctcgtctccgttctcatagtcgtagcagtgaaaggtccagtcacagaagaacgcgtagtcggtctcgggatagagaacgacgtaagggcagagataaagagaaaagagaaaaggagaaggataaagggaaggacaaggaattacataacatcaaacgtggggaatctggaaacatcaaagctggattagaacatctgccaccagctgaacaggccaaagccagactacagctggttcttgaagctgctgcaaaagctgatgaagcattgaaagccaa

SEQ ID NO: 2366 - DNA, 788 bp, Homo sapiens
  source 1..788: mol_type = unassigned DNA
ggctccggactccttgggtcaaggctggtggctgtagggtgggtgggtggccgcaggcctcaagcttggccttctgtcttgaggacatgtcggagagttcgccgactcctcccctcgccccacgttcctggttcttcatagctgcttttgggtttcctggctcatcttgcaatataagcctggcgcttcctcactagctctagaaatgggacgtcggtcatcagatactgaagaagaaagcagaagcaagagaaaaaagaaacaccgtagacggtcctcctcgagcagttcttcagatagtagaacatacagccgaaagaaaggaggaaggaaatcaagatcaaagtcaagatcttggtccagagatcttcagcctcgttcacattcttatgatagaagacgcaggcatcgatcaagcagtagctcttcttatggctccagaaggaaacgaagtcgaagtcgttcaaggggtcgagggaaatcctatagagttcagaggtctaggtcaaaaagcagaacaagaaggtccaggtcaagacctcgtctccgttctcatagtcgtagcagtgaaaggtccagtcacagaagaacgcgtagtcggtctcgggatagagaacgacgtaagggcagagataaagagaaaagagaaaaggagaaggataaagggaaggacaaggaattacataacatcaaacgtggggaatctggaaacatcaaagctggattagaacatctgccaccagctgaacaggccaaagccagactacagctggttcttgaagctgctg

SEQ ID NO: 2367 - DNA, 1410 bp, Homo sapiens
  source 1..1410: mol_type = unassigned DNA
cggactgccgggctgctgcggtcgtcgcggcccgcctcggtgcagccggtcggctccttggccccgcgcagcggcccgctctccagcacctcccggtacgtgatcgcctccttcttctccttcactttctggtcaaaagacttggagacgaacgccaaatgggacgtcggtcatcagatactgaagaagaaagcagaagcaagagaaaaaagaaacaccgtagacggtcctcctcgagcagttcttcagatagtagaacatacagccgaaagaaaggaggaaggaaatcaagatcaaagtcaagatcttggtccagagatcttcagcctcgttcacattcttatgatagaagacgcaggcatcgatcaagcagtagctcttcttatggctccagaaggaaacgaagtcgaagtcgttcaaggggtcgagggaaatcctatagagttcagaggtctaggtcaaaaagcagaacaagaaggtccaggtcaagacctcgtctccgttctcatagtcgtagcagtgaaaggtccagtcacagaagaacgcgtagtcggtctcgggatagagaacgacgtaagggcagagataaagagaaaagagaaaaggagaaggataaagggaaggacaaggaattacataacatcaaacgtggggaatctggaaacatcaaagctggattagaacatctgccaccagctgaacaggccaaagccagactacagctggttcttgaagctgctgcaaaagctgatgaagcattgaaagccaaagaaagaaatgaggaagaagcaaagagaagaaaggaggaagaccaagccaccctggtagaacaagtaaaaagagtaaaagaaattgaagctattgaaagtgattcttttgttcagcagacattcagatcaagtaaagaagtcaaaaagtcagtggaacctagtgaagtgaaacaagcaacttcaacatcaggaccagcatcagcagttgctgatccacccagtactgaaaaagaaatagatcctaccagcatccctactgctatcaagtaccaagatgacaattccctggcccatccaaatttatttatcgagaaagctgatgctgaggaaaaatggttcaagagattaattgctctccgacaagaaagactaatgggcagtcctgtggcctaagtaatatacatatagttggattggattgtcagcagtaacattggaaatttaggtttttaaatcccaatattaactttttactcttaaaaagaattttgctgattatatataaaggtagtctcatttcatttgtctctcatgtaggcttgaatatttgttaatttgaattaaatcaaacattgtaaaaattaaaacaaaatttaagattgcatgaaaatgttatactgttaataaagctaaacataaa

SEQ ID NO: 2368 - DNA, 679 bp, Homo sapiens
  source 1..679: mol_type = unassigned DNA
tttgtctgtattgtgccggacagggcttgctgtgagaagtgtggctatgcaaatacatactcacaaaagaatatttacatatgatgttatatttaagtgtgtaaacaaatatacctctaagtgtggcttaggggacattttcaagtactctgaatattaatgcagactttctggaagttaaagaaatgggacgtcggtcatcagatactgaagaagaaagcagaagcaagagaaaaaagaaacaccgtagacggtcctcctcgagcagttcttcagatagtagaacatacagccgaaagaaaggaggaaggaaatcaagatcaaagtcaagatcttggtccagagatcttcagcctcgttcacattcttatgatagaagacgcaggcatcgatcaagcagtagctcttcttatggctccagaaggaaacgaagtcgaagtcgttcaaggggtcgagggaaatcctatagagttcagaggtctaggtcaaaaagcagaacaagaaggtccaggtcaagacctcgtctccgttctcatagtcgtagcagtgaaaggtccagtcacagaagaacgcgtagtcggtctcgggatagagaacgacgtaagggcagagataaagagaaaagagaaaaggagaaggataaagggaaggacaaggaattacataacatcaaacgtgg

SEQ ID NO: 2369 - DNA, 992 bp, Homo sapiens
  source 1..992: mol_type = unassigned DNA
ttcagaaaccatgaggaacagaatggccccagagaatccccagccagaccctttcatcaataggaattattccaacatgaaggtgataccaccacaggatccagctagtcccagtttcactctgttatccaagctggagtgcagtggcacggtctcggcttactgcagcctcaacctcccaggttcaactgatcctcccacctcagcctcccgagtagctgcgactacagcaatacggagaaggcataaagaacgtacttctttcacccaccaacagtatgaggagctagaagctctgtttagccagaccatgttcccagatagaaatcttcaggagaaactagctttgagactcgacctaccggagtcaacagtaaaggtttggttcaggaaccggcgattcaaattgaagaagcagcagcagcagcaatcagcaaagcaacgaaaccagatccttccatccaagaagaatgtgcccacctcccccagaacatcccccagtccttatgctttttctcctgtgatttcagatttctacagctcccttccatctcagcccttagacccttccaattgggcatggaactctaccttcactgagagttctaccagtgacttccaaatgcaagatactcagtgggagaggctggtggcctcggttcctgctttgtactctgatgcctatgacatattccaaatcatagaactgtacaatcttcctgatgagaatgagatatccagctcttctttccactgtctgtatcagtatctctcacccacaaagtaccaggtaggaggacagggttcctctctcagcatctttgctggtccagctgtaggcctatctcctgcacaaacctggcccaatatgacaagccaagcctttgaagcctacagtctaacagatagcctggaattccagaaaacctccaatatggtagacttgggatttctctgaccagagtactaataaatatagatcatttagaaaa

SEQ ID NO: 2370 - DNA, 8026 bp, Homo sapiens
  source 1..8026: mol_type = unassigned DNA
aaaatcaccatcatcctcagggagccccctcgccctcggaaaacaaaaccagacatgatcctgggctcctgcttctgaaagatctgcccgaccgaggaggagggagcctaggttcaagtcgcaggaaaggtcacggcagggaagccccctcagcccctccgcgtcgcctccccgcgggccgcccctctcggccctgcgccccgcggccccgcagcctccgcgcggcctcccgccccatccccgccactttccccggagctgggccgcgaacacctcactattgatggtgtagcgctttaggggaaggaggtgattgtctaggagtaactgtatgtgcgctcagcaccgggtcacaaccaccgtgggatccacttacagagaagatttgtggagagcttcagcctgtttatggtgttactgagaaaggaattgtggccatttgatataattctggatggaagacctcttatttgtattacattgaattagagcatttttgaaacgttggggttgttggagtggttggattttccctggaattgagtgagaaattcagaagactgaagcccaggcttactgtctacctttcacggaggcctagccgtgagaggacagaagaaggcacgtggcgaatcatgacagcggacaaagacaaagacaaagacaaagagaaggaccgggaccgagaccgggaccgagagagagagaaaagagacaaagcaagagagagtgagaattcaaggccacgccggagctgtaccttggaaggaggagccaaaaattatgctgagagtgatcacagtgaagacgaggacaatgacaacaatagtgccaccgcagaggagtccacgaagaagaataagaagaaaccaccgaaaaaaaagtctcgttatgaaaggacagataccggtgagataacatcctacatcactgaagatgatgtggtctacagaccaggagactgtgtgtatatcgagagtcggaggccaaacacaccgtatttcatctgtagcattcaagacttcaaactggtccacaactcccaggcctgttgcagatctccaactcctgctttgtgtgaccccccagcatgctctctgccggtggcatcacagccaccacagcatctttctgaagccgggagagggcctgtagggagtaagagggaccatctcctcatgaacgtcaaatggtactaccgtcaatctgaggttccagattctgtgtatcagcatttggttcaggatcgacataatgaaaatgactctggaagagaacttgtcattacagacccagttatcaagaaccgagagctcttcatttctgattacgttgacacttaccatgctgctgcccttagagggaagtgtaacatctcccatttttctgacatatttgctgctagagagtttaaagcccgagtggattcatttttctacatattaggatataaccctgagacaaggaggctgaacagtacccagggggagattcgtgtcggtcctagtcatcaggccaaacttccagatctgcaaccatttccttctccagatggtgatacagtgacccaacatgaggaactggtctggatgcctggagttaacgactgtgacctccttatgtacttgagggcagcaaggagcatggcggcatttgcaggaatgtgtgatggaggctctacagaggacggctgtgtcgcagcctctcgggatgacaccactctgaatgcactgaacacactgcatgaaagcggttacgatgctggcaaagccctgcagcgcctggtgaagaagcctgtgcccaagctcatcgagaagtgctggaccgaggacgaagtgaaacgcttcgttaagggactcaggcagtacgggaagaacttcttcagaattagaaaggagctgcttcccaataaggaaacaggggagctgatcaccttctattactattggaagaagacccccgaagcagccagctcccgagcccatcgtaggcaccgcaggcaggccgtgttcaggaggattaagactcgcaccgcgtccacacccgtcaacacaccctccagacccccgtccagtgaattcttggacctaagttcagccagtgaagatgacttcgacagtgaggacagtgagcaggagctgaaggggtacgcctgccgccactgcttcaccaccacctccaaagattggcaccacggaggccgggagaacatcctgctttgcaccgactgtcgcatccacttcaagaaatacggtgagctcccgcccattgagaagcccgtggacccgccaccgtttatgttcaaacccgtcaaggaagaggatgatgggctcagtgggaagcatagcatgaggacacggcggagtcggggctcgatgtcgacactacgcagtggtcggaagaagcagccagccagccctgatggtcgcacctcacccatcaatgaagacatccgctccagcggccggaactcccccagcgctgccagtacctccagcaatgacagtaaagcagagacagtgaagaagtcggccaagaaggtgaaggaggaagcctcttcccctcttaagagtaacaaacgccagcgggagaaggtggcctctgatacggaggaggctgacaggaccagctccaagaagacaaaaacgcaggagatcagcaggcccaactcgccatctgaaggtgagggagagagttcagacagtcgcagcgtcaacgatgagggtagcagtgaccccaaagacatcgaccaggacaatcgcagcacgtccccgagcatccccagcccccaggacaatgagagtgactcggactcgtcagcccagcagcagatgctgcaggcccagcccccagccttgcaggctcccactggggtcaccccagctccctcctcagctcctccagggacccctcagctgcccacgccagggcccacgccctctgccactgcagttcccccacagggctcccccacggcctcccaggcccctaaccagccacaggctcccacagcgcctgttccccacacccacatccaacaggcaccggccttgcacccccagcggccgccctcaccgcatcccccgccgcatccctcgccacatcccccgctgcagcctctgactgggtcggcgggccagccttctgcaccctctcatgcccagcccccactgcacggtcagggcccacccggccctcacagcctgcaggctgggcccctgctgcagcacccaggccccccacagccctttggcctccctccccaggcctcccaaggccaggcccctctggggacctccccagcagcagcgtaccctcacacctccctgcagctgccagcctctcagtcagcgctgcagtcccaacagcctccacgggagcagcccctgccaccagcgcccttggccatgccccacatcaagcccccgcctaccactcccatcccccagctgccggcgccacaggcccacaagcaccctccccacctctcggggccctcacccttctccatgaatgccaacctgcctccccctccagccctgaagcccctgagctccctgtccacacatcaccccccgtcggctcaccccccacccctgcaactcatgcctcagagccagccattgccctcctcgcccgcccagccccccgggctgacccagagccagaacctgcccccgccccctgcctcccacccccctacaggcctccaccaggtggccccccaacccccgtttgctcagcacccctttgtccctggaggccctcctcccatcacccctccgacctgcccctccacctctaccccaccggcgggacctggcacctcggcccagccaccctgctctggtgcggcggcttcaggaggcagcatagcgggggggtcgtcctgcccactccccaccgtccagatcaaggaggaggctctggacgacgctgaggagcctgagagcccccctcccccaccaaggagcccgtccccggagcccactgtggtggacacccccagtcacgccagccagtcagctaggttctacaaacacctggaccggggctacaactcgtgtgcccggacagacctgtacttcatgcctctggccgggtccaagctggccaagaagagggaggaggccattgagaaggccaagcgcgaggctgagcagaaagcccgagaggagcgagagcgggagaaggagaaggagaaggagcgggagcgggagcgagagcgggagcgcgaggcagagcgggcggctaaggcgtccagctcagcgcatgaaggtcgcctcagtgacccacagctcagtggtcctggccacatgcggccatccttcgagccaccaccaaccaccattgctgctgtgcccccctacatcgggcccgacacacctgcccttcggactctgagcgagtacgcccggccccacgtcatgtcgcccaccaaccgcaaccaccccttctacatgccccttaaccccacggaccccctgctggcctaccacatgcctggcctctacaacgtcgaccccaccatccgcgagcgggagctccgggagcgggagatccgagagcgggagatccgagagcgggagctgcgggagaggatgaagccgggcttcgaggtgaagcccccagagctggaccccctgcacccagccgccaaccccatggagcactttgcccggcacagcgccctcaccatccccccgaccgccgggccccacccttttgcttctttccacccgggcctgaaccccttggagagggagagactggccctggcgggcccccagctgcggcccgagatgagctaccctgacagactggcagccgagcgtatccacgcagagcgcatggcatcgctgaccagcgatcccctggcccgactgcagatgttcaacgtgactccgcaccatcaccagcactctcacattcactcccacctccacctccaccagcaggaccccctccaccaaggttcagcaggccccgttcacccgctggtcgaccccctgactgccggtccccacctggctcgcttcccctacccgcctggcactctccccaaccctctgcttggacagcccccacacgagcacgagatgcttcgccacccagttttcggcaccccctacccccgtgacctgcctggggccatcccaccccccatgtcagcagcccaccagctgcaggccatgcatgcccagtcggccgagctgcagagactggccatggagcagcagtggctgcatggacacccccacatgcatggtggccacctaccaagtcaggaagattattacagtcgactgaagaaagaaggtgacaagcagttataagttatttatttgttaacgctggctgtggaaaccccagttcttggggggagaaacaggactttttacataaaataggagctgcaaaagcaaaaagaatatcttctaaagatttctttatatatttaaaaacccacaactaaaaatgtatccacatagtagtgttcgtttgtcgagaggatttcctgagactggtttggatctccctgcatgacagtcccccagaaacttagtgagtcctggactggactgaacatccagaaagcttccctgcaatcttggggtttggctttagttttcttttccttgatttctcagtaggtgctagaatccagttcacacccttcactgtgcgtgcagacacactgacacactccgccacgagtgctccagagcccacgaggcttgcagatcgggggcataggaatttggaatccaagagctataatttttaaaaaaaaaaatcttttattttaatacattgtaggaaatcttcataattggagaaagttctgcagcatggctttttacgtctgtaaataaataattttagaacagcctttttttcttccataaactactattgtgatctattttttccagccatgtcactaattgtgaattcctaccaactattgacagaatacagagttgattttttaataaaaagttatatataattatccctttaattaaagggagcaaaggggcgttccacatggacagaggcttggaccgaggcctggtcacagcagcgagcatccagggtttgcagggacgatgttacagactctgttttctgcctggcgtttcacttgtgtctgctcctagcctgtgctctgccagcagcacagacatctgctccatcagacctcttccattttgcacagggagtgcaggaggtgaatgttcactttctgttctccagtgtcactgttctgtttccacgggatggaaagcgcatgggcctgtgtccattgtagatttccttctagatttctgtgtacacacacttgattgttctggatgaatgtcttttttaatactccgaaaatttcatcatctaagaaaatgattccatacaaataactcagcacacaagtgacccaggacatatgcctgccaaagggatgtgttagaaggctgccttctcatgcgcattgtcacttggatcttgtggtgaggacggccccatctttcttgccacagattgaggccacttttgagcaagggagatcctggagttaagacaggtgttgggggcagcctgtattttaccctaggggcaggtctgcatggtgaccccacattgcactggtaaaccatttgagtcccactcttcatcctggaagtgggaactggagtcccacccacagtgcattcagaaagcatgctgtgtgggggctgcttctcaggaggccaggcccttctgagcggaaccgtcctggagagagcctgccctcgtttccaggctgcagccgtaacgcactttctcccaggctgagggcgggtgttctggggtgtctgccctctgtcggccctgcttcctgccaggacgtggcctcttccgatccttttctctcagacactggaggtctcttctgccattgtgctggtcccatcccaagaattgtaggacagagaccacactgggtcggcggacacaaagtccatccaggacccaggccgcagagggagcaggaagagatgctgatagtttgatctagaaaccagcagctactggctcaaattcaggttctggcgtcaaatagcgacatttccagtttctcttaaaaaccgtgtttggtttcagttgggataggcttgttttgtctgttgaaaatgtttctagttttttttctttcatttttctctcattccatttctgccttaactttagtttgttcacagggaggcaaagctgacatgaaccttttgtcgtgggacttcaggccacattggcttgaaggcattcgtttccttctggggtggggacaggccctcatggcaggcttgttcccgtggctctgagcgaggcctcttcctgctgggctcccagactcctgcatccaggcccccaccttctcggcttctggtttttctttctttttggtagaacacaacatctaccattcagttaaaccttctttatctcctcctttggcatccatttttccaaagaagagtcgagtcctctgaggtctgtgcttgaaagccgtccgaaggcattcttgttagctttgcttttctccccatatcccaaggcgaagcgctgagattcttccatctaaaaaaccctcgacccgaaaccctcaccagataaactacagtttgtttaggaggccctgaccttcatggtgtctttgaagcccaaccactcggtttccttcggattttcctccctttgttcggggtttggtttggctcctctgtgtgtgtccgtatcttgttcggtgtcctcgaggttgagcttcactccactgcggcagaggcagcgtgcacactcggatttgctacgtttctatatatcttgaagctaaatgtatatatgagtagtttgccatgagataacacagtgtaaacagtagacacccagaaatcgtgacttctgtgttctctccatttgagtattttgtaatttttttgaaatatttgtggacataaataaaaccaagctacactacaacccttgg

SEQ ID NO: 2371 - DNA, 6733 bp, Homo sapiens
  source 1..6733: mol_type = unassigned DNA
ggcttaggtcatagcacaagctcagtgaaagctctatgaggtctctgagactgcatgtgcctccattttgagttgttagtgtagaaaagggcagagttttagcagaaagtaaaggttcaggaatccagctagactcaccagagcccgtgttagtcatggatgatccattcagcccctgcaggaggctgaacagtacccagggggagattcgtgtcggtcctagtcatcaggccaaacttccagatctgcaaccatttccttctccagatggtgatacagtgacccaacatgaggaactggtctggatgcctggagttaacgactgtgacctccttatgtacttgagggcagcaaggagcatggcggcatttgcaggaatgtgtgatggaggctctacagaggacggctgtgtcgcagcctctcgggatgacaccactctgaatgcactgaacacactgcatgaaagcggttacgatgctggcaaagccctgcagcgcctggtgaagaagcctgtgcccaagctcatcgagaagtgctggaccgaggacgaagtgaaacgcttcgttaagggactcaggcagtacgggaagaacttcttcagaattagaaaggagctgcttcccaataaggaaacaggggagctgatcaccttctattactattggaagaagacccccgaagcagccagctcccgagcccatcgtaggcaccgcaggcaggccgtgttcaggaggattaagactcgcaccgcgtccacacccgtcaacacaccctccagacccccgtccagtgaattcttggacctaagttcagccagtgaagatgacttcgacagtgaggacagtgagcaggagctgaaggggtacgcctgccgccactgcttcaccaccacctccaaagattggcaccacggaggccgggagaacatcctgctttgcaccgactgtcgcatccacttcaagaaatacggtgagctcccgcccattgagaagcccgtggacccgccaccgtttatgttcaaacccgtcaaggaagaggatgatgggctcagtgggaagcatagcatgaggacacggcggagtcggggctcgatgtcgacactacgcagtggtcggaagaagcagccagccagccctgatggtcgcacctcacccatcaatgaagacatccgctccagcggccggaactcccccagcgctgccagtacctccagcaatgacagtaaagcagagacagtgaagaagtcggccaagaaggtgaaggaggaagcctcttcccctcttaagagtaacaaacgccagcgggagaaggtggcctctgatacggaggaggctgacaggaccagctccaagaagacaaaaacgcaggagatcagcaggcccaactcgccatctgaaggtgagggagagagttcagacagtcgcagcgtcaacgatgagggtagcagtgaccccaaagacatcgaccaggacaatcgcagcacgtccccgagcatccccagcccccaggacaatgagagtgactcggactcgtcagcccagcagcagatgctgcaggcccagcccccagccttgcaggctcccactggggtcaccccagctccctcctcagctcctccagggacccctcagctgcccacgccagggcccacgccctctgccactgcagttcccccacagggctcccccacggcctcccaggcccctaaccagccacaggctcccacagcgcctgttccccacacccacatccaacaggcaccggccttgcacccccagcggccgccctcaccgcatcccccgccgcatccctcgccacatcccccgctgcagcctctgactgggtcggcgggccagccttctgcaccctctcatgcccagcccccactgcacggtcagggcccacccggccctcacagcctgcaggctgggcccctgctgcagcacccaggccccccacagccctttggcctccctccccaggcctcccaaggccaggcccctctggggacctccccagcagcagcgtaccctcacacctccctgcagctgccagcctctcagtcagcgctgcagtcccaacagcctccacgggagcagcccctgccaccagcgcccttggccatgccccacatcaagcccccgcctaccactcccatcccccagctgccggcgccacaggcccacaagcaccctccccacctctcggggccctcacccttctccatgaatgccaacctgcctccccctccagccctgaagcccctgagctccctgtccacacatcaccccccgtcggctcaccccccacccctgcaactcatgcctcagagccagccattgccctcctcgcccgcccagccccccgggctgacccagagccagaacctgcccccgccccctgcctcccacccccctacaggcctccaccaggtggccccccaacccccgtttgctcagcacccctttgtccctggaggccctcctcccatcacccctccgacctgcccctccacctctaccccaccggcgggacctggcacctcggcccagccaccctgctctggtgcggcggcttcaggaggcagcatagcgggggggtcgtcctgcccactccccaccgtccagatcaaggaggaggctctggacgacgctgaggagcctgagagcccccctcccccaccaaggagcccgtccccggagcccactgtggtggacacccccagtcacgccagccagtcagctaggttctacaaacacctggaccggggctacaactcgtgtgcccggacagacctgtacttcatgcctctggccgggtccaagctggccaagaagagggaggaggccattgagaaggccaagcgcgaggctgagcagaaagcccgagaggagcgagagcgggagaaggagaaggagaaggagcgggagcgggagcgagagcgggagcgcgaggcagagcgggcggctaaggcgtccagctcagcgcatgaaggtcgcctcagtgacccacagctcagtggtcctggccacatgcggccatccttcgagccaccaccaaccaccattgctgctgtgcccccctacatcgggcccgacacacctgcccttcggactctgagcgagtacgcccggccccacgtcatgtcgcccaccaaccgcaaccaccccttctacatgccccttaaccccacggaccccctgctggcctaccacatgcctggcctctacaacgtcgaccccaccatccgcgagcgggagctccgggagcgggagatccgagagcgggagatccgagagcgggagctgcgggagaggatgaagccgggcttcgaggtgaagcccccagagctggaccccctgcacccagccgccaaccccatggagcactttgcccggcacagcgccctcaccatccccccgaccgccgggccccacccttttgcttctttccacccgggcctgaaccccttggagagggagagactggccctggcgggcccccagctgcggcccgagatgagctaccctgacagactggcagccgagcgtatccacgcagagcgcatggcatcgctgaccagcgatcccctggcccgactgcagatgttcaacgtgactccgcaccatcaccagcactctcacattcactcccacctccacctccaccagcaggaccccctccaccaaggttcagcaggccccgttcacccgctggtcgaccccctgactgccggtccccacctggctcgcttcccctacccgcctggcactctccccaaccctctgcttggacagcccccacacgagcacgagatgcttcgccacccagttttcggcaccccctacccccgtgacctgcctggggccatcccaccccccatgtcagcagcccaccagctgcaggccatgcatgcccagtcggccgagctgcagagactggccatggagcagcagtggctgcatggacacccccacatgcatggtggccacctaccaagtcaggaagattattacagtcgactgaagaaagaaggtgacaagcagttataagttatttatttgttaacgctggctgtggaaaccccagttcttggggggagaaacaggactttttacataaaataggagctgcaaaagcaaaaagaatatcttctaaagatttctttatatatttaaaaacccacaactaaaaatgtatccacatagtagtgttcgtttgtcgagaggatttcctgagactggtttggatctccctgcatgacagtcccccagaaacttagtgagtcctggactggactgaacatccagaaagcttccctgcaatcttggggtttggctttagttttcttttccttgatttctcagtaggtgctagaatccagttcacacccttcactgtgcgtgcagacacactgacacactccgccacgagtgctccagagcccacgaggcttgcagatcgggggcataggaatttggaatccaagagctataatttttaaaaaaaaaaatcttttattttaatacattgtaggaaatcttcataattggagaaagttctgcagcatggctttttacgtctgtaaataaataattttagaacagcctttttttcttccataaactactattgtgatctattttttccagccatgtcactaattgtgaattcctaccaactattgacagaatacagagttgattttttaataaaaagttatatataattatccctttaattaaagggagcaaaggggcgttccacatggacagaggcttggaccgaggcctggtcacagcagcgagcatccagggtttgcagggacgatgttacagactctgttttctgcctggcgtttcacttgtgtctgctcctagcctgtgctctgccagcagcacagacatctgctccatcagacctcttccattttgcacagggagtgcaggaggtgaatgttcactttctgttctccagtgtcactgttctgtttccacgggatggaaagcgcatgggcctgtgtccattgtagatttccttctagatttctgtgtacacacacttgattgttctggatgaatgtcttttttaatactccgaaaatttcatcatctaagaaaatgattccatacaaataactcagcacacaagtgacccaggacatatgcctgccaaagggatgtgttagaaggctgccttctcatgcgcattgtcacttggatcttgtggtgaggacggccccatctttcttgccacagattgaggccacttttgagcaagggagatcctggagttaagacaggtgttgggggcagcctgtattttaccctaggggcaggtctgcatggtgaccccacattgcactggtaaaccatttgagtcccactcttcatcctggaagtgggaactggagtcccacccacagtgcattcagaaagcatgctgtgtgggggctgcttctcaggaggccaggcccttctgagcggaaccgtcctggagagagcctgccctcgtttccaggctgcagccgtaacgcactttctcccaggctgagggcgggtgttctggggtgtctgccctctgtcggccctgcttcctgccaggacgtggcctcttccgatccttttctctcagacactggaggtctcttctgccattgtgctggtcccatcccaagaattgtaggacagagaccacactgggtcggcggacacaaagtccatccaggacccaggccgcagagggagcaggaagagatgctgatagtttgatctagaaaccagcagctactggctcaaattcaggttctggcgtcaaatagcgacatttccagtttctcttaaaaaccgtgtttggtttcagttgggataggcttgttttgtctgttgaaaatgtttctagttttttttctttcatttttctctcattccatttctgccttaactttagtttgttcacagggaggcaaagctgacatgaaccttttgtcgtgggacttcaggccacattggcttgaaggcattcgtttccttctggggtggggacaggccctcatggcaggcttgttcccgtggctctgagcgaggcctcttcctgctgggctcccagactcctgcatccaggcccccaccttctcggcttctggtttttctttctttttggtagaacacaacatctaccattcagttaaaccttctttatctcctcctttggcatccatttttccaaagaagagtcgagtcctctgaggtctgtgcttgaaagccgtccgaaggcattcttgttagctttgcttttctccccatatcccaaggcgaagcgctgagattcttccatctaaaaaaccctcgacccgaaaccctcaccagataaactacagtttgtttaggaggccctgaccttcatggtgtctttgaagcccaaccactcggtttccttcggattttcctccctttgttcggggtttggtttggctcctctgtgtgtgtccgtatcttgttcggtgtcctcgaggttgagcttcactccactgcggcagaggcagcgtgcacactcggatttgctacgtttctatatatcttgaagctaaatgtatatatgagtagtttgccatgagataacacagtgtaaacagtagacacccagaaatcgtgacttctgtgttctctccatttgagtattttgtaatttttttgaaatatttgtggacataaataaaaccaagctacactac

SEQ ID NO: 2372 - DNA, 5790 bp, Homo sapiens
  source 1..5790: mol_type = unassigned DNA
cacagacgctcgcgagcaaccctccgcgctccggagcctcctcagcctcccgcacaccccgagacgctcgccccgctgggcctcggtccccgcctcctcccccgtccttttcccctctctcgctccccacattgtctctgcctcattttctctcctagttgaggattaaaaaaaaaaaaaaatcaccatcatcctcagggagccccctcgccctcggaaaacaaaaccagacatgatcctgggctcctgcttctgaaagatctgcccgaccgaggaggagggagcctaggttcaagtcgcaggaaaggtcacggcagggaagccccctcagcccctccgcgtcgcctccccgcgggccgcccctctcggccctgcgccccgcggccccgcagcctccgcgcggcctcccgccccatccccgccactttccccggagctgggccgcgaacacctcactattgatggtgtagcgctttaggggaagcatttttgaaacgttggggttgttggagtggttggattttccctggaattgagtgagaaattcagaagactgaagcccaggcttactgtctacctttcacggaggcctagccgtgagaggacagaagaaggcacgtggcgaatcatgacagcggacaaagacaaagacaaagacaaagagaaggaccgggaccgagaccgggaccgagagagagagaaaagagacaaagcaagagagagtgagaattcaaggccacgccggagctgtaccttggaaggaggagccaaaaattatgctgagagtgatcacagtgaagacgaggacaatgacaacaatagtgccaccgcagaggagtccacgaagaagaataagaagaaaccaccgaaaaaaaagtctcgttatgaaaggacagataccggtgagataacatcctacatcactgaagatgatgtggtctacagaccaggagactgtgtgtatatcgagagtcggaggccaaacacaccgtatttcatctgtagcattcaagacttcaaactggtccacaactcccaggcctgttgcagatctccaactcctgctttgtgtgaccccccagcatgctctctgccggtggcatcacagccaccacagcatctttctgaagccgggagagggcctgtagggagtaagagggaccatctcctcatgaacgtcaaatggtactaccgtcaatctgaggttccagattctgtgtatcagcatttggttcaggatcgacataatgaaaatgactctggaagagaacttgtcattacagacccagttatcaagaaccgagagctcttcatttctgattacgttgacacttaccatgctgctgcccttagagggaagtgtaacatctcccatttttctgacatatttgctgctagagagtttaaagcccgagtggattcatttttctacatattaggatataaccctgagacaaggaggctgaacagtacccagggggagattcgtgtcggtcctagtcatcaggccaaacttccagatctgcaaccatttccttctccagatggtgatacagtgacccaacatgaggaactggtctggatgcctggagttaacgactgtgacctccttatgtacttgagggcagcaaggagcatggcggcatttgcaggaatgtgtgatggaggctctacagaggacggctgtgtcgcagcctctcgggatgacaccactctgaatgcactgaacacactgcatgaaagcggttacgatgctggcaaagccctgcagcgcctggtgaagaagcctgtgcccaagctcatcgagaagtgctggaccgaggacgaagtgaaacgcttcgttaagggactcaggcagtacgggaagaacttcttcagaattagaaaggagctgcttcccaataaggaaacaggggagctgatcaccttctattactattggaagaagacccccgaagcagccagctcccgagcccatcgtaggcaccgcaggcaggccgtgttcaggaggattaagactcgcaccgcgtccacacccgtcaacacaccctccagacccccgtccagtgaattcttggacctaagttcagccagtgaagatgacttcgacagtgaggacagtgagcaggagctgaaggggtacgcctgccgccactgcttcaccaccacctccaaagattggcaccacggaggccgggagaacatcctgctttgcaccgactgtcgcatccacttcaagaaatacggtgagctcccgcccattgagaagcccgtggacccgccaccgtttatgttcaaacccgtcaaggaagaggatgatgggctcagtgggaagcatagcatgaggacacggcggagtcggggctcgatgtcgacactacgcagtggtcggaagaagcagccagccagccctgatggtcgcacctcacccatcaatgaagacatccgctccagcggccggaactcccccagcgctgccagtacctccagcaatgacagtaaagcagagacagtgaagaagtcggccaagaaggtgaaggaggaagcctcttcccctcttaagagtaacaaacgccagcgggagaaggtggcctctgatacggaggaggctgacaggaccagctccaagaagacaaaaacgcaggagatcagcaggcccaactcgccatctgaaggtgagggagagagttcagacagtcgcagcgtcaacgatgagggtagcagtgaccccaaagacatcgaccaggacaatcgcagcacgtccccgagcatccccagcccccaggacaatgagagtgactcggactcgtcagcccagcagcagatgctgcaggcccagcccccagccttgcaggctcccactggggtcaccccagctccctcctcagctcctccagggacccctcagctgcccacgccagggcccacgccctctgccactgcagttcccccacagggctcccccacggcctcccaggcccctaaccagccacaggctcccacagcgcctgttccccacacccacatccaacaggcaccggccttgcacccccagcggccgccctcaccgcatcccccgccgcatccctcgccacatcccccgctgcagcctctgactgggtcggcgggccagccttctgcaccctctcatgcccagcccccactgcacggtcagggcccacccggccctcacagcctgcaggctgggcccctgctgcagcacccaggccccccacagccctttggcctccctccccaggcctcccaaggccaggcccctctggggacctccccagcagcagcgtaccctcacacctccctgcagctgccagcctctcagtcagcgctgcagtcccaacagcctccacgggagcagcccctgccaccagcgcccttggccatgccccacatcaagcccccgcctaccactcccatcccccagctgccggcgccacaggcccacaagcaccctccccacctctcggggccctcacccttctccatgaatgccaacctgcctccccctccagccctgaagcccctgagctccctgtccacacatcaccccccgtcggctcaccccccacccctgcaactcatgcctcagagccagccattgccctcctcgcccgcccagccccccgggctgacccagagccagaacctgcccccgccccctgcctcccacccccctacaggcctccaccaggtggccccccaacccccgtttgctcagcacccctttgtccctggaggccctcctcccatcacccctccgacctgcccctccacctctaccccaccggcgggacctggcacctcggcccagccaccctgctctggtgcggcggcttcaggaggcagcatagcgggggggtcgtcctgcccactccccaccgtccagatcaaggaggaggctctggacgacgctgaggagcctgagagcccccctcccccaccaaggagcccgtccccggagcccactgtggtggacacccccagtcacgccagccagtcagctaggttctacaaacacctggaccggggctacaactcgtgtgcccggacagacctgtacttcatgcctctggccgggtccaagctggccaagaagagggaggaggccattgagaaggccaagcgcgaggctgagcagaaagcccgagaggagcgagagcgggagaaggagaaggagaaggagcgggagcgggagcgagagcgggagcgcgaggcagagcgggcggctaaggcgtccagctcagcgcatgaaggtcgcctcagtgacccacagctcagtggtcctggccacatgcggccatccttcgagccaccaccaaccaccattgctgctgtgcccccctacatcgggcccgacacacctgcccttcggactctgagcgagtacgcccggccccacgtcatgtcgcccaccaaccgcaaccaccccttctacatgccccttaaccccacggaccccctgctggcctaccacatgcctggcctctacaacgtcgaccccaccatccgcgagcgggagctccgggagcgggagatccgagagcgggagatccgagagcgggagctgcgggagaggatgaagccgggcttcgaggtgaagcccccagagctggaccccctgcacccagccgccaaccccatggagcactttgcccggcacagcgccctcaccatccccccgaccgccgggccccacccttttgcttctttccacccgggcctgaaccccttggagagggagagactggccctggcgggcccccagctgcggcccgagatgagctaccctgacagactggcagccgagcgtatccacgcagagcgcatggcatcgctgaccagcgatcccctggcccgactgcagatgttcaacgtgactccgcaccatcaccagcactctcacattcactcccacctccacctccaccagcaggaccccctccaccaaggttcagcaggccccgttcacccgctggtcgaccccctgactgccggtccccacctggctcgcttcccctacccgcctggcactctccccaaccctctgcttggacagcccccacacgagcacgagatgcttcgccacccagttttcggcaccccctacccccgtgacctgcctggggccatcccaccccccatgtcagcagcccaccagctgcaggccatgcatgcccagtcggccgagctgcagagactggccatggagcagcagtggctgcatggacacccccacatgcatggtggccacctaccaagtcaggaagattattacagtcgactgaagaaagaaggtgacaagcagttataagttatttatttgttaacgctggctgtggaaaccccagttcttggggggagaaacaggactttttacataaaataggagctgcaaaagcaaaaagaatatcttctaaagatttctttatatatttaaaaacccacaactaaaaatgtatccacatagtagtgttcgtttgtcgagaggatttcctgagactggtttggatctccctgcatgacagtcccccagaaacttagtgagtcctggactggactgaacatccagaaagcttccctgcaatcttggggtttggctttagttttcttttccttgatttctcagtaggtgctagaatccagttcacacccttcactgtgcgtgcagacacactgacacactccgccacgagtgctccagagcccacgaggcttgcagatcgggggcataggaatttggaatccaagagctataatttttaaaaaaaaaaa

SEQ ID NO: 2373 - DNA, 4598 bp, Homo sapiens
  source 1..4598: mol_type = unassigned DNA
gagccggagcccagtgacaggcgacggcctcttgccgccccggaccccgggcgcttacctgtggctgctggggtcggccgcccgggaccaggctgggagccccgagaaacgcttcgttaagggactcaggcagtacgggaagaacttcttcagaattagaaaggagctgcttcccaataaggaaacaggggagctgatcaccttctattactattggaagaagacccccgaagcagccagctcccgagcccatcgtaggcaccgcaggcaggccgtgttcaggaggattaagactcgcaccgcgtccacacccgtcaacacaccctccagacccccgtccagtgaattcttggacctaagttcagccagtgaagatgacttcgacagtgaggacagtgagcaggagctgaaggggtacgcctgccgccactgcttcaccaccacctccaaagattggcaccacggaggccgggagaacatcctgctttgcaccgactgtcgcatccacttcaagaaatacggtgagctcccgcccattgagaagcccgtggacccgccaccgtttatgttcaaacccgtcaaggaagaggatgatgggctcagtgggaagcatagcatgaggacacggcggagtcggggctcgatgtcgacactacgcagtggtcggaagaagcagccagccagccctgatggtcgcacctcacccatcaatgaagacatccgctccagcggccggaactcccccagcgctgccagtacctccagcaatgacagtaaagcagagacagtgaagaagtcggccaagaaggtgaaggaggaagcctcttcccctcttaagagtaacaaacgccagcgggagaaggtggcctctgatacggaggaggctgacaggaccagctccaagaagacaaaaacgcaggagatcagcaggcccaactcgccatctgaaggtgagggagagagttcagacagtcgcagcgtcaacgatgagggtagcagtgaccccaaagacatcgaccaggacaatcgcagcacgtccccgagcatccccagcccccaggacaatgagagtgactcggactcgtcagcccagcagcagatgctgcaggcccagcccccagccttgcaggctcccactggggtcaccccagctccctcctcagctcctccagggacccctcagctgcccacgccagggcccacgccctctgccactgcagttcccccacagggctcccccacggcctcccaggcccctaaccagccacaggctcccacagcgcctgttccccacacccacatccaacaggcaccggccttgcacccccagcggccgccctcaccgcatcccccgccgcatccctcgccacatcccccgctgcagcctctgactgggtcggcgggccagccttctgcaccctctcatgcccagcccccactgcacggtcagggcccacccggccctcacagcctgcaggctgggcccctgctgcagcacccaggccccccacagccctttggcctccctccccaggcctcccaaggccaggcccctctggggacctccccagcagcagcgtaccctcacacctccctgcagctgccagcctctcagtcagcgctgcagtcccaacagcctccacgggagcagcccctgccaccagcgcccttggccatgccccacatcaagcccccgcctaccactcccatcccccagctgccggcgccacaggcccacaagcaccctccccacctctcggggccctcacccttctccatgaatgccaacctgcctccccctccagccctgaagcccctgagctccctgtccacacatcaccccccgtcggctcaccccccacccctgcaactcatgcctcagagccagccattgccctcctcgcccgcccagccccccgggctgacccagagccagaacctgcccccgccccctgcctcccacccccctacaggcctccaccaggtggccccccaacccccgtttgctcagcacccctttgtccctggaggccctcctcccatcacccctccgacctgcccctccacctctaccccaccggcgggacctggcacctcggcccagccaccctgctctggtgcggcggcttcaggaggcagcatagcgggggggtcgtcctgcccactccccaccgtccagatcaaggaggaggctctggacgacgctgaggagcctgagagcccccctcccccaccaaggagcccgtccccggagcccactgtggtggacacccccagtcacgccagccagtcagctaggttctacaaacacctggaccggggctacaactcgtgtgcccggacagacctgtacttcatgcctctggccgggtccaagctggccaagaagagggaggaggccattgagaaggccaagcgcgaggctgagcagaaagcccgagaggagcgagagcgggagaaggagaaggagaaggagcgggagcgggagcgagagcgggagcgcgaggcagagcgggcggctaaggcgtccagctcagcgcatgaaggtcgcctcagtgacccacagctcagtggtcctggccacatgcggccatccttcgagccaccaccaaccaccattgctgctgtgcccccctacatcgggcccgacacacctgcccttcggactctgagcgagtacgcccggccccacgtcatgtcgcccaccaaccgcaaccaccccttctacatgccccttaaccccacggaccccctgctggcctaccacatgcctggcctctacaacgtcgaccccaccatccgcgagcgggagctccgggagcgggagatccgagagcgggagatccgagagcgggagctgcgggagaggatgaagccgggcttcgaggtgaagcccccagagctggaccccctgcacccagccgccaaccccatggagcactttgcccggcacagcgccctcaccatccccccgaccgccgggccccacccttttgcttctttccacccgggcctgaaccccttggagagggagagactggccctggcgggcccccagctgcggcccgagatgagctaccctgacagactggcagccgagcgtatccacgcagagcgcatggcatcgctgaccagcgatcccctggcccgactgcagatgttcaacgtgactccgcaccatcaccagcactctcacattcactcccacctccacctccaccagcaggaccccctccaccaaggttcagcaggccccgttcacccgctggtcgaccccctgactgccggtccccacctggctcgcttcccctacccgcctggcactctccccaaccctctgcttggacagcccccacacgagcacgagatgcttcgccacccagttttcggcaccccctacccccgtgacctgcctggggccatcccaccccccatgtcagcagcccaccagctgcaggccatgcatgcccagtcggccgagctgcagagactggccatggagcagcagtggctgcatggacacccccacatgcatggtggccacctaccaagtcaggaagattattacagtcgactgaagaaagaaggtgacaagcagttataagttatttatttgttaacgctggctgtggaaaccccagttcttggggggagaaacaggactttttacataaaataggagctgcaaaagcaaaaagaatatcttctaaagatttctttatatatttaaaaacccacaactaaaaatgtatccacatagtagtgttcgtttgtcgagaggatttcctgagactggtttggatctccctgcatgacagtcccccagaaacttagtgagtcctggactggactgaacatccagaaagcttccctgcaatcttggggtttggctttagttttcttttccttgatttctcagtaggtgctagaatccagttcacacccttcactgtgcgtgcagacacactgacacactccgccacgagtgctccagagcccacgaggcttgcagatcgggggcataggaatttggaatccaagagctataatttttaaaaaaaaaaatcttttattttaatacattgtaggaaatcttcataattggagaaagttctgcagcatggctttttacgtctgtaaataaataattttagaacagcctttttttcttccataaactactattgtgatctattttttccagccatgtcactaattgtgaattcctaccaactattgacagaatacagagttgattttttaataaaaagttatatataattatccctttaattaaagggagcaaaggggcgttccacatggacagaggcttggaccgaggcctggtcacagcagcgagcatccagggtttgcagggacgatgttacagactctgttttctgcctggcgtttcacttgtgtctgctcctagcctgtgctctgccagcagcacagacatctgctccatcagacctcttccattttgcacagggagtgcaggaggtgaatgttcactttctgttctccagtgtcactgttctgtttccacgggatggaaagcgcatgggcctgtgtccattgtagatttccttctagat

SEQ ID NO: 2374 - DNA, 2427 bp, Homo sapiens
  source 1..2427: mol_type = unassigned DNA
cctcgggttcgcggcccggccggtgagcaacggctctgcggccatggcgagcggcgagcattcccccggcagcggcgcggcccggcggccgctgcactccgcgcaggctgtggacgtggcctcggcctccaacttccgggcctttgagctgctgcacttgcacctggacctgcgggctgagttcgggcctccagggcccggcgcagggagccgggggctgagcggcaccgcggtcctggacctgcgctgcctggagcccgagggcgccgccgagctgcggctggactcgcacccgtgcctggaggtgacggcggcggcgctgcggcgggagcggcccggctcggaggagccgcctgcggagcccgtgagcttctacacgcagcccttctcgcactatggccaggccctgtgcgtgtccttcccgcagccctgccgcgccgccgagcgcctccaggtgctgctcacctaccgcgtcggggagggacccggggtttgctggttggctcccgagcagacagcaggaaagaagaagcccttcgtgtacacccagggccaggctgtcctaaaccgggccttcttcccttgcttcgacacgcctgctgttaaatacaagtattcagctcttattgaggtcccagatggcttcacagctgtgatgagtgctagcacctgggagaagagaggtccaaataagttcttcttccagatgtgtcagcccatcccctcctatctgatagctttggccatcggagatctggtttcggctgaagttggacccaggagccgggtgtgggctgagccctgcctgattgatgctgccaaggaggagtacaacggggtgatagaagaatttttggcaacaggagagaagctttttggaccttatgtttggggaaggtatgacttgctcttcatgccaccgtcctttccatttggaggaatggagaacccttgtctgacctttgtcaccccctgcctgctagctggggaccgctccttggcagatgtcatcatccatgagatctcccacagttggtttgggaacctggtcaccaacgccaactggggtgaattctggctcaatgaaggtttcaccatgtacgcccagaggaggatctccaccatcctctttggcgctgcgtacacctgcttggaggctgcaacggggcgggctctgctgcgtcagcacatggacatcactggagaggaaaacccactcaacaagctccgcgtgaagattgaaccaggcgttgacccggacgacacctataatgagaccccctacgagaaaggtttctgctttgtttcatacctggcccacttggtgggtgatcaggatcagtttgacagttttctcaaggcctatgtgcatgaattcaaattccgaagcatcttagccgatgactttctggacttctacttggaatatttccctgagcttaagaaaaagagagtggatatcattccaggttttgagtttgatcgatggctgaatacccccggctggcccccgtacctccctgatctctcccctggggactcactcatgaagcctgctgaagagctagcccaactgtgggcagccgaggagctggacatgaaggccattgaagccgtggccatctctccctggaagacctaccagctggtctacttcctggataagatcctccagaaatcccctctccctcctgggaatgtgaaaaaacttggagacacatacccaagtatctcaaatgcccggaatgcagagctccggctgcgatggggccaaatcgtccttaagaacgaccaccaggaagatttctggaaagtgaaggagttcctgcataaccaggggaagcagaagtatacacttccgctgtaccacgcaatgatgggtggcagtgaggtggcccagaccctcgccaaggagacttttgcatccaccgcctcccagctccacagcaatgttgtcaactatgtccagcagatcgtggcacccaagggcagttagaggctcgtgtgcatggcccctgcctcttcaggctctccaggctttcagaataattgtttgttcccaaattcctgttccctgatcaacttcctggagtttatatcccctcaggataatctattctctagcttaggtatctgtgactcttgggcctctgctctggtgggaacttacttctctatagcccactgagccccgagacagagaacctgcccacagctctccccgctacaggctgcaggcactgcagggcagcgggtattctcctccccacctaagtctctgggaagaagtggagaggactgatgctcttcttttttctctttctgtcctttttcttgctgattttatgcaaagggctggcattctgattgttcttttttcaggtttaatccttattttaataaagttttcaagcaaaaattaagtta

SEQ ID NO: 2375 - DNA, 2282 bp, Homo sapiens
  source 1..2282: mol_type = unassigned DNA
aacggctctgcggccatggcgagcggcgagcattcccccggcagcggcgcggcccggcggccgctgcactccgcgcaggctgtggacgtggcctcggcctccaacttccgggcctttgagctgctgcacttgcacctggacctgcgggctgagttcgggcctccagggcccggcgcagggagccgggggctgagcggcaccgcggtcctggacctgcgctgcctggagcccgagggcgccgccgagctgcggctggactcgcacccgtgcctggaggtgacggcggcggcgctgcggcgggagcggcccggctcggaggagccgcctgcggagcccgtgagcttctacacgcagcccttctcgcactatggccaggccctgtgcgtgtccttcccgcagccctgccgcgccgccgagcgcctccaggtgctgctcacctaccgcgtcggggagggacccggggtttgctggttggctcccgagcagacagcaggaaagaagaagcccttcgtgtacacccagggccaggctgtcctaaaccgggccttcttcccttgcttcgacacgcctgctgttaaatacaagtattcagctcttattgaggtcccagatggcttcacagctgtgatgagtgctagcacctgggagaagagaggtccaaataagttcttcttccagatgtgtcagcccatcccctcctatctgatagctttggccatcggagatctggtttcggctgaagttggacccaggtatgacttgctcttcatgccaccgtcctttccatttggaggaatggagaacccttgtctgacctttgtcaccccctgcctgctagctggggaccgctccttggcagatgtcatcatccatgagatctcccacagttggtttgggaacctggtcaccaacgccaactggggtgaattctggctcaatgaaggtttcaccatgtacgcccagaggaggatctccaccatcctctttggcgctgcgtacacctgcttggaggctgcaacggggcgggctctgctgcgtcagcacatggacatcactggagaggaaaacccactcaacaagctccgcgtgaagattgaaccaggcgttgacccggacgacacctataatgagaccccctacgagaaaggtttctgctttgtttcatacctggcccacttggtgggtgatcaggatcagtttgacagttttctcaaggcctatgtgcatgaattcaaattccgaagcatcttagccgatgactttctggacttctacttggaatatttccctgagcttaagaaaaagagagtggatatcattccaggttttgagtttgatcgatggctgaatacccccggctggcccccgtacctccctgatctctcccctggggactcactcatgaagcctgctgaagagctagcccaactgtgggcagccgaggagctggacatgaaggccattgaagccgtggccatctctccctggaagacctaccagctggtctacttcctggataagatcctccagaaatcccctctccctcctgggaatgtgaaaaaacttggagacacatacccaagtatctcaaatgcccggaatgcagagctccggctgcgatggggccaaatcgtccttaagaacgaccaccaggaagatttctggaaagtgaaggagttcctgcataaccaggggaagcagaagtatacacttccgctgtaccacgcaatgatgggtggcagtgaggtggcccagaccctcgccaaggagacttttgcatccaccgcctcccagctccacagcaatgttgtcaactatgtccagcagatcgtggcacccaagggcagttagaggctcgtgtgcatggcccctgcctcttcaggctctccaggctttcagaataattgtttgttcccaaattcctgttccctgatcaacttcctggagtttatatcccctcaggataatctattctctagcttaggtatctgtgactcttgggcctctgctctggtgggaacttacttctctatagcccactgagccccgagacagagaacctgcccacagctctccccgctacaggctgcaggcactgcagggcagcgggtattctcctccccacctaagtctctgggaagaagtggagaggactgatgctcttcttttttctctttctgtcctttttcttgctgattttatgcaaagggctggcattctgattgttcttttttcaggtttaatccttattttaataaagttttcaagcaaaaattaagtta

SEQ ID NO: 2376 - DNA, 1166 bp, Homo sapiens
  source 1..1166: mol_type = unassigned DNA
gccactgggcggtgcatccttcaccctttccgtccttccgcgtctcctccctggccctggaggcttgtccagattgcgccgcattcccgctcatcgcacactgccgtttctaacattttccgtggctttctagatgacctgttgttcatgcacttcacttagtgccctcttggacttttgggccgaggtttgctggttggctcccgagcagacagcaggaaagaagaagcccttcgtgtacacccagggccaggctgtcctaaaccgggccttcttcccttgcttcgacacgcctgctgttaaatacaagtattcagctcttattgaggtcccagatggcttcacagctgtgatgagtgctagcacctgggagaagagaggtccaaataagttcttcttccagatgtgtcagcccatcccctcctatctgatagctttggccatcggagatctggtttcggctgaagttggacccaggagccgggtgtgggctgagccctgcctgattgatgctgccaaggaggagtacaacggggtgatagaagaatttttggcaacaggagagaagctttttggaccttatgtttggggaaggtatgacttgctcttcatgccaccgtcctttccatttggaggaatggagaacccttgtctgacctttgtcaccccctgcctgctagctggggaccgctccttggcagatgtcatcatccatgagatctcccacagttggtttgggaacctggtcaccaacgccaactggggtgaattctggctcaatgaaggtttcaccatgtacgcccagaggaggatctccaccatcctctttggcgctgcgtacacctgcttggaggctgcaacggggcgggctctgctgcgtcagcacatggacatcactggagaggaaaacccactcaacaagctccgcgtgaagattgaaccaggcgttgacccggacgacacctataatgagaccccctacgagaaaggtttctgctttgtttcatacctggcccacttggtgggtgatcaggatcagtttgacagttttctcaaggcctatgtgcatgaattcaaattccgaagcatcttagccgatgactttctggacttctacttggaatatttccctgagcttaagaaaaagagagtggatatcattccag

SEQ ID NO: 2377 - DNA, 505 bp, Homo sapiens
  source 1..505: mol_type = unassigned DNA
ctgattgatgctgccaaggaggagtacaacggggtgatagaagaatttttggcaacaggagagaagctttttggaccttatgtttggggaaggtatgacttgctcttcatgccaccgtcctttccatttggaggaatggagaacccttgtctgacctttgtcaccccctgcctgctagctggggaccgctccttggcagatgtcatcatccatgagatctcccacagttggtttgggaacctggtcaccaacgccaactggggtgaattctggctcaatgaaggtttcaccatgtacgcccagaggaggatctccaccatcctctttggcgttgacccggacgacacctataatgagaccccctacgagaaaggtttctgctttgtttcatacctggcccacttggtgggtgatcaggatcagtttgacagttttctcaaggcctatgtgcatgaattcaaattccgaagcatcttagccgatgactttctggacttctacttgg

SEQ ID NO: 2378 - DNA, 2918 bp, Homo sapiens
  source 1..2918: mol_type = unassigned DNA
ccagcgcgcagctcttccgcctccgccacctgcagctgggcctggagctgcggcccgaggcgcgcgagttggccggctgcctggtgctcgagctgtgcgcgctgcggcccgcgccccgcgcgctcgtgctcgacgcgcacccggctctgcgcctgcactcagccgccttccgtcgcgcccccgccgccgccgccgagacgccctgcgccttcgccttctccgcccccgggccggggcccgcgccgccgcccccgctgcccgccttccccgaggcgcccggctccgagcccgcctgctgtccgctggccttcagggtggacccgttcaccgactacggctcctcgctcaccgtcacgctgccgcccgagctgcaggcgcaccagcccttccaggtcatcctgcggtacacctcgaccgacgcccccgccatctggtggctggacccagagctgacctatggctgcgccaagcccttcgtcttcacccagggccactccgtgtgcaaccgctccttcttcccgtgcttcgacacacctgccgtgaagtgcacctactctgccgtcgtcaaggcgccatcgggggtgcaggtgctgatgagtgccacccggagtgcatacatggaggaagaaggcgtcttccacttccacatggagcaccccgtgcccgcctacctcgtggccctggtggccggagacctcaagccggcagacatcgggcccaggagccgcgtgtgggccgagccatgcctcctgcccacggccaccagcaagctgtcgggcgcagtggagcagtggctgagtgcagctgagcggctgtatgggccctacatgtggggcaggtacgacattgtcttcctgccaccctccttccccatcgtggccatggagaacccctgcctcaccttcatcatctcctccatcctggagagcgatgagttcctggtcatcgatgtcatccacgaggtggcccacagttggttcggcaacgctgtcaccaacgccacgtgggaagagatgtggctgagcgagggcctggccacctatgcccagcgccgtatcaccaccgagacctacggtgctgccttcacctgcctggagactgccttccgcctggacgccctgcaccggcagatgaagcttctgggagaggacagcccggtcagcaaactgcaggtcaagctggagccaggagtgaatcccagccacctgatgaacctgttcacctacgagaagggctactgcttcgtgtactacctgtcccagctctgcggagacccacagcgctttgatgactttctccgagcctatgtggagaagtacaagttcaccagcgtggtggcccaggacctgctggactccttcctgagcttcttcccggagctgaaggagcagagcgtggactgccgggcagggctggaattcgagcgctggctcaatgccacaggcccgccgctggctgagccggacctgtctcagggatccagcctgacccggcccgtggaggcccttttccagctgtggaccgcagaacctctggaccaggcagctgcctcggccagcgccattgacatctccaagtggaggaccttccagacagcactcttcctggaccggctcctggatgggtccccgctgccgcaggaggtggtgatgagcctgtccaagtgctactcctccctgctggactcgatgaacgctgagatccgcatccgctggctgcagattgtggtccgcaacgactactatcctgacctccacagggtgcggcgcttcctggagagccagatgtcacgcatgtacaccatcccgctgtacgaggacctctgcaccggtgccctcaagtccttcgcgctggaggtcttctaccagacgcagggccggctgcaccccaacctgcgcagagccatccagcagatcctgtcccagggcctgggctccagcacagagcccgcctcagagcccagcacggagctgggcaaggctgaagcagacacagactcggacgcacaggccctgctgcttggggacgaggcccccagcagtgccatctctctcagggacgtcaatgtgtctgcctagccctgttggcgggctgaccctcgacctcccagacaccacaattgtgccttctgtgggccaggcctgccatgactgcgtctcggctctggccatgagctctgcccaggcccacaagcccctcccctgggctctcccaggcagggagaatggggagagggacctccttgtgtctggcagagacctgtggacctggcctccccactcccagctctcttgcactgcaggccctggggccagcccgcacacaccatgcctcctgtctcaacactgacagctgtgcctagccccggatgccagcacctgccaggtgccgccccggggcaagggccccagcagccctatggtgaccgccacactgtgccttaatgtctgccgggggcccaggctgtgctgtccctgcagcacgcctccttgcagggatctgagccaccctccccgcacagccctgcaccccgcccctggggttggcagcctcagttggcccctggcagaggaacaaggacacagacattccctcagtgtggggggcaggggacacagggagaggatggttgtccctggggagggccctctggccccaggcaaccttagcccctcagaacagggagtcccaggacccagggagagtgtggggacaggacagcctgtctcttgtagcttcctggggtgggaggcacaggggcaaagcaataccccagggaaagtgggaggtggtgctggtgctctctccaggcccaccatgctgggagaggcggccagagcctggggcctccagcctgggactgctgtgatggggtatcacggtgatggtcccattaaacttccactctgcaaacctga

SEQ ID NO: 2379 - DNA, 2146 bp, Homo sapiens
  source 1..2146: mol_type = unassigned DNA
gaggctgaccgtttccgcttccgtccacttggcgagtgagacgctgatgggaggatggacgtactggtgtctgagtgctccgcgcggctgctgcagcaggaagaagagattaaatctctgactgctgaaattgaccggttgaaaaactgtggctgtttaggagcttctccaaatttggagcagttacaagaagaaaatttaaaattaaagtatcgactgaatattcttcgaaagagtcttcaggcagaaaggaacaaaccaactaaaaatatgattaacattattagccgcctacaagaggtctttggtcatgcaattaaggctgcatatccagatttggaaaatcctcctctgctagtgacaccaagtcagcaggccaagtttggggactatcagtgtaatagtgctatgggtatttctcagatgctcaaaaccaaggaacagaaagttaatccaagagaaattgctgaaaacattaccaaacacctcccagacaatgaatgtattgaaaaagttgaaattgctggtcctggttttattaatgtccacttaagaaaggattttgtatcagaacaattgaccagtcttctagtgaatggagttcaactacctgctctgggagagaataaaaaggttatagttgacttttcctcccctaatatagctaaagagatgcatgtaggccacctgaggtcaactatcataggagagagtataagccgcctctttgaatttgcagggtatgacgtgctcaggttaaatcatgtaggagactgggggacccagtttggcatgctcatcgctcacctgcaagacaaatttccagattatctaacagtttcacctcctattggggatcttcaggtcttttataaggaatctaagaagaggtttgatactgaggaggaatttaagaagcgagcatatcagtgtgtagttctgctccagggtaaaaacccagatattacaaaagcttggaagcttatctgtgatgtctcccgccaagagttaaataaaatctatgatgcattggacgtctctttaatagagagaggggaatccttctatcaagataggatgaatgatattgtaaaggaatttgaagatagaggatttgtgcaggtggatgatggcagaaagattgtatttgtcccagggtgttccataccattaaccatagtaaaatcagatggaggttatacctatgatacatctgacctggctgctattaaacaaagactatttgaggaaaaagcagatatgattatctatgttgtggacaatggacaatctgtgcacttccagacaatatttgctgctgctcaaatgattggttggtatgaccctaaagtaactcgagtcttccatgctggatttggtgtggtgctaggggaagacaagaaaaagtttaaaacacgttcgggtgaaacagtgcgcctcatggatcttctgggagaaggactaaaacgatccatggacaagttgaaggaaaaagaaagagacaaggtcttaactgcagaggaattgaatgctgctcagacatccgttgcgtatggctgcatcaaatatgctgacctttcccataaccggttgaatgactacatcttctcctttgacaaaatgctagatgacagaggaaatacagctgcttacttgttgtatgccttcactagaatcaggtctattgcacgtctggccaatattgatgaagaaatgctccaaaaagctgctcgagaaaccaagattcttttggatcatgagaaggaatggaaactaggccggtgcattttacggttccctgagattctgcaaaagattttagatgacttatttctccacactctctgtgattatatatatgagctggcaactgctttcacagagttctatgatagctgctactgtgtggagaaagatagacagactggaaaaatattgaaggtgaacatgtggcgtatgctgctatgtgaagcagtagctgctgtcatggccaaggggtttgatatcctgggaataaaacctgtccaaaggatgtaatccttcataggtttgaacactgtgtgtttttaccaaagtggccattggcactgtttgcttttttacaatcatgtggacacaagcataagtaaagaaaatttgtcaacca

SEQ ID NO: 2380 - DNA, 1990 bp, Homo sapiens
  source 1..1990: mol_type = unassigned DNA
atgggaggatggacgtactggtgtctgagtgctccgcgcggctgctgcagcaggaagaagagattaaatctctgactgctgaaattgaccggttgaaaaactgtggctgtttaggagcttctccaaatttggagcagttacaagaagaaaatttaaaattaaagtatcgactgaatattcttcgaaagagtcttcaggcagaaaggaacaaaccaactaaaaatatgattaacattattagccgcctacaagaggtctttggtcatgcaattaaggctgcatatccagatttggaaaatcctcctctgctagtgacaccaagtcagcaggccaagtttggggactatcagtgtaatagtgctatgggtatttctcaggttttattaatgtccacttaagaaaggattttgtatcagaacaattgaccagtcttctagtgaatggagttcaactacctgctctgggagagaataaaaaggttatagttgacttttcctcccctaatatagctaaagagatgcatgtaggccacctgaggtcaactatcataggagagagtataagccgcctctttgaatttgcagggtatgacgtgctcaggttaaatcatgtaggagactgggggacccagtttggcatgctcatcgctcacctgcaagacaaatttccagattatctaacagtttcacctcctattggggatcttcaggtcttttataaggaatctaagaagaggtttgatactgaggaggaatttaagaagcgagcatatcagtgtgtagttctgctccagggtaaaaacccagatattacaaaagcttggaagcttatctgtgatgtctcccgccaagagttaaataaaatctatgatgcattggacgtctctttaatagagagaggggaatccttctatcaagataggatgaatgatattgtaaaggaatttgaagatagaggatttgtgcaggtggatgatggcagaaagattgtatttgtcccagggtgttccataccattaaccatagtaaaatcagatggaggttatacctatgatacatctgacctggctgctattaaacaaagactatttgaggaaaaagcagatatgattatctatgttgtggacaatggacaatctgtgcacttccagacaatatttgctgctgctcaaatgattggttggtatgaccctaaagtaactcgagtcttccatgctggatttggtgtggtgctaggggaagacaagaaaaagtttaaaacacgttcgggtgaaacagtgcgcctcatggatcttctgggagaaggactaaaacgatccatggacaagttgaaggaaaaagaaagagacaaggtcttaactgcagaggaattgaatgctgctcagacatccgttgcgtatggctgcatcaaatatgctgacctttcccataaccggttgaatgactacatcttctcctttgacaaaatgctagatgacagaggaaatacagctgcttacttgttgtatgccttcactagaatcaggtctattgcacgtctggccaatattgatgaagaaatgctccaaaaagctgctcgagaaaccaagattcttttggatcatgagaaggaatggaaactaggccggtgcattttacggttccctgagattctgcaaaagattttagatgacttatttctccacactctctgtgattatatatatgagctggcaactgctttcacagagttctatgatagctgctactgtgtggagaaagatagacagactggaaaaatattgaaggtgaacatgtggcgtatgctgctatgtgaagcagtagctgctgtcatggccaaggggtttgatatcctgggaataaaacctgtccaaaggatgtaatccttcataggtttgaacactgtgtgtttttaccaaagtggccattggcactgtttgcttttttacaatcatgtggacacaagcataagtaaagaaaatttgtcaacc

SEQ ID NO: 2381 - DNA, 1949 bp, Homo sapiens
  source 1..1949: mol_type = unassigned DNA
ataaggaggtggggcgaggccggaactggcggactgcggcgcacttccgtagaggtggacatggcgtgcggctttcgccgcgctattgcttgccagctttccagagtgttgaatcttccaccagaaaacttgatcacatcaatatctgcagttccaatttcccaaaaagaagtttcgctcttgtcacccaggctggagtgcagtggcacaatcttgactcgctgcagtctccacctccaggattcaagcgattcccctgcctcagtctcccaagcagctgggattgtagagaagtagctgattttcagctttctgtggattctttattggaaaaagacaatgaccattcaagaccagatattcaagttcaagccaagagactagcagagaagctaagatgtgatacagtggtgagtgaaatcagtactggtcaaaggactgtaaatttcaaaataaacagagagctcttaacaaagacagtgctacaacaagtaattgaagatggctcaaaatatggattaaaaagtgaacttttctctggacttccccagaagaagattgtggttgaattcagttcacctaatgttgccaaaaaatttcatgttggacatttgcgttctaccatcataggaaattttatagcaaatctcaaagaagctttaggacatcaagtaataagaataaattaccttggcgattggggcatgcagtttggtcttctgggaactggcttccagctgtttggctatgaggaaaaactgcagtccaatcctctacagcatctctttgaagtttatgtacaagttaataaagaagcagcagatgataaaagtgtagcaaaagcagcacaggagttcttccaacgattggaactgggcgatgtgcaagcactttcactgtggcaaaaatttcgggacttgagcattgaagagtacattcgggtttacaagcgtctgggagtatattttgatgaatattcaggagaatcattttatcgtgaaaaatctcaagaggtcttaaagttgctggagagtaaaggactcctactgaaaacaataaaaggaacggctgtagtagatctctctgggaatggcgacccctcctcaatttgtactgtaatgcgaagtgatgggacttctctctatgcaaccagagatcttgcagctgctatagatcgaatggacaagtataattttgatacaatgatatatgtgacagataaaggacaaaaaaagcattttcagcaagtattccaaatgctgaagatcatgggatatgactgggcagaaaggtgccagcacgtgccctttggagtagtacagggaatgaagactcgaagaggagatgtcactttcctggaagatgttttaaatgagattcaattaaggatgctacagaacatggcttcaattaagacaactaaagaactcaagaacccacaagagactgcagagagggtcgggctcgcagcactcattattcaggacttcaaaggtttactcttatctgactacaagttcagctgggatcgtgttttccagagtcgcggggacacaggagtcttcctacagtacacacacgcccgcctccacagtttggaagagacttttggatgtgggtacctgaatgacttcaacactgcttgtttacaagagccacagtctgtttcaattcttcagcatcttctcaggttcgacgaggtgctttataaatcatctcaggactttcaacccaggcatatcgtcagttaccttctaactttaagtcatcttgcagctgtggcacacaaaacactacaaataaaagatagtcctcctgaagtggctggggccagacttcatcttttcaaagctgtccgttctgtcctagccaatggaatgaaacttcttggaataacacctgtatgtaggatgtaatttccattaaaatggcttttaaaatgtcaagtg

SEQ ID NO: 2382 - DNA, 1818 bp, Homo sapiens
  source 1..1818: mol_type = unassigned DNA
cgaggccggaactggcggactgcggcgcacttccgtagaggtggacatggcgtgcggctttcgccgcgctattgcttgccagctttccagagtgttgaatcttccaccagaaaacttgatcacatcaatatctgcagttccaatttcccaaaaagaagaagtagctgattttcagctttctgtggattctttattggaaaaagacaatgaccattcaagaccagatattcaagttcaagccaagagactagcagagaagctaagatgtgatacagtggtgagtgaaatcagtactggtcaaaggactgtaaatttcaaaataaacagagagctcttaacaaagacagtgctacaacaagtaattgaagatggctcaaaatatggattaaaaagtgaacttttctctggacttccccagaagaagattgtggttgaattcagttcacctaatgttgccaaaaaatttcatgttggacatttgcgttctaccatcataggaaattttatagcaaatctcaaagaagctttaggacatcaagtaataagaataaattaccttggcgattggggcatgcagtttggtcttctgggaactggcttccagctgtttggctatgaggaaaaactgcagtccaatcctctacagcatctctttgaagtttatgtacaagttaataaagaagcagcagatgataaaagtgtagcaaaagcagcacaggagttcttccaacgattggaactgggcgatgtgcaagcactttcactgtggcaaaaatttcgggacttgagcattgaagagtacattcgggtttacaagcgtctgggagtatattttgatgaatattcaggagaatcattttatcgtgaaaaatctcaagaggtcttaaagttgctggagagtaaaggactcctactgaaaacaataaaaggaacggctgtagtagatctctctgggaatggcgacccctcctcaatttgtactgtaatgcgaagtgatgggacttctctctatgcaaccagagatcttgcagctgctatagatcgaatggacaagtataattttgatacaatgatatatgtgacagataaaggacaaaaaaagcattttcagcaagtattccaaatgctgaagatcatgggatatgactgggcagaaaggtgccagcacgtgccctttggagtagtacagggaatgaagactcgaagaggagatgtcactttcctggaagatgttttaaatgagattcaattaaggatgctacagaacatggcttcaattaagacaactaaagaactcaagaacccacaagagactgcagagagggtcgggctcgcagcactcattattcaggacttcaaaggtttactcttatctgactacaagttcagctgggatcgtgttttccagagtcgcggggacacaggagtcttcctacagtacacacacgcccgcctccacagtttggaagagacttttggatgtgggtacctgaatgacttcaacactgcttgtttacaagagccacagtctgtttcaattcttcagcatcttctcaggttcgacgaggtgctttataaatcatctcaggactttcaacccaggcatatcgtcagttaccttctaactttaagtcatcttgcagctgtggcacacaaaacactacaaataaaagatagtcctcctgaagtggctggggccagacttcatcttttcaaagctgtccgttctgtcctagccaatggaatgaaacttcttggaataacacctgtatgtaggatgtaatttccattaaaatggcttttaaaatgtcaagtgaa

SEQ ID NO: 2383 - DNA, 618 bp, Homo sapiens
  source 1..618: mol_type = unassigned DNA
ctttccagagtgttgaatcttccaccagaaaacttgatcacatcaatatctgcagttccaatttcccaaaaagaagtttcgctcttgtcacccaggctggagtgcagtggcacaatcttgactcgctgcagtctccacctccaggattcaagcgattcccctgcctcagtctcccaagcagctgggattgtagagaagtagctgattttcagctttctgtggattctttattggaaaaagacaatgaccattcaagaccagatattcaagttcaagccaagagactagcagagaagctaagatgtgatacagtggtgagtgaaatcagtactggtcaaaggactgtaaatttcaaaataaacagagagctcttaacaaagacagtgctacaacaagtaattgaagatggctcaaaatatggattaaaaagtgaacttttctctggacttccccagaagaagattgtggttgaattcagttcacctaatgttgccaaaaaatttcatgttggacatttgcgttctaccatcataggaaattttatagcaaatctcaaagaagctttaggacatcaagtaataagaataaattaccttggcgattggggcatgcagtttg

SEQ ID NO: 2384 - DNA, 4933 bp, Homo sapiens
  source 1..4933: mol_type = unassigned DNA
gcaacggcgccaagcacttccggagctgtggggacgactcttctggaggaagcagcgcgggcttgaccggcgtcggcccgccgcctccgctgccgcttcgccccaatccggtccctctggcccggcctgacccggtctggcttgttcgggctcagcggccgcgaggccgcagctcccgatggaaatcatattatgtagaatacttgggtgacatctgcctgagagatctccaagaattacagaagacaaaaatactaatgcatttgagaaagcggtagttttggggggagggggaaaaagcaactgctttcctgatctgcaacttggctggatgctaagatgtcagtggacatgaatagccaggggtctgacagcaatgaagaggactatgacccaaattgtgaggaagaggaagaagaagaagaagacgaccctggggacatagaggactattacgtgggagtagccagcgatgtggagcagcagggggctgatgcctttgatcccgaggagtaccagttcacttgcttgacctacaaggaatctgagggtgccctcaatgagcacatgaccagcttagcttctgtcctaaaggtatctcattcagttgctaaacttatattagttaatttccactggcaagtttcagagatattggacagatacaagtccaattctgctcaactgcttgttgaggctcgagttcagcctaatccatcaaaacatgttcccacatcccatccccctcaccactgtgcagtgtgtatgcagtttgtgcgaaaggaaaacctactctctctggcctgtcagcaccagttttgccgcagctgctgggagcagcactgctcagttctcgtcaaggacggcgtgggcgtgggagtctcttgcatggctcaggactgtccactccgtacaccagaggactttgtgtttccattgcttcccaatgaagaattgagagagaaatacaggcgctacctcttcagggactatgtggagagtcattaccagctccagctgtgccctggtgcagactgccccatggttattcgggtacaggagcctagagctcgccgagtacagtgcaatcggtgcaacgaggtcttctgtttcaagtgtcgtcagatgtatcacgcacccacagactgtgccacaatccggaaatggctcacgaagtgtgcagacgactctgaaacagccaactacattagtgctcacactaaagactgtcccaagtgcaacatctgcattgagaagaatggaggctgcaatcacatgcaatgctccaaatgtaaacacgacttctgctggatgtgtctaggagattggaagactcatggcagtgaatactatgagtgcagtcgttacaaggagaatcctgacatcgtgaaccagagccaacaagcccaggcgagggaagccctcaagaagtacttattctactttgagaggtgggaaaaccacaataaaagcttgcagctagaggcacagacataccagcggattcacgagaagattcaggagagggtcatgaacaatctggggacatggatcgactggcagtacctacagaatgctgccaagctcttggccaagtgtcgatacaccctgcaatacacctacccatatgcatattacatggagtccggacccaggaagaagctgtttgaataccagcaggctcagctggaggctgagatcgaaaacctctcatggaaagtggagcgtgcagacagctatgacagaggggacttggagaaccagatgcatatagcggagcagcggaggagaaccctgctgaaagatttccatgacacctaagttgggatgtggatgtgccggggtgaggaagatgtggctgcaaggtctcccggctgccatactgcatgctgcaggctctgcctttcatgaccccaggcaacagccagggccccactcctgagagacactggcaacacctcttagttgatttctgttttcttctcttttcactttttgtttctaccagggtagaggccatgttgaactggcctcttttcaggacttttatttccccctggatggttgttgggagggagggaaagtgttttctgaatggctattaatagtattagatcattacaacttatgtaactttcaaaggttgtacaattatacaaaaaaaaaaaaaaggcaaactataggataacacagagccctttttgaaaataaattggcattggagtgttttaccctctagctgttttacttagaatgtaacatatgctgcctacccacctcaaaatgtctgtactgcaagagggccctgggcctctgctttccatattcacgtttggccagagttgtagtcccaaagaagagcatgggtggcagatggtagggaattgaactggcctgtgcaatgggcatggagcacaaggggtcacagcatgcctcctgccttaccgtggcagtacggagacagtccagaacatggtcttcttgccacggggtgttgttgtctctggtggtgctgcatgtctgtggctcacctttattcttgaaactgaggtttacctggatctggctactgaggctagagcccacagcagaatggggttgggcctgtggccccccaaactagggggtgtgggttcatcacagtgttgccttttgtctcctaaagatagggatctacttttgaagggaattgttcctcccaaataaatttgctttaccttggtcctttcttttgtgccagtattcaagtggtatagctctgagcagggtcacatttggccaaacctgacactgtcttgctgcattctcctttggcaaacatcagggtcagaattcaggatagcccttcctagggcactggactttctggcatgggggctgtgtttgcacaagttattttcatgttacctggagagtgtccagaggctgctctgaggctgaggtgtgttcccccttgcctggttccagctgtcagagggataccatcctagggtctgggaatccaaggccacgagactccttggtttgtggtccgagatcctgtactaaggagggtctggccagaggaacagaccagcttttgcacaatgaagcgcaagggaacaagtggtttgcctggtgtcctacctgtcctgaacctggtcctgtgggccattgaaaagttagatctgtgatctctggggtttttgtggctttgttcaatgcttccactctagggcaggcagagcagtctatactctcccaagcctgcttgacctccaagtagagctgatacagagatctgtgaatattgtgatagaaattctttggtattcatacatttcagctgcaagtcagcaatttcccaggtaccatgtaagctataaaacagtcattcttaaagacagaggatagctgtgactcatgggatcatgaggtccatggctggttgcaggttccctttttccttcctcaggttttgtctcttcctgtgttgtccccagcaagggagagactgtggggtggattgggagaacagattaggagtatagcaaatgaacccagaatggaacagtggggagctaactgtgaatgaggagagtacctgctgcaggacctggaggtcaggtgtgaatgctgtattggcacagggaataaatatcctggcgtctggagccttcacctctccgtcaagtccttcctgtgatactgccatggcacaggatctgagttgcagctctgcaccctaaatcacaccctgggcattgtctgggctgcagggctgccaggttctgtacttgtgtccagctgtggccctggatgctggagctggagggttttctgtgctcagactgtagcctgtagctcttggcctgtgtagagccccctcctgtgccctcagtggctgtcgtttgttaacatcatcaggaagatgggaaaggtcaggcagaatttttctgccctacaaagggtggaagagaaaggacacagtattttcatgaatttaccatatatctttgtttttcttcaacgaaaaagttaattgaggcaatgtcatctgctcaaagttgagtggtttattcacaataaactgtaagtttctgattataaaaatgtgtctagagtctttcttcatggggtctaggtagtcttctgagcccacaggggtctggccagtgaacaccagaggagtgccttcctatcagtcagccccttcttccagagggctgtggaggccccagtggccaaactcggctctgttttccctttctggctgttgggggagagggcacctgtaagtgatccctgtggaatgaagtagaaaatcctgccagttttccgctctcctctccctcagtacaggctgaatcattccccaccacagatagatcccagggttgtggtagagtactgatataaatgtcccaacccccccattctgagacctccggacccctccaaagcagacatgggaatgtagggctgtggaatatggcagggtgaactccagcttcacgggagccctaagggttatgaagagacaacttggggcagaaacaagtgtggagtctaatctcaagggtgaaggacaggaaatgaggtttggattgattaagggggtccacatttgtggtgtcagaagtggcagtagtgtcagtgataagtagctcaggggtagagtggaggctccatagctgtgggcaacatgcacagggcacctgtggctagaagaggcctcatacattgccagtctgaactccgcagctcttcctctggacctcaggtgtgccaagccccacgcttggcacctgggcatacagtggtatgcaagtgattcacgtgctctagcttccaggagcttccaatccatggggaacatagaaggaattgatcactagtgaatgtttgttttttgttttgagacagtctcgctctatcgcccagactggagtac

SEQ ID NO: 2385 - DNA, 1288 bp, Homo sapiens
  source 1..1288: mol_type = unassigned DNA
gggattacaggagtctcttgcatggctcaggactgtccactccgtacaccagaggactttgtgtttccattgcttcccaatgaagaattgagagagaaatacaggcgctacctcttcagggactatgtggagagtcattaccagctccagctgtgccctggtgcagactgccccatggttattcgggtacaggagcctagagctcgccgagtacagtgcaatcggtgcaacgaggtcttctgtttcaagtgtcgtcagatgtatcacgcacccacagactgtgccacaatccggaaatggctcacgaagtgtgcagacgactctgaaacagccaactacattagtgctcacactaaagactgtcccaagtgcaacatctgcattgagaagaatggaggctgcaatcacatgcaatgctccaaatgtaaacacgacttctgctggatgtgtctaggagattggaagactcatggcagtgaatactatgagtgcagtcgttacaaggagaatcctgacatcgtgaaccagagccaacaagcccaggcgagggaagccctcaagaagtacttattctactttgagaggtgggaaaaccacaataaaagcttgcagctagaggcacagacataccagcggattcacgagaagattcaggagagggtcatgaacaatctggggacatggatcgactggcagtacctacagaatgctgccaagctcttggccaagtgtcgatacaccctgcaatacacctacccatatgcatattacatggagtccggacccaggaagaagctgtttgaataccagcaggctcagctggaggctgagatcgaaaacctctcatggaaagtggagcgtgcagacagctatgacagaggggacttggagaaccagatgcatatagcggagcagcggaggagaaccctgctgaaagatttccatgacacctaagttgggatgtggatgtgccggggtgaggaagatgtggctgcaaggtctcccggctgccatactgcatgctgcaggctctgcctttcatgaccccaggcaacagccagggccccactcctgagagacactggcaacacctcttagttgatttctgttttcttctcttttcactttttgtttctaccagggtagaggccatgttgaactggcctcttttcaggacttttatttccccctggatggttgttgggagggagggaaagtgttttctgaatggctattaatagtattagatcattacaacttatgtaactttcaaaggttgtacaattat

SEQ ID NO: 2386 - DNA, 1649 bp, Homo sapiens
  source 1..1649: mol_type = unassigned DNA
tcagtggacatgaatagccaggggtctgacagcaatgaagaggactatgacccaaattgtgaggaagaggaagaagaagaagaagacgaccctggggacatagaggactattacgtgggagtagccagcgatgtggagcagcagggggctgatgcctttgatcccgaggagtaccagttcacttgcttgacctacaaggaatctgagggtgccctcaatgagcacatgaccagcttagcttctgtcctaaaggtatctcattcagttgctaaacttatattagttaatttccactggcaagtttcagagatattggacagatacaagtccaattctgctcaactgcttgttgaggctcgagttcagcctaatccatcaaaacatgttcccacatcccatccccctcaccactgtgcagtgtgtatgcagtttgtgcgaaaggaaaacctactctctctggcctgtcagcaccagttttgccgcagctgctgggagcagcactgctcagttctcgtcaaggacggcgtgggcgtgggagtctcttgcatggctcaggactgtccactccgtacaccagaggactttgtgtttccattgcttcccaatgaagaattgagagagaaatacaggcgctacctcttcagggactatgtggagagtcattaccagctccagctgtgccctggtgcagactgccccatggttattcgggtacaggagcctagagctcgccgagtacagtgcaatcggtgcaacgaggtcttctgtttcaagtgtcgtcagatgtatcacgcacccacagactgtgccacaatccggaaatggctcacgaagtgtgcagacgactctgaaacagccaactacattagtgctcacactaaagactgtcccaagtgcaacatctgcattgagaagaatggaggctgcaatcacatgcaatgctccaaatgtaaacacgacttctgctggatgtgtctaggagattggaagactcatggcagtgaatactatgagtgcagtcgttacaaggagaatcctgacatcgtgaaccagagccaacaagcccaggcgagggaagccctcaagaagtacttattctactttgagaggctggaaaacctctcatggaaagtggagcgtgcagacagctatgacagaggggacttggagaaccagatgcatatagcggagcagcggaggagaaccctgctgaaagatttccatgacacctaagttgggatgtggatgtgccggggtgaggaagatgtggctgcaaggtctcccggctgccatactgcatgctgcaggctctgcctttcatgaccccaggcaacagccagggccccactcctgagagacactggcaacacctcttagttgatttctgttttcttctcttttcactttttgtttctaccagggtagaggccatgttgaactggcctcttttcaggacttttatttccccctggatggttgttgggagggagggaaagtgttttctgaatggctattaatagtattagatcattacaacttatgtaactttcaaaggttgtacaattatacaaaaaaaaaaaaaaggcaaactataggataacacagagccctttttgaaaataaattggcattggagtgttttaccctct

SEQ ID NO: 2387 - DNA, 2278 bp, Homo sapiens
  source 1..2278: mol_type = unassigned DNA
acttccggagctgtggggacgactcttctggaggaagcagcgcgggcttgaccggcgtcggcccgccgcctccgctgccgcttcgccccaatccggtccctctggcccggcctgacccggtctggcttgttcgggctcagcggccgcgaggccgcagctcccgatggaaatcatattatgtagaatacttgggtgacatctgcctgagagatctccaagaattacagattgagtctcgctctgttgcccaggctggagtgcagtggtgcaatctctgctcactgcaacctccgtctcccgagttcaagcagttctcctgcctcagcctcctgagtagctgggattacagaagacaaaaatactaatgcatttgagaaagcggtagttttggggggagggggaaaaagcaactgctttcctgatctgcaacttggctggatgctaagatgtcagtggacatgaatagccaggggtctgacagcaatgaagaggactatgacccaaattgtgaggaagaggaagaagaagaagaagacgaccctggggacatagaggactattacgtgggagtagccagcgatgtggagcagcagggggctgatgcctttgatcccgaggagtaccagttcacttgcttgacctacaaggaatctgagggtgccctcaatgagcacatgaccagcttagcttctgtcctaaaggtatctcattcagttgctaaacttatattagttaatttccactggcaagtttcagagatattggacagatacaagtccaattctgctcaactgcttgttgaggctcgagttcagcctaatccatcaaaacatgttcccacatcccatccccctcaccactgtgcagtgtgtatgcagtttgtgcgaaaggaaaacctactctctctggcctgtcagcaccagttttgccgcagctgctgggagcagcactgctcagttctcgtcaaggacggcgtgggcgtgggagtctcttgcatggctcaggactgtccactccgtacaccagaggactttgtgtttccattgcttcccaatgaagaattgagagagaaatacaggcgctacctcttcagggactatgtggagagtcattaccagctccagctgtgccctggtgcagactgccccatggttattcgggtacaggagcctagagctcgccgagtacagtgcaatcggtgcaacgaggtcttctgtttcaagtgtcgtcagatgtatcacgcacccacagactgtgccacaatccggaaatggctcacgaagtgtgcagacgactctgaaacagccaactacattagtgctcacactaaagactgtcccaagtgcaacatctgcattgagaagaatggaggctgcaatcacatgcaatgctccaaatgtaaacacgacttctgctggatgtgtctaggagattggaagactcatggcagtgaatactatgagtgcagtcgttacaaggagaatcctgacatcgtgaaccagagccaacaagcccaggcgagggaagccctcaagaagtacttattctactttgagaggtgggaaaaccacaataaaagcttgcagctagaggcacagacataccagcggattcacgagaagattcaggagagggtcatgaacaatctggggacatggatcgactggcagtacctacagaatgctgccaagctcttggccaagtgtcgatacaccctgcaatacacctacccatatgcatattacatggagtccggacccaggaagaagctgtttgaataccagcaggctcagctggaggctgagatcgaaaacctctcatggaaagtggagcgtgcagacagctatgacagaggggacttggagaaccagatgcatatagcggagcagcggaggagaaccctgctgaaagatttccatgacacctaagttgggatgtggatgtgccggggtgaggaagatgtggctgcaaggtctcccggctgccatactgcatgctgcaggctctgcctttcatgaccccaggcaacagccagggccccactcctgagagacactggcaacacctcttagttgatttctgttttcttctcttttcactttttgtttctaccagggtagaggccatgttgaactggcctcttttcaggacttttatttccccctggatggttgttgggagggagggaaagtgttttctgaatggctattaatagtattagatcattacaacttatgtaactttcaaaggttgtacaattatacaaaaaaaaaaaaaa

SEQ ID NO: 2388 - DNA, 4846 bp, Homo sapiens
  source 1..4846: mol_type = unassigned DNA
ctgaggcgggcagcaagcggccccctcgctccctccctccctcctccgcgccctccccgccgccaccagccgtcaaacgccaaccgccgctcctggggaggagccgcggctcgcggggccggagccaggcctgcgtccggacatcagccggagccggagcgagagccggggcctcggcgtccccgccctctccccgcctcggccagcgtccgccgggcccccgcgcgtcgcgccatggactcggacgagggctacaactacgagttcgtcaacgaggtcatccagaatccagcaactatcacaagaatactccttagccacttcaattgggataaagagaagctaatggaaaggtactttgatggaaacctggagaagctctttgctgagtgtcatgtaattaatccaagtaaaaagtctcgaacacgccagatgaatacaaggtcatcagcacaggatatgccttgtcagatctgctacttgaactaccctaactcgtatttcactggccttgaatgtggacataagttttgtatgcagtgctggagtgaatatttaactaccaaaataatggaagaaggcatgggtcagactatttcgtgtcctgctcatggttgtgatatcttagtggatgacaacacagttatgcgcctgatcacagattcaaaagttaaattaaagtatcagcatttaataacaaatagctttgtagagtgcaatcgactgttaaagtggtgtcctgccccagattgccaccatgttgttaaagtccaatatcctgatgctaaacctgttcgctgcaaatgtgggcgccaattttgctttaactgtggagaaaattggcatgatcctgttaaatgtaagtggttaaagaaatggattaaaaagtgtgatgatgacagtgaaacctccaattggattgcagccaacacaaaggaatgtcccaaatgccatgtcacaattgagaaggatggtggttgtaatcacatggtctgtcgtaaccagaattgtaaagcagagttttgctgggtgtgtcttggcccatgggaaccacatggatctgcctggtacaactgtaaccgctataatgaggatgatgcaaaggcagcaagagatgcacaggagcgatctagggcagccctgcagaggtacctgttctactgtaatcgctatatgaaccacatgcagagcctgcgctttgagcacaaactatatgctcaggtgaaacagaaaatggaggagatgcagcagcacaacatgtcctggattgaggtgcagttcctgaagaaggcagttgatgtcctctgccagtgtcgtgccacactcatgtacacttatgtcttcgctttctacctcaaaaagaataaccagtccattatctttgagaataaccaagcagatctagagaatgccacagaggtgctctcgggctaccttgaacgagatatttcccaagattctctgcaggatataaagcagaaagtacaagacaagtacagatactgtgagagtcgacgaagggttttgttacagcatgtgcatgaaggctatgaaaaagatctgtgggagtacattgaggactgagaatggccctgcataaaatgaactctgaaaactttaccatctagagtgctcatgcaattaaaacaaaacaaacacaaacaaggaggcactaagcctattctgacaccactggtctgtagtaccagaattgttttgttaatggaaagtttaagtaaattatattgtaataaaaaggtagataaaccattgtacaacagtattctaggccaccaacaaaagtgtgacagacacactaaaagccctccaactttaacttgtaacgtagcttcattctcaaagctgactccttttttttctttttccttttcctgagtgtagtacagttaaaatttcaaacagctccttgacactgcttttcatgttcaaaccagccattttgttgtactttggtaaaggacctcttccccttcctcccctacacatacagatacacccacacacagactgactctctttctctcataccccaaggtcatgagtgaatgatgcttagttccttgtaaagaaaatcttgggatggggaaaggggtaggcagcaagaggattcaacaaacgaaaaacataaaaactttgtatatgacttttaaaacaagaggacaacacagtatttttcaaaattgtatatagcgcatatgcatggacaaagcaagcgtggcacgtgtttgcataatgtttaattacaaaaaaatatttattctttaaaaatcttcaagattatgtctatttgctgtgcattttctttcagtttgcttatctttcccgggttggggttgggataaaggtgtgtcggtttagcacctctggaagacctatctagagctctttcactttcctgaggttattttgccctttctggtgttggtatgtctgttgccggccatgggcctcatgccttgaattcctgctcttgatcagggacaagggaggtcaagctctgactaatgccatgacctgattaaggggtacagcagggagttttgttgctacagctcatgaattaacctgtcccaacctaatccccctccatggcatcatgcctctacccaagcctttgtgtgcccatgttatgcacacagctgtaggcattcttaagtcccctgtcgcatccagtggaagcattttaaaatttcttttactttttggttttcccttaattgctgcttttcagattttagttatggctcgtctgctcaccccttctctacattagggtgtcaaagagaatgttttgctttaaatataaatagccattcatttagtctcagattgtgaatttaaaatggtggataccgaaattgcttgtgtgtgttgctgtgggtttggtttgaaggcaaacacccctagaacatgatattcccatctagtgcatttaaatagaaatcactgagtttgctgcttttttattgtcagcagataggagaattaataatgcattttagctgtgatgtccatttttatgaaattcctactaagagctatgttaaaagtaaaggatggtggtggttgtattaactatatacctgtttaggccattctggctgtggtatttttcaataggtcagcatctgtaaatctgtcagttttatacaggagtgcagagtgaactaggcaactagattaagaggtctaaatatgaaataccagttgaggctgaggacctcttcgtcttcctttaaatgtcttttgcctagggagtgtttaccatttgtgaggcagctttgtctgctcttacactgtacatcctattactccattgggaagtaggttcactttcctctggccttttgcctaagttaggctttgctgaatcaaccctacttttccttttagaaaaggttgttacaggagatttactggcaactgttcttttcccatcaaaaatcagtgaatgtttgctgagtataaatgctgcttccttaaaccacttgtcgctttaggatcaactttacctgtaccttttctcctttcctcccttgccacctcaggtgcaaatctgaactcagtgtctgcttcttccattttctcgtctctctcccctcttcccccattatccatatgacattattttacttcaaatgacagcatcaatcttaaaaagatatacattaaaactaaggagtttttttaaagaaagcctgaataagttcctttccctggtaactttgaaaagcagtcagagttgctatatagatatatgtggctcctttaaaatgctttgtgtatgtgtggtgtttaaaaaaaaaaaatcttaccagttaactttgcagtgtctaggtttgagtgtcataaatccacgtgttcctgttgcaacaaatacccaaaaattgtgtgtgcacttcctaataccagtcttcacccatggaggaacagtgctttttagagatgctttctatttcaatgttggcatactgcctgagggtattgcagttgtgggtgcattccctaatttgtatgatcaagatgaactggcccttttctacttccaagcttttaacagataccaccatatttgacagaattcccagagtgaattgcttgtgttattagtagattcagtgcccccagctgggataggcaagccatgacagcttccctgtttcacctacagaagtcttatctgagggatctattcacagtaagcaccaaggtctccatgtcttgaggtcagtttcattgtcttttgaaaagtgcatgcttcatttgaacaattcattcagcagcagatggactttcagtgatttaaaataaaattttgatccaaagctcaggacacaaaccacagtggtaaaattgagtagcatataatatcagactaaattatctgtaattttccacaacccagattgtatgtgttttatgtgtgtttaaataaatatgttagatacacgtgtatacatacacccatatacaacagatccaagactggctgacttcatttgaaatggttgaatctgctgtgtaataaagtggttcaaccatgattaggaactgaaatttagtagaagagggaaaaggagttaatgtaacaaattattttagctacaaaccccggtaatagagcacttgggggatgggatggggtgggttggtgagacaatcagaatggtaaattgattaaatgctcctaaccctgtaattttgtgcatagagcaccctatgctgtggaaataactgttcttagatttcattgtaactggactgttcaggttgcccagagggaaagaacattcctaattctaataaaataaacttttattttgtt

SEQ ID NO: 2389 - DNA, 6047 bp, Homo sapiens
  source 1..6047: mol_type = unassigned DNA
gctcagtagcgatagcagcggccgtggaggtggcgttggggactgttttctctcggaggccggagcggagccgcgtctgactgaggcgggcagcaagcggccccctcgctccctccctccctcctccgcgccctccccgccgccaccagccgtcaaacgccaaccgccgctcctggggaggagccgcggctcgcggggccggagccaggcctgcgtccggacatcagccggagccggagcgagagccggggcctcggcgtccccgccctctccccgcctcggccagcgtccgccgggcccccgcgcgtcgcgccatggactcggacgagggctacaactacgagttcgacgaggacgaggagtgcagtgaggaggacagcggcgccgaggaggaggaggacgaagacgacgacgagccggacgatgataccctggatctgggcgaggtggagctggtggagcccgggctgggcgtcggcggggagcgggacggactgctgtgcggggagacgggcggtggcggcggcagcgctctggggcccggcggtggcggcggcggcggcggcggcggtggtggtggcgggccggggcatgagcaggaggaggattaccgctacgaggtgctcacggccgagcagattctacaacacatggtggaatgtatccgggaggtcaacgaggtcatccagaatccagcaactatcacaagaatactccttagccacttcaattgggataaagagaagctaatggaaaggtactttgatggaaacctggagaagctctttgctgagtgtcatgtaattaatccaagtaaaaagtctcgaacacgccagatgaatacaaggtcatcagcacaggatatgccttgtcagatctgctacttgaactaccctaactcgtatttcactggccttgaatgtggacataagttttgtatgcagtgctggagtgaatatttaactaccaaaataatggaagaaggcatgggtcagactatttcgtgtcctgctcatggttgtgatatcttagtggatgacaacacagttatgcgcctgatcacagattcaaaagttaaattaaagtatcagcatttaataacaaatagctttgtagagtgcaatcgactgttaaagtggtgtcctgccccagattgccaccatgttgttaaagtccaatatcctgatgctaaacctgttcgctgcaaatgtgggcgccaattttgctttaactgtggagaaaattggcatgatcctgttaaatgtaagtggttaaagaaatggattaaaaagtgtgatgatgacagtgaaacctccaattggattgcagccaacacaaaggaatgtcccaaatgccatgtcacaattgagaaggatggtggttgtaatcacatggtctgtcgtaaccagaattgtaaagcagagttttgctgggtgtgtcttggcccatgggaaccacatggatctgcctggtacaactgtaaccgctataatgaggatgatgcaaaggcagcaagagatgcacaggagcgatctagggcagccctgcagaggtacctgttctactgtaatcgctatatgaaccacatgcagagcctgcgctttgagcacaaactatatgctcaggtgaaacagaaaatggaggagatgcagcagcacaacatgtcctggattgaggtgcagttcctgaagaaggcagttgatgtcctctgccagtgtcgtgccacactcatgtacacttatgtcttcgctttctacctcaaaaagaataaccagtccattatctttgagaataaccaagcagatctagagaatgccacagaggtgctctcgggctaccttgaacgagatatttcccaagattctctgcaggatataaagcagaaagtacaagacaagtacagatactgtgagagtcgacgaagggttttgttacagcatgtgcatgaaggctatgaaaaagatctgtgggagtacattgaggactgagaatggccctgcataaaatgaactctgaaaactttaccatctagagtgctcatgcaattaaaacaaaacaaacacaaacaaggaggcactaagcctattctgacaccactggtctgtagtaccagaattgttttgttaatggaaagtttaagtaaattatattgtaataaaaaggtagataaaccattgtacaacagtattctaggccaccaacaaaagtgtgacagacacactaaaagccctccaactttaacttgtaacgtagcttcattctcaaagctgactccttttttttctttttccttttcctgagtgtagtacagttaaaatttcaaacagctccttgacactgcttttcatgttcaaaccagccattttgttgtactttggtaaaggacctcttccccttcctcccctacacatacagatacacccacacacagactgactctctttctctcataccccaaggtcatgagtgaatgatgcttagttccttgtaaagaaaatcttgggatggggaaaggggtaggcagcaagaggattcaacaaacgaaaaacataaaaactttgtatatgacttttaaaacaagaggacaacacagtatttttcaaaattgtatatagcgcatatgcatggacaaagcaagcgtggcacgtgtttgcataatgtttaattacaaaaaaatatttattctttaaaaatcttcaagattatgtctatttgctgtgcattttctttcagtttgcttatctttcccgggttggggttgggataaaggtgtgtcggtttagcacctctggaagacctatctagagctctttcactttcctgaggttattttgccctttctggtgttggtatgtctgttgccggccatgggcctcatgccttgaattcctgctcttgatcagggacaagggaggtcaagctctgactaatgccatgacctgattaaggggtacagcagggagttttgttgctacagctcatgaattaacctgtcccaacctaatccccctccatggcatcatgcctctacccaagcctttgtgtgcccatgttatgcacacagctgtaggcattcttaagtcccctgtcgcatccagtggaagcattttaaaatttcttttactttttggttttcccttaattgctgcttttcagattttagttatggctcgtctgctcaccccttctctacattagggtgtcaaagagaatgttttgctttaaatataaatagccattcatttagtctcagattgtgaatttaaaatggtggataccgaaattgcttgtgtgtgttgctgtgggtttggtttgaaggcaaacacccctagaacatgatattcccatctagtgcatttaaatagaaatcactgagtttgctgcttttttattgtcagcagataggagaattaataatgcattttagctgtgatgtccatttttatgaaattcctactaagagctatgttaaaagtaaaggatggtggtggttgtattaactatatacctgtttaggccattctggctgtggtatttttcaataggtcagcatctgtaaatctgtcagttttatacaggagtgcagagtgaactaggcaactagattaagaggtctaaatatgaaataccagttgaggctgaggacctcttcgtcttcctttaaatgtcttttgcctagggagtgtttaccatttgtgaggcagctttgtctgctcttacactgtacatcctattactccattgggaagtaggttcactttcctctggccttttgcctaagttaggctttgctgaatcaaccctacttttccttttagaaaaggttgttacaggagatttactggcaactgttcttttcccatcaaaaatcagtgaatgtttgctgagtataaatgctgcttccttaaaccacttgtcgctttaggatcaactttacctgtaccttttctcctttcctcccttgccacctcaggtgcaaatctgaactcagtgtctgcttcttccattttctcgtctctctcccctcttcccccattatccatatgacattattttacttcaaatgacagcatcaatcttaaaaagatatacattaaaactaaggagtttttttaaagaaagcctgaataagttcctttccctggtaactttgaaaagcagtcagagttgctatatagatatatgtggctcctttaaaatgctttgtgtatgtgtggtgtttaaaaaaaaaaaatcttaccagttaactttgcagtgtctaggtttgagtgtcataaatccacgtgttcctgttgcaacaaatacccaaaaattgtgtgtgcacttcctaataccagtcttcacccatggaggaacagtgctttttagagatgctttctatttcaatgttggcatactgcctgagggtattgcagttgtgggtgcattccctaatttgtatgatcaagatgaactggcccttttctacttccaagcttttaacagataccaccatatttgacagaattcccagagtgaattgcttgtgttattagtagattcagtgcccccagctgggataggcaagccatgacagcttccctgtttcacctacagaagtcttatctgagggatctattcacagtaagcaccaaggtctccatgtcttgaggtcagtttcattgtcttttgaaaagtgcatgcttcatttgaacaattcattcagcagcagatggactttcagtgatttaaaataaaattttgatccaaagctcaggacacaaaccacagtggtaaaattgagtagcatataatatcagactaaattatctgtaattttccacaacccagattgtatgtgttttatgtgtgtttaaataaatatgttagatacacgtgtatacatacacccatatacaacagatccaagactggctgacttcatttgaaatggttgaatctgctgtgtaataaagtggttcaaccatgattaggaactgaaatttagtagaagagggaaaaggagttaatgtaacaaattattttagctacaaaccccggtaatagagcacttgggggatgggatggggtgggttggtgagacaatcagaatggtaaattgattaaatgctcctaaccctgtaattttgtgcatagagcaccctatgctgtggaaataactgttcttagatttcattgtaactggactgttcaggttgcccagagggaaagaacattcctaattctaataaaataaacttttattttgttattccattagttacttatgtttatttttatagttaaaaaatgactaaaggtggctaatagccacccgtattatgtgccttattcactgttcccacttaatataaaatgtcaaaaattggttgtttctttgcagggaactgtgaatgagcccattcccccaacatttaacttggttaatgaagctttcagagcattttctgaaagatttccaatttctgcatctcagatattgaatttaaattgtttgtgttgtaacagtgatacaaaaatgttcaatagctctttgaatgccactttttttaaagaaaatactttaaaagtcattcttagctaacctcaaaactcctttacattactttcattttagctcactcttaaagctgatactgttatatagggatgaagggagagttttcttaaagaaggtcccaaagttgaagatcgtttgtcattgatactctggccaagtccaggttttaggacaatttaatttactcttatttggatctgtaattatgggagtttatcacttttcctcttcaaagcacttcaacttactgtctaaaacaagtggagaagaaattgccattttttataaaggaggaagataaggctcactgaggttaaataactccctcaatttttcatttccttctacctgaaacttaacatcatgctacctctttgtatcatattttgttattctggtcacagaatgacctagtattctgtaccagggaaggtagttcttaactatattgtacttttaaaccacattaaagactattataaatgcc

SEQ ID NO: 2390 - DNA, 2876 bp, Homo sapiens
  source 1..2876: mol_type = unassigned DNA
ttgtcctgagcgcggagagggcgagctcgggccgcgggcagggcgggagccggcagccggcaaccaagggaggcagaaaggcacaaagatcgcaataatatccgttataacccgctatctaaccccacccccaacacacacccatccatcccaccctccgggagaggcagccggcgatccgctctctgcgccctgggaaaaagccccagccatgagcaatcagtaccaggaggagggctgctccgagaggcccgagtgcaaaagtaaatctccaactttgctctcctcctactgcatcgacagcatcctgggccggaggagcccgtgcaaaatgcggttgctgggagccgcgcagagcttgcctgctccgctgaccagccgcgccgacccggaaaaggccgtgcaaggctcccctaagagcagcagcgccccgttcgaggccgagctgcacctgccgcccaagctgcggcgcctgtacggcccgggcgggggccgcctccttcagggtgcggcagcggcggcggcggcggcggcggcggcggcggcagcggccgccacggccacggcgggtccacgcggggaggcccctccgccgccaccgccaaccgcgcggcccggggaacggccggacggcgcaggggccgccgcggcagccgcggccgcggccgccgcggcctgggacacgctcaagatcagccaggcgccgcaggtgagcatcagccgcagcaagtcgtaccgcgagaacggggcgcccttcgtgccgccgccgcccgcgctggacgagctgggcggcccggggggcgtcacgcacccggaggagcgcctcggcgtggccggcggcccgggcagcgccccggctgcgggtggtggcaccggcaccgaggacgacgaggaggagctgctggaggacgaagaagatgaggacgaggaagaggaactgctggaggacgacgaggaggagctgctggaggacgacgcccgcgcgctgctcaaggagccccggcgctgtcctgtggccgccactggcgccgtggccgcagcagctgccgctgcagtggccacagagggcggggagctgtcacccaaggaggagctgctgctgcacccggaagacgctgagggcaaggacggcgaggacagcgtgtgcctctctgcgggcagcgactcggaggaggggctgctgaaacgcaaacagaggcgctaccgcaccacgttcaccagctaccagctggaggaactggagcgggccttccagaagacgcactacccggacgtcttcaccagggaggaactggccatgaggctggacttgaccgaggcccgagtccaggtctggttccagaaccgtcgggccaagtggcgcaagcgggagaaggcaggcgcgcagacccacccccctgggctgcccttcccggggccgctctccgccacccacccgctcagcccctacctggacgccagccccttccctccgcaccacccggcgctcgactccgcttggactgccgctgccgccgccgccgccgccgccttcccgagcctacctccgcctccgggctcggccagcctgccgcccagcggggcgccgctgggcctgagcactttcctcggagcggcagtgttccgacacccagctttcatcagcccggcattcggcaggctcttttccacaatggcccccctgaccagcgcgtcgaccgcggccgcgctcctgagacagcccacacccgccgtggagggcgcagtggcatcgggcgccctggccgacccggccacggcggccgcagacagacgcgcctctagcatagccgcgctgaggctcaaggccaaggagcacgcggcgcagctcacgcagctcaacatcctgccgggcaccagcacgggcaaggaggtgtgctaaaggctgccctccacacccgcgccccgcgcgcgccccgaaaggtcacctcactcagcaccactcaagaccaaatggaaacagaggaccagcacactcccgagacggcactgagagagcgcagccgccttcacagcagtctggatgcgggcatggcagccctcggcgctccgggacgtggcacctcctcggctggctgtccacccgcccctgcccctgcccctgctactgccaacctcgctccaactccaacatccactctctcttgttcttactttcctgaaaatatcggggaggttttctcccccagacgcctgatattgaagtaaaaaatttaaaaagcccaacctcttcctcctgacaccccacttagcctttcttttctttctttctttctttcttttttttttttaaatagcattttggcgctcgaagttgatctccccagcgagggccccagcgtgaagccagggcccgggaagcaaatgcgagcctgtaagatagctaacagtgcacttaaaggaaaggggcgtcttgttcttgttctcttctttatcatacaccaaccaaggtttttatatcaaaccaaagggaaataatactctgctagaatatggactgttgaagtcaccaaactgtgattattgattctgtacataccattgttattaaaaaaaaaaaaaaaagaacagagctttgtatatttgaaatgttataacgcaattgcactcagcgtggtatggtaaaagtttgtcctcccgtagattcttactgtgttgtagatacggtagggttcctagacaaatatttatgtactcaagccctttatttaacttattaactgtagaggcttccgaaaccttcaagataaaggcaatggtacagtacttttgtgtaatgtgtaattgttaccacttttccttgctatctagtggagaagtgtcacgctcaaaataaaaaaattatatgtttaacaaaa

SEQ ID NO: 2391 - DNA, 2629 bp, Homo sapiens
  source 1..2629: mol_type = unassigned DNA
accgccccgcgctccgctgccaggggcgggagggaggaatggttgcttcacgccccgggggaagagacgggaagctcggctctgggttgcgggccccggcgtctccgcgtggggcgcaccgtccgacccccccctcccggtgtgcagcgccccgcaccgccccgcctcgcctgggagaagccgccgggacgcgccgggctggagtgggcggttataggctttgagctaggccgtttccgggaggcggagctcagaccccatttcctttctccacatccaggtcaggtggcgtttgctgtggcggctaggcccgcgtgcgctggagacctccgcgctggcccccgcgagcctcctgccctggcccggcgctgcggctctgccgcggcggcagcatgggtggcccccggggcgcgggctgggtggcggcgggcctgctgctcggcgcgggcgcctgctactgcatttacaggctgacccggggtcggcggcggggcgaccgcgagctcgggatacgctcttcgaagtccgcaggtgccctggaagaagggacgtcagagggtcagttgtgcgggcgctcggcccggcctcagacgggaggtacctgggagtcacagtggtccaagacctcgcagcctgaagacttaactgatggttcatatgatgatgttctaaatgctgaacaacttcagaaactcctttacctgctggagtcaacggaggatcctgtaattattgaaagagctttgattactttgggtaacaatgcagccttttcagttaaccaagctattattcgtgaattgggtggtattccaattgttgcaaacaaaatcaaccattccaaccagagtattaaagagaaagctttaaatgcactaaataacctgagtgtgaatgttgaaaatcaaatcaagataaagatatacatcagtcaagtatgtgaggatgtcttctctggtcctctgaactctgctgtgcagctggctggactgacattgttgacaaacatgactgttaccaatgaccaccagcacatgcttcacagttacattacagacctgttccaggtgttacttactggaaatggaaacacgaaggtgcaagttttgaaactgcttttgaatttgtctgaaaatccagccatgacagaaggacttctccgtgcccaagtggattcatcattcctttccctttatgacagccacgtagcaaaggagattcttcttcgagtacttacgctatttcagaatataaagaactgcctcaaaatagaaggccatttagctgtgcagcctactttcactgaaggttcattgtttttcctgttacatggagaagaatgtgcccagaaaataagagctttagttgatcaccatgatgcagaggtgaaggaaaaggttgtaacaataatacccaaaatctgattggtcatatttttccaaagagtaatgcagtctggatataaacgtattttctgtcttccttataaggggattctcccagctgctaaatttaaacagtaaatatcacattttgtcattaacacagctataacttgccgtggttctcagatttattttggactattttgatgccaagtgaatataagagcttgtactgaaaccatttatttctttctattttgctatttgcaaatgcttgttatcttccctacatgaagtggcagtaacctttttcacatttaagctacccttctaccttttgaagtgatttgcagttactcatctgagacagcatcagtatttgactaaatcattgtttcacaactgaatagtcttgttcttttagtagcaacgaaatcctaagctcttgaggccattcacctgccaacctgaccatactgctttcaaaagtcttttctcatcagtagaatctattttggtcacttctagtcaatgaaaaatgtaaacttttaggagagaatgtttcttaggactcacccactccattcaatgttatatataaaatagtgtgatcaatcacaatgtccatctttagacagttggttaaataaattatctggtctttgaaaagaccgtgctgggcgcggtggctcttgcctgtaatcccagcactttgggaggctgaggcgggcagatcacctgagatcgggagtttgagaccaagcctgaccaatatggagaaaccctgtctctactaagaacacaaaattagctgggcatggtggtgcatgcctgtaatcccagctacttgggaggccgaggcaggagaattgcttgaacccgggaggcagaggttgcagtgagctgagatagcgccattgcactccagcctgggcaacaagagcaaaactctgtctcaaaaaaaaaaaaaaatgatggagctccgaatgtgcttaagtggaaagatatctatgaaatatggtggttttttaaaacacaaaaattatagaatatgggatcccgtgtgtgtgtgtgtgtgtttgaatgaaaaatgcttatgtattgacagaacacttctagaatgatacccaaactcctggagtgggagtggggaatgccttctacgtacacactgttctactgtttgaattttttaatatgagcccaaattgtataatctttttttaataaaggggagaaaaatc

SEQ ID NO: 2392 - DNA, 2443 bp, Homo sapiens
  source 1..2443: mol_type = unassigned DNA
accgccccgcgctccgctgccaggggcgggagggaggaatggttgcttcacgccccgggggaagagacgggaagctcggctctgggttgcgggccccggcgtctccgcgtggggcgcaccgtccgacccccccctcccggtgtgcagcgccccgcaccgccccgcctcgcctgggagaagccgccgggacgcgccgggctggagtgggcggttataggctttgagctaggccgtttccgggaggcggagctcagaccccatttcctttctccacatccaggtcaggtggcgtttgctgtggcggctaggcccgcgtgcgctggagacctccgcgctggcccccgcgagcctcctgccctggcccggcgctgcggctctgccgcggcggcagcatgggtggcccccggggcgcgggctgggtggcggcgggcctgctgctcggcgcgggcgcctgctactgcatttacaggctgacccggggtcggcggcggggcgaccgcgagctcgggatacgctcttcgaagtccgcagaagacttaactgatggttcatatgatgatgttctaaatgctgaacaacttcagaaactcctttacctgctggagtcaacggaggatcctgtaattattgaaagagctttgattactttgggtaacaatgcagccttttcagttaaccaagctattattcgtgaattgggtggtattccaattgttgcaaacaaaatcaaccattccaaccagagtattaaagagaaagctttaaatgcactaaataacctgagtgtgaatgttgaaaatcaaatcaagataaagatatacatcagtcaagtatgtgaggatgtcttctctggtcctctgaactctgctgtgcagctggctggactgacattgttgacaaacatgactgttaccaatgaccaccagcacatgcttcacagttacattacagacctgttccaggtgttacttactggaaatggaaacacgaaggtggattcatcattcctttccctttatgacagccacgtagcaaaggagattcttcttcgagtacttacgctatttcagaatataaagaactgcctcaaaatagaaggccatttagctgtgcagcctactttcactgaaggttcattgtttttcctgttacatggagaagaatgtgcccagaaaataagagctttagttgatcaccatgatgcagaggtgaaggaaaaggttgtaacaataatacccaaaatctgattggtcatatttttccaaagagtaatgcagtctggatataaacgtattttctgtcttccttataaggggattctcccagctgctaaatttaaacagtaaatatcacattttgtcattaacacagctataacttgccgtggttctcagatttattttggactattttgatgccaagtgaatataagagcttgtactgaaaccatttatttctttctattttgctatttgcaaatgcttgttatcttccctacatgaagtggcagtaacctttttcacatttaagctacccttctaccttttgaagtgatttgcagttactcatctgagacagcatcagtatttgactaaatcattgtttcacaactgaatagtcttgttcttttagtagcaacgaaatcctaagctcttgaggccattcacctgccaacctgaccatactgctttcaaaagtcttttctcatcagtagaatctattttggtcacttctagtcaatgaaaaatgtaaacttttaggagagaatgtttcttaggactcacccactccattcaatgttatatataaaatagtgtgatcaatcacaatgtccatctttagacagttggttaaataaattatctggtctttgaaaagaccgtgctgggcgcggtggctcttgcctgtaatcccagcactttgggaggctgaggcgggcagatcacctgagatcgggagtttgagaccaagcctgaccaatatggagaaaccctgtctctactaagaacacaaaattagctgggcatggtggtgcatgcctgtaatcccagctacttgggaggccgaggcaggagaattgcttgaacccgggaggcagaggttgcagtgagctgagatagcgccattgcactccagcctgggcaacaagagcaaaactctgtctcaaaaaaaaaaaaaaatgatggagctccgaatgtgcttaagtggaaagatatctatgaaatatggtggttttttaaaacacaaaaattatagaatatgggatcccgtgtgtgtgtgtgtgtgtttgaatgaaaaatgcttatgtattgacagaacacttctagaatgatacccaaactcctggagtgggagtggggaatgccttctacgtacacactgttctactgtttgaattttttaatatgagcccaaattgtataatctttttttaataaagggg

SEQ ID NO: 2393 - DNA, 2445 bp, Homo sapiens
  source 1..2445: mol_type = unassigned DNA
accgccccgcgctccgctgccaggggcgggagggaggaatggttgcttcacgccccgggggaagagacgggaagctcggctctgggttgcgggccccggcgtctccgcgtggggcgcaccgtccgacccccccctcccggtgtgcagcgccccgcaccgccccgcctcgcctgggagaagccgccgggacgcgccgggctggagtgggcggttataggctttgagctaggccgtttccgggaggcggagctcagaccccatttcctttctccacatccaggtcaggtggcgtttgctgtggcggctaggcccgcgtgcgctggagacctccgcgctggcccccgcgagcctcctgccctggcccggcgctgcggctctgccgcggcggcagcatgggtggcccccggggcgcgggctgggtggcggcgggcctgctgctcggcgcgggcgcctgctactgcatttacaggctgacccggggtcggcggcggggcgaccgcgagctcgggatacgctcttcgaagtccgcaggtgccctggaagaagggacgtcagagggtcagttgtgcgggcgctcggcccggcctcagacgggaggtacctgggagtcacagtggtccaagacctcgcagcctgaagacttaactgatggttcatatgatgatgttctaaatgctgaacaacttcagaaactcctttacctgctggagtcaacggaggatcctgtaattattgaaagagctttgattactttgggtaacaatgcagccttttcagttaaccaagctattattcgtgaattgggtggtattccaattgttgcaaacaaaatcaaccattccaaccagagtattaaagagaaagctttaaatgcactaaataacctgagtgtgaatgttgaaaatcaaatcaagataaaggtgcaagttttgaaactgcttttgaatttgtctgaaaatccagccatgacagaaggacttctccgtgcccaagtggattcatcattcctttccctttatgacagccacgtagcaaaggagattcttcttcgagtacttacgctatttcagaatataaagaactgcctcaaaatagaaggccatttagctgtgcagcctactttcactgaaggttcattgtttttcctgttacatggagaagaatgtgcccagaaaataagagctttagttgatcaccatgatgcagaggtgaaggaaaaggttgtaacaataatacccaaaatctgattggtcatatttttccaaagagtaatgcagtctggatataaacgtattttctgtcttccttataaggggattctcccagctgctaaatttaaacagtaaatatcacattttgtcattaacacagctataacttgccgtggttctcagatttattttggactattttgatgccaagtgaatataagagcttgtactgaaaccatttatttctttctattttgctatttgcaaatgcttgttatcttccctacatgaagtggcagtaacctttttcacatttaagctacccttctaccttttgaagtgatttgcagttactcatctgagacagcatcagtatttgactaaatcattgtttcacaactgaatagtcttgttcttttagtagcaacgaaatcctaagctcttgaggccattcacctgccaacctgaccatactgctttcaaaagtcttttctcatcagtagaatctattttggtcacttctagtcaatgaaaaatgtaaacttttaggagagaatgtttcttaggactcacccactccattcaatgttatatataaaatagtgtgatcaatcacaatgtccatctttagacagttggttaaataaattatctggtctttgaaaagaccgtgctgggcgcggtggctcttgcctgtaatcccagcactttgggaggctgaggcgggcagatcacctgagatcgggagtttgagaccaagcctgaccaatatggagaaaccctgtctctactaagaacacaaaattagctgggcatggtggtgcatgcctgtaatcccagctacttgggaggccgaggcaggagaattgcttgaacccgggaggcagaggttgcagtgagctgagatagcgccattgcactccagcctgggcaacaagagcaaaactctgtctcaaaaaaaaaaaaaaatgatggagctccgaatgtgcttaagtggaaagatatctatgaaatatggtggttttttaaaacacaaaaattatagaatatgggatcccgtgtgtgtgtgtgtgtgtttgaatgaaaaatgcttatgtattgacagaacacttctagaatgatacccaaactcctggagtgggagtggggaatgccttctacgtacacactgttctactgtttgaattttttaatatgagcccaaattgtataatctttttttaataaaggggag

SEQ ID NO: 2394 - DNA, 2524 bp, Homo sapiens
  source 1..2524: mol_type = unassigned DNA
accgccccgcgctccgctgccaggggcgggagggaggaatggttgcttcacgccccgggggaagagacgggaagctcggctctgggttgcgggccccggcgtctccgcgtggggcgcaccgtccgacccccccctcccggtgtgcagcgccccgcaccgccccgcctcgcctgggagaagccgccgggacgcgccgggctggagtgggcggttataggctttgagctaggccgtttccgggaggcggagctcagaccccatttcctttctccacatccaggtcaggtggcgtttgctgtggcggctaggcccgcgtgcgctggagacctccgcgctggcccccgcgagcctcctgccctggcccggcgctgcggctctgccgcggcggcagcatgggtggcccccggggcgcgggctgggtggcggcgggcctgctgctcggcgcgggcgcctgctactgcatttacaggctgacccggggtcggcggcggggcgaccgcgagctcgggatacgctcttcgaagtccgcagaagacttaactgatggttcatatgatgatgttctaaatgctgaacaacttcagaaactcctttacctgctggagtcaacggaggatcctgtaattattgaaagagctttgattactttgggtaacaatgcagccttttcagttaaccaagctattattcgtgaattgggtggtattccaattgttgcaaacaaaatcaaccattccaaccagagtattaaagagaaagctttaaatgcactaaataacctgagtgtgaatgttgaaaatcaaatcaagataaagatatacatcagtcaagtatgtgaggatgtcttctctggtcctctgaactctgctgtgcagctggctggactgacattgttgacaaacatgactgttaccaatgaccaccagcacatgcttcacagttacattacagacctgttccaggtgttacttactggaaatggaaacacgaaggtgcaagttttgaaactgcttttgaatttgtctgaaaatccagccatgacagaaggacttctccgtgcccaagtggattcatcattcctttccctttatgacagccacgtagcaaaggagattcttcttcgagtacttacgctatttcagaatataaagaactgcctcaaaatagaaggccatttagctgtgcagcctactttcactgaaggttcattgtttttcctgttacatggagaagaatgtgcccagaaaataagagctttagttgatcaccatgatgcagaggtgaaggaaaaggttgtaacaataatacccaaaatctgattggtcatatttttccaaagagtaatgcagtctggatataaacgtattttctgtcttccttataaggggattctcccagctgctaaatttaaacagtaaatatcacattttgtcattaacacagctataacttgccgtggttctcagatttattttggactattttgatgccaagtgaatataagagcttgtactgaaaccatttatttctttctattttgctatttgcaaatgcttgttatcttccctacatgaagtggcagtaacctttttcacatttaagctacccttctaccttttgaagtgatttgcagttactcatctgagacagcatcagtatttgactaaatcattgtttcacaactgaatagtcttgttcttttagtagcaacgaaatcctaagctcttgaggccattcacctgccaacctgaccatactgctttcaaaagtcttttctcatcagtagaatctattttggtcacttctagtcaatgaaaaatgtaaacttttaggagagaatgtttcttaggactcacccactccattcaatgttatatataaaatagtgtgatcaatcacaatgtccatctttagacagttggttaaataaattatctggtctttgaaaagaccgtgctgggcgcggtggctcttgcctgtaatcccagcactttgggaggctgaggcgggcagatcacctgagatcgggagtttgagaccaagcctgaccaatatggagaaaccctgtctctactaagaacacaaaattagctgggcatggtggtgcatgcctgtaatcccagctacttgggaggccgaggcaggagaattgcttgaacccgggaggcagaggttgcagtgagctgagatagcgccattgcactccagcctgggcaacaagagcaaaactctgtctcaaaaaaaaaaaaaaatgatggagctccgaatgtgcttaagtggaaagatatctatgaaatatggtggttttttaaaacacaaaaattatagaatatgggatcccgtgtgtgtgtgtgtgtgtttgaatgaaaaatgcttatgtattgacagaacacttctagaatgatacccaaactcctggagtgggagtggggaatgccttctacgtacacactgttctactgtttgaattttttaatatgagcccaaattgtataatctttttttaataaaggggagaaaaatc

SEQ ID NO: 2395 - DNA, 2347 bp, Homo sapiens
  source 1..2347: mol_type = unassigned DNA
accgccccgcgctccgctgccaggggcgggagggaggaatggttgcttcacgccccgggggaagagacgggaagctcggctctgggttgcgggccccggcgtctccgcgtggggcgcaccgtccgacccccccctcccggtgtgcagcgccccgcaccgccccgcctcgcctgggagaagccgccgggacgcgccgggctggagtgggcggttataggctttgagctaggccgtttccgggaggcggagctcagaccccatttcctttctccacatccaggtcaggtggcgtttgctgtggcggctaggcccgcgtgcgctggagacctccgcgctggcccccgcgagcctcctgccctggcccggcgctgcggctctgccgcggcggcagcatgggtggcccccggggcgcgggctgggtggcggcgggcctgctgctcggcgcgggcgcctgctactgcatttacaggctgacccggggtcggcggcggggcgaccgcgagctcgggatacgctcttcgaagtccgcagaagacttaactgatggttcatatgatgatgttctaaatgctgaacaacttcagaaactcctttacctgctggagtcaacggaggatcctgtaattattgaaagagctttgattactttgggtaacaatgcagccttttcagttaaccaagctattattcgtgaattgggtggtattccaattgttgcaaacaaaatcaaccattccaaccagagtattaaagagaaagctttaaatgcactaaataacctgagtgtgaatgttgaaaatcaaatcaagataaaggtgcaagttttgaaactgcttttgaatttgtctgaaaatccagccatgacagaaggacttctccgtgcccaagtggattcatcattcctttccctttatgacagccacgtagcaaaggagattcttcttcgagtacttacgctatttcagaatataaagaactgcctcaaaatagaaggccatttagctgtgcagcctactttcactgaaggttcattgtttttcctgttacatggagaagaatgtgcccagaaaataagagctttagttgatcaccatgatgcagaggtgaaggaaaaggttgtaacaataatacccaaaatctgattggtcatatttttccaaagagtaatgcagtctggatataaacgtattttctgtcttccttataaggggattctcccagctgctaaatttaaacagtaaatatcacattttgtcattaacacagctataacttgccgtggttctcagatttattttggactattttgatgccaagtgaatataagagcttgtactgaaaccatttatttctttctattttgctatttgcaaatgcttgttatcttccctacatgaagtggcagtaacctttttcacatttaagctacccttctaccttttgaagtgatttgcagttactcatctgagacagcatcagtatttgactaaatcattgtttcacaactgaatagtcttgttcttttagtagcaacgaaatcctaagctcttgaggccattcacctgccaacctgaccatactgctttcaaaagtcttttctcatcagtagaatctattttggtcacttctagtcaatgaaaaatgtaaacttttaggagagaatgtttcttaggactcacccactccattcaatgttatatataaaatagtgtgatcaatcacaatgtccatctttagacagttggttaaataaattatctggtctttgaaaagaccgtgctgggcgcggtggctcttgcctgtaatcccagcactttgggaggctgaggcgggcagatcacctgagatcgggagtttgagaccaagcctgaccaatatggagaaaccctgtctctactaagaacacaaaattagctgggcatggtggtgcatgcctgtaatcccagctacttgggaggccgaggcaggagaattgcttgaacccgggaggcagaggttgcagtgagctgagatagcgccattgcactccagcctgggcaacaagagcaaaactctgtctcaaaaaaaaaaaaaaatgatggagctccgaatgtgcttaagtggaaagatatctatgaaatatggtggttttttaaaacacaaaaattatagaatatgggatcccgtgtgtgtgtgtgtgtgtttgaatgaaaaatgcttatgtattgacagaacacttctagaatgatacccaaactcctggagtgggagtggggaatgccttctacgtacacactgttctactgtttgaattttttaatatgagcccaaattgtataatctttttttaataaaggggagaaaaatc

SEQ ID NO: 2396 - DNA, 2266 bp, Homo sapiens
  source 1..2266: mol_type = unassigned DNA
accgccccgcgctccgctgccaggggcgggagggaggaatggttgcttcacgccccgggggaagagacgggaagctcggctctgggttgcgggccccggcgtctccgcgtggggcgcaccgtccgacccccccctcccggtgtgcagcgccccgcaccgccccgcctcgcctgggagaagccgccgggacgcgccgggctggagtgggcggttataggctttgagctaggccgtttccgggaggcggagctcagaccccatttcctttctccacatccaggtcaggtggcgtttgctgtggcggctaggcccgcgtgcgctggagacctccgcgctggcccccgcgagcctcctgccctggcccggcgctgcggctctgccgcggcggcagcatgggtggcccccggggcgcgggctgggtggcggcgggcctgctgctcggcgcgggcgcctgctactgcatttacaggctgacccggggtcggcggcggggcgaccgcgagctcgggatacgctcttcgaagtccgcagaagacttaactgatggttcatatgatgatgttctaaatgctgaacaacttcagaaactcctttacctgctggagtcaacggaggatcctgtaattattgaaagagctttgattactttgggtaacaatgcagccttttcagttaaccaagctattattcgtgaattgggtggtattccaattgttgcaaacaaaatcaaccattccaaccagagtattaaagagaaagctttaaatgcactaaataacctgagtgtgaatgttgaaaatcaaatcaagataaaggtggattcatcattcctttccctttatgacagccacgtagcaaaggagattcttcttcgagtacttacgctatttcagaatataaagaactgcctcaaaatagaaggccatttagctgtgcagcctactttcactgaaggttcattgtttttcctgttacatggagaagaatgtgcccagaaaataagagctttagttgatcaccatgatgcagaggtgaaggaaaaggttgtaacaataatacccaaaatctgattggtcatatttttccaaagagtaatgcagtctggatataaacgtattttctgtcttccttataaggggattctcccagctgctaaatttaaacagtaaatatcacattttgtcattaacacagctataacttgccgtggttctcagatttattttggactattttgatgccaagtgaatataagagcttgtactgaaaccatttatttctttctattttgctatttgcaaatgcttgttatcttccctacatgaagtggcagtaacctttttcacatttaagctacccttctaccttttgaagtgatttgcagttactcatctgagacagcatcagtatttgactaaatcattgtttcacaactgaatagtcttgttcttttagtagcaacgaaatcctaagctcttgaggccattcacctgccaacctgaccatactgctttcaaaagtcttttctcatcagtagaatctattttggtcacttctagtcaatgaaaaatgtaaacttttaggagagaatgtttcttaggactcacccactccattcaatgttatatataaaatagtgtgatcaatcacaatgtccatctttagacagttggttaaataaattatctggtctttgaaaagaccgtgctgggcgcggtggctcttgcctgtaatcccagcactttgggaggctgaggcgggcagatcacctgagatcgggagtttgagaccaagcctgaccaatatggagaaaccctgtctctactaagaacacaaaattagctgggcatggtggtgcatgcctgtaatcccagctacttgggaggccgaggcaggagaattgcttgaacccgggaggcagaggttgcagtgagctgagatagcgccattgcactccagcctgggcaacaagagcaaaactctgtctcaaaaaaaaaaaaaaatgatggagctccgaatgtgcttaagtggaaagatatctatgaaatatggtggttttttaaaacacaaaaattatagaatatgggatcccgtgtgtgtgtgtgtgtgtttgaatgaaaaatgcttatgtattgacagaacacttctagaatgatacccaaactcctggagtgggagtggggaatgccttctacgtacacactgttctactgtttgaattttttaatatgagcccaaattgtataatctttttttaataaagggg

SEQ ID NO: 2397 - DNA, 2141 bp, Homo sapiens
  source 1..2141: mol_type = unassigned DNA
gccgacgcgtgcagacgtccttctaatcctagtcttcgtttggtccggttgcactcttcctatagcccagagggcgagagggcctgtggcctgggggaaggaggacgaggttctgcctggatcccagcagtaggacgctgtgccatttgggaacaaaggaatagtctgcctggaatccctgcagatcttggggccggaggccagtccaacccttggagcaggaagaaacgcaaagttgtcaagaaccaagtcgagctgcctcagagccggcccgcagtagctgcagactccgcccgcgacgtgtgcgcgcttctctgggccagagcgagcctgttttgtgctcgggttaagagatttgtcccagctataccatgggccgcactcgggaagctggctgcgtggccgctggtgtggttatcggggctggtgcctgctactgtgtatacagactggcttggggaagagacgagaacgagaaaatctgggacgaagacgaggagtctacggacacctcagagattggggttgagactgtgaaaggagctaaaactaacgctggggcagggtctggggccaaacttcagggtgattcagaggtcaagcctgaggtgagtttgggactcgaggattgtccgggtgtaaaagagaaggcccattcaggatcccacagcggaggtggcctagaggccaaggccaaggcccttttcaacacgctgaaggaacaggcaagtgcaaaggcaggcaaaggggctagggtgggtaccatctctgggaacaggacccttgcaccgagtttaccctgcccaggaggcaggggtggaggctgccaccccaccaggagtggatctagggccgggggcagggcaagtggaaaatccaagggaaaggcccgaagtaagagcaccagggctccagctacaacatggcctgtccggagaggcaagttcaactttccttataaaattgatgatattctgagtgctcccgacctccaaaaggtcctcaacatcctggagcgaacaaatgatccttttattcaagaagtagccttggtcactctgggtaacaatgcagcatattcatttaaccagaatgccatacgtgaattgggtggtgtcccaattattgcaaaactgataaaaacaaaagaccccataattagggaaaagacttacaatgcccttaataacttgagtgtgaacgcagaaaatcagggcaagattaagacgtacatcagtcaagtgtgtgatgacaccatggtctgtcgcttggactcagctgtgcagatggctgggctaagactgttaaccaacatgactgtgactaatcattaccaacatttgctttcctattcttttccagacttttttgctttgttattcctgggaaatcacttcaccaagatacagattatgaaactaattataaactttactgaaaatccagccatgacaagagagctggtcagttgtaaagtaccatcagaattgatttccctctttaataaagaatgggatagagagattcttcttaatatccttaccctatttgagaatataaatgacaacataaaaaatgaagggctcgcatcatccaggaaagaattcagcagaagttcactttttttcttattcaaagagtctggagtttgtgttaagaaaatcaaagcactagcaaatcacaatgatctggtggtgaaagtaaaagtcctgaaagtattaaccaaactctaatttggagtctgtcccaaacaatattgagatatttgcagttggtacgatgtgatttgtaaattctttgtttttcattgtgcgtatatggtaaagagatcttttcagctgctattttggaataatgactatcatatatcataacagtgactgatgttggttgtaatggttgggtttaggatgaaccattttaaggatgccaaatgaaatattagtatttgtacacagaaagaatttattgatttgatcttattacctagattgagattttttaatctttcctctacctaaactgacaatgaattggttatacatcatgcataagctacacttttatattagtttatatttgttattctaagacttgtgtttcatcaataaagttgtgttttaagcagcagaaaaaaaaaa

SEQ ID NO: 2398 - DNA, 1779 bp, Homo sapiens
  source 1..1779: mol_type = unassigned DNA
cttctaatcctagtcttcgtttggtccggttgcactcttcctatagcccagagggcgagagggcctgtggcctgggggaaggaggacgaggttctgcctggatcccagcaggacgctgtgccatttgggaacaaaggaatagtctgcctggaatccctgcagatcttggggccggaggccagtccaacccttggagcaggaagaaacgcaaagttgtcaagaaccaagtcgagctgcctcagagccggcccgcagtagctgcagactccgcccgcgacgtgtgcgcgcttctctgggccagagcgagcctgttttgtgctcgggttaagagatttgtcccagctataccatgggccgcacacgctgaaggaacaggcaagtgcaaaggcaggcaaaggggctagggtgggtaccatctctgggaacaggacccttgcaccgagtttaccctgcccaggaggcaggggtggaggctgccaccccaccaggagtggatctagggccgggggcagggcaagtggaaaatccaagggaaaggcccgaagtaagagcaccagggctccagctacaacatggcctgtccggagaggcaagttcaactttccttataaaattgatgatattctgagtgctcccgacctccaaaaggtcctcaacatcctggagcgaacaaatgatccttttattcaagaagtagccttggtcactctgggtaacaatgcagcatattcatttaaccagaatgccatacgtgaattgggtggtgtcccaattattgcaaaactgataaaaacaaaagaccccataattagggaaaagacttacaatgcccttaataacttgagtgtgaacgcagaaaatcagggcaagattaagacgtacatcagtcaagtgtgtgatgacaccatggtctgtcgcttggactcagctgtgcagatggctgggctaagactgttaaccaacatgactgtgactaatcattaccaacatttgctttcctattcttttccagacttttttgctttgttattcctgggaaatcacttcaccaagatacagattatgaaactaattataaactttactgaaaatccagccatgacaagagagctggtcagttgtaaagtaccatcagaattgatttccctctttaataaagaatgggatagagagattcttcttaatatccttaccctatttgagaatataaatgacaacataaaaaatgaagggctcgcatcatccaggaaagaattcagcagaagttcactttttttcttattcaaagagtctggagtttgtgttaagaaaatcaaagcactagcaaatcacaatgatctggtggtgaaagtaaaagtcctgaaagtattaaccaaactctaatttggagtctgtcccaaacaatattgagatatttgcagttggtacgatgtgatttgtaaattctttgtttttcattgtgcgtatatggtaaagagatcttttcagctgctattttggaataatgactatcatatatcataacagtgactgatgttggttgtaatggttgggtttaggatgaaccattttaaggatgccaaatgaaatattagtatttgtacacagaaagaatttattgatttgatcttattacctagattgagattttttaatctttcctctacctaaactgacaatgaattggttatacatcatgcataagctacacttttatattagtttatatttgttattctaagacttgtgtttcatcaataaagttgtgttttaagcagc

SEQ ID NO: 2399 - DNA, 2762 bp, Homo sapiens
  source 1..2762: mol_type = unassigned DNA
tgggtaccaactctattgcgcagctcgctgccgtgcgtttaacccaggcgaggaggaggaggagaaaattcccccagattcgggcagacacctccggcccacacagccgttcaccccccgtcttttcagtcctggaaaaggaattcgggctttcattgtctaacgtcgacagtctatatttctgctcttcagtctgtccttaggatgaagctctaactgaactgaagtaaggagaaacagccttgaatctttggagggtctgtcttccttttgggctctgtgcaactgcagctacagtggaaaaaagcaaactgctcttgatcccaggccctgcctaagcctcagcagaacttgtaagcctaaactgaagagcctcacccggacgagcaggcatcccttaaccttaagcaatccagttccacgccctggatcagtgaataaccccagctgcaccatgagccgcgttcgggatgctggctgtgtagcggcggggatagtgataggggctggtgcctggtactgtgtctacaaatacaccagggggagagaccagaccaagaagagaatggccaagcccaaaaaccgggctgtggctgggactggagccagggctagagctgggctaagagccggattcacaatcgaccttgggtcaggattcagtcccccaaccccagtccgtgctgaagcagaggacagggcccaggatgaagcctctgctctggacacagttggagctgaggcagtggccccagctgcatccagcgctgaggctcagagtggggcaggcagtcaggcccaagaggcagatggagccggggttgggcctaaggccgaatcagtagttggggctgcaatggcttctgcaatagcaccacctcccggggtgacagaggcccttggggctgcagaagcccctgcaatggcaggggctcccaaagtggcagaagctcccagagaagcggagacttccagggcagcggtgcctcctgggacagtggtgcctaccgaagcggcagcacccactgaggtgaccgagggtcctggggtagcagcacctaccaaggtagctgaagctcccggggtggcatcgcctaccgaggcagctgaggctcctgtgcccgcaacgcctactggggctgcagcacctactggggctgcagagtctcctggaacttctggttcccctagaacagcggtggttcctggaacatcagctgccaagaaagcaacccctggggctcacactggggctataccgaaagccacatcagcgactggagcggtacccaaaggtggaggcaagggtgtaaccaggtcccggaatgggggcaagggcaagggcaagaaaagcaaagttgaagtagacgaactggggatgggcttccgtcctggagatggggctgcagcagctgctgcagcctctgctaatggcggacaggctttcctggcagaggtccctgattctgaggaaggggagtccgggtggactgacacagagtcagattcagactctgagcccgagacccagcgcagagggaggggaagaagacccgttgccatgcagaagcgcccctttccttatgaaattgatgagattctgggtgtccgcgatctcaggaaggtccttgccttgcttcagaaatctgatgatcctttcatccaacaggtagctttgctcactctgagcaacaatgccaattattcatgcaatcaagagacaatccgcaaattgggaggcctcccaattattgcaaacatgatcaacaaaactgatccacacattaaggaaaaagccttaatggccatgaataacctgagtgagaattatgaaaatcagggccggcttcaggtgtacatgaataaagtgatggatgatatcatggcctctaacctgaactcagcagttcaagtagttggactaaaatttctaacaaacatgactattactaatgactaccagcacctgcttgtcaattccattgcaaactttttccgtttgctatctcagggaggtggaaaaatcaaggttgagattttgaaaatcctttcgaattttgctgaaaatccagatatgttgaagaaacttctcagtacccaagtgccagcatcatttagttccctctataattcttacgtggaatcagaaatccttattaatgcccttactctatttgagattatctatgacaatctcagagcagaagtgtttaactatagagaattcaataaaggttcccttttttacttatgcactacatctggagtgtgtgttaagaaaattagagccttagcaaatcaccatgacctcttagtgaaagtgaaagttataaaactagtgaacaaattctgattggttatgtaccgtcaaaagacttgaagaaatttcatgattttgcagtgtggaagcgttgaaaattgaaagttactgcttttccacttgctcatatagtaaagggatcctttcagctgccagtgttgaataatgtatcatccagagtgatgttatctgtgacagtcaccagctttaagctgaaccattttatgaataccaaataaatagacctcttgtactgaaaacatatttgtgactttaatcgtgctgcttggatagaaatatttttactggttcttctgaattgacagtaaacctgtccattatgaatggcctactgttctattatttgttttgacttgaatttatccaccaaagacttcatttgtgtatcatcaataaagttgtatgtttcaactgacaaaaa

SEQ ID NO: 2400 - DNA, 2663 bp, Homo sapiens
  source 1..2663: mol_type = unassigned DNA
gaatcatttgacattctgatgtgcaaacacgaaaaggcagttactgagacccttgtcctggatgctgatccatccaccaggctttcattgtctaacgtcgacagtctatatttctgctcttcagtctgtccttaggatgaagctctaactgaactgaagtctgtcttccttttgggctctgtgcaactgcagctacagtggaaaaaagcaaactgctcttgatcccaggccctgcctaagcctcagcagaacttgtaagcctaaactgaagagcctcacccggacgagcaggcatcccttaaccttaagcaatccagttccacgccctggatcagtgaataaccccagctgcaccatgagccgcgttcgggatgctggctgtgtagcggcggggatagtgataggggctggtgcctggtactgtgtctacaaatacaccagggggagagaccagaccaagaagagaatggccaagcccaaaaaccgggctgtggctgggactggagccagggctagagctgggctaagagccggattcacaatcgaccttgggtcaggattcagtcccccaaccccagtccgtgctgaagcagaggacagggcccaggatgaagcctctgctctggacacagttggagctgaggcagtggccccagctgcatccagcgctgaggctcagagtggggcaggcagtcaggcccaagaggcagatggagccggggttgggcctaaggccgaatcagtagttggggctgcaatggcttctgcaatagcaccacctcccggggtgacagaggcccttggggctgcagaagcccctgcaatggcaggggctcccaaagtggcagaagctcccagagaagcggagacttccagggcagcggtgcctcctgggacagtggtgcctaccgaagcggcagcacccactgaggtgaccgagggtcctggggtagcagcacctaccaaggtagctgaagctcccggggtggcatcgcctaccgaggcagctgaggctcctgtgcccgcaacgcctactggggctgcagcacctactggggctgcagagtctcctggaacttctggttcccctagaacagcggtggttcctggaacatcagctgccaagaaagcaacccctggggctcacactggggctataccgaaagccacatcagcgactggagcggtacccaaaggtggaggcaagggtgtaaccaggtcccggaatgggggcaagggcaagggcaagaaaagcaaagttgaagtagacgaactggggatgggcttccgtcctggagatggggctgcagcagctgctgcagcctctgctaatggcggacaggctttcctggcagaggtccctgattctgaggaaggggagtccgggtggactgacacagagtcagattcagactctgagcccgagacccagcgcagagggaggggaagaagacccgttgccatgcagaagcgcccctttccttatgaaattgatgagattctgggtgtccgcgatctcaggaaggtccttgccttgcttcagaaatctgatgatcctttcatccaacaggtagctttgctcactctgagcaacaatgccaattattcatgcaatcaagagacaatccgcaaattgggaggcctcccaattattgcaaacatgatcaacaaaactgatccacacattaaggaaaaagccttaatggccatgaataacctgagtgagaattatgaaaatcagggccggcttcaggtgtacatgaataaagtgatggatgatatcatggcctctaacctgaactcagcagttcaagtagttggactaaaatttctaacaaacatgactattactaatgactaccagcacctgcttgtcaattccattgcaaactttttccgtttgctatctcagggaggtggaaaaatcaaggttgagattttgaaaatcctttcgaattttgctgaaaatccagatatgttgaagaaacttctcagtacccaagtgccagcatcatttagttccctctataattcttacgtggaatcagaaatccttattaatgcccttactctatttgagattatctatgacaatctcagagcagaagtgtttaactatagagaattcaataaaggttcccttttttacttatgcactacatctggagtgtgtgttaagaaaattagagccttagcaaatcaccatgacctcttagtgaaagtgaaagttataaaactagtgaacaaattctgattggttatgtaccgtcaaaagacttgaagaaatttcatgattttgcagtgtggaagcgttgaaaattgaaagttactgcttttccacttgctcatatagtaaagggatcctttcagctgccagtgttgaataatgtatcatccagagtgatgttatctgtgacagtcaccagctttaagctgaaccattttatgaataccaaataaatagacctcttgtactgaaaacatatttgtgactttaatcgtgctgcttggatagaaatatttttactggttcttctgaattgacagtaaacctgtccattatgaatggcctactgttctattatttgttttgacttgaatttatccaccaaagacttcatttgtgtatcatcaataaagttgtatgtttcaactgacaaaaa

SEQ ID NO: 2401 - DNA, 2674 bp, Homo sapiens
  source 1..2674: mol_type = unassigned DNA
gtgggcaaaggtacttaaagccctgaccgtcgttctccgtcctcctctgggtaccaactctattgcgcagctcgctgccgtgcgtttaacccaggcgaggaggaggaggagaaaattcccccagattcgggcaggcccgcaccccacattccgtcctgttttgagaggaggagggaagagaaataaacgtggcagcgcatagaaggccagcagggagactgctttccagacacctccggcccacacagccgttcaccccccgtcttttcagtcctggaaaaggaattcggtctgtccttaggatgaagctctaactgaactgaagtaaggagaaacagccttgaatctttggagggtctgtcttccttttgggctctgtgcaactgcagctacagtggaaaaaagcaaactgctcttgatcccaggccctgcctaagcctcagcagaacttgtaagcctaaactgaagagcctcacccggacgagcaggcatcccttaaccttaagcaatccagttccacgccctggatcagtgaataaccccagctgcaccatgagccgcgttcgggatgctggctgtgtagcggcggggatagtgataggggctggtgcctggtactgtgtctacaaatacaccagggggagagaccagaccaagaagagaatggccaagcccaaaaaccgggctgtggctgggactggagccagggctagagctgggctaagagccggattcacaatcgaccttgggtcaggattcagtcccccaaccccagtccgtgctgaagcagaggacagggcccaggatgaagcctctgctctggacacagttggagctgaggcagtggccccagctgcatccagcgctgaggctcagagtggggcaggcagtcaggcccaagaggcagatggagccggggttgggcctaaggccgaatcagtagttggggctgcaatggcttctgcaatagcaccacctcccggggtgacagaggcccttggggctgcagaagcccctgcaatggcaggggctcccaaagtggcagaagctcccagagaagcggagacttccagggcagcggtgcctcctgggacagtggtgcctaccgaagcggcagcacccactgaggtgaccgagggtcctggggtagcagcacctaccaaggtagctgaagctcccggggtggcatcgcctaccgaggcagctgaggctcctgtgcccgcaacgcctactggggctgcagcacctactggggctgcagagtctcctggaacttctggttcccctagaacagcggtggttcctggaacatcagctgccaagaaagcaacccctggggctcacactggggctataccgaaagccacatcagcgactggagcggtacccaaaggtggaggcaagggtgtaaccaggtcccggaatgggggcaagggcaagggcaagaaaagcaaagttgaagtagacgaactggggatgggcttccgtcctggagatggggctgcagcagctgctgcagcctctgctaatggcggacaggctttcctggcagaggtccctgattctgaggaaggggagtccgggtggactgacacagagtcagattcagactctgagcccgagacccagcgcagagggaggggaagaagacccgttgccatgcagaagcgcccctttccttatgaaattgatgagattctgggtgtccgcgatctcaggaaggtccttgccttgcttcagaaatctgatgatcctttcatccaacaggtagctttgctcactctgagcaacaatgccaattattcatgcaatcaagagacaatccgcaaattgggaggcctcccaattattgcaaacatgatcaacaaaactgatccacacattaaggaaaaagccttaatggccatgaataacctgagtgagaattatgaaaatcagggccggcttcaggtgtacatgaataaagtgatggatgatatcatggcctctaacctgaactcagcagttcaagtagttggactaaaatttctaacaaacatgactattactaatgactaccagcacctgcttgtcaattccattgcaaactttttccgtttgctatctcagggaggtggaaaaatcaaggttgagattttgaaaatcctttcgaattttgctgaaaatccagatatgttgaagaaacttctcagtacccaagtgccagcatcatttagttccctctataattcttacgtggaatcagaaatccttattaatgcccttactctatttgagattatctatgacaatctcagagcagaagtgtttaactatagagaattcaataaaggttcccttttttacttatgcactacatctggagtgtgtgttaagaaaattagagccttagcaaatcaccatgacctcttagtgaaagtgaaagttataaaactagtgaacaaattctgattggttatgtaccgtcaaaagacttgaagaaatttcatgattttgcagtgtggaagcgttgaaaattgaaagttactgcttttccacttgctcatatagtaaagggatcctttcagctgccagtgttgaataatgtatcatccagagtgatgttatctgtgacagtcaccagctttaagctgaaccattttatgaataccaaataaatagacctcttgtactg

SEQ ID NO: 2402 - DNA, 914 bp, Homo sapiens
  source 1..914: mol_type = unassigned DNA
ctctattgcgcagctcgctgccgtgcgtttaacccaggcgaggaggaggaggagaaaattcccccagattcgggcagactgctttccagacacctccggcccacacagccgttcaccccccgtcttttcagtcctggaaaaggaattcggtctgtccttaggatgaagctctaactgaactgaagtaaggagaaacagccttgaatctttggagggtctgtcttccttttgggctctgtgcaactgcagctacagtggaaaaaagcaaactgctcttgatcccaggccctgcctaagcctcagcagaacttgtaagcctaaactgaagagcctcacccggacgagcaggcatcccttaaccttaagcaatccagttccacgccctggatcagtgaataaccccagctgcaccatgagccgcgttcgggatgctggctgtgtagcggcggggatagtgataggggctggtgcctggtactgtgtctacaaatacaccagggggagagaccagaccaagaagagaatggccaagcccaaaaaccgggctgtggctgggactggagccagggctagagctgggctaagagccggattcacaatcgaccttgggtcaggattcagtcccccaaccccagtccgtgctgaagcagaggacagggcccaggatgaagcctctgctctggacacagttggagctgaggcagtggccccagctgcatccagcgctgaggctcagagtggggcaggcagtcaggcccaagaggcagatggagccggggttgggcctaaggccgaatcagtagttggggctgcaatggcttctgcaatagcaccacctcccggggtgacagaggcccttggggctgcagaagcccctgcaatggcaggggctcccaaagtggcagaagctccca

SEQ ID NO: 2403 - DNA, 580 bp, Homo sapiens
  source 1..580: mol_type = unassigned DNA
cgaggaggaggaggagaaaattcccccagattcgggcaggcccgcaccccacattccgtcctgttttgagaggaggagggaagagaaataaacgtggcagcgcatagaaggccagcagggagactgctttccagacacctccggcccacacagccgttcaccccccgtcttttcagtcctggaaaaggaattcgggtctgtcttccttttgggctctgtgcaactgcagctacagtggaaaaaagcaaactgctcttgatcccaggccctgcctaagcctcagcagaacttgtaagcctaaactgaagagcctcacccggacgagcaggcatcccttaaccttaagcaatccagttccacgccctggatcagtgaataaccccagctgcaccatgagccgcgttcgggatgctggctgtgtagcggcggggatagtgataggggctggtgcctggtactgtgtctacaaatacaccagggggagagaccagaccaagaagagaatggccaagcccaaaaaccgggctgtggctgggactggagccagggctagagctgggctaagagccggattcacaat

SEQ ID NO: 2404 - DNA, 854 bp, Homo sapiens
  source 1..854: mol_type = unassigned DNA
acgaaaaggcagttactgagacccttgtcctggatgctgatccatccaccaggctttcattgtctaacgtcgacagtctatatttctgctcttcagtctgtccttaggatgaagctctaactgaactgaagtaaggagaaacagccttgaatctttggagggtctgtcttccttttgggctctgtgcaactgcagctacagtggaaaaaagcaaactgctcttgatcccaggccctgcctaagcctcagcagaacttgtaagcctaaactgaagagcctcacccggacgagcaggcatcccttaaccttaagcaatccagttccacgccctggatcagtgaataaccccagctgcaccatgagccgcgttcgggatgctggctgtgtagcggcggggatagtgataggggctggtgcctggtactgtgtctacaaatacaccagggggagagaccagaccaagaagagaatggccaagcccaaaaaccgggctgtggctgggactggagccagggctagagctgggctaagagccggattcacaatcgaccttgggtcaggattcagtcccccaaccccagtccgtgctgaagcagaggacagggcccaggatgaagcctctgctctggacacagttggagctgaggcagtggccccagctgcatccagcgctgaggctcagagtggggcaggcagtcaggcccaagaggcagatggagccggggttgggcctaaggccgaatcagtagttggggctgcaatggcttctgcaatagcaccacctcccggggtgacagaggcccttggggctgcagaagcccctgcaatggcaggggctcccaaagtggcagaag

SEQ ID NO: 2405 - DNA, 821 bp, Homo sapiens
  source 1..821: mol_type = unassigned DNA
actctattgcgcagctcgctgccgtgcgtttaacccaggcgaggaggaggaggagaaaattcccccagattcgggcaggcccgcaccccacattccgtcctgttttgagaggaggagggaagagaaataaacgtggcagcgcatagaaggccagcagggaggttgggaaaggactgctttccagacacctccggcccacacagccgttcaccccccgtcttttcagtcctggaaaaggaattcggtctgtccttaggatgaagctctaactgaactgaagtaaggagaaacagccttgaatctttggagggtctgtcttccttttgggctctgtgcaactgcagctacagtggaaaaaagcaaactgctcttgatcccaggccctgcctaagcctcagcagaacttgtaagcctaaactgaagagcctcacccggacgagcaggcatcccttaaccttaagcaatccagttccacgccctggatcagtgaataaccccagctgcaccatgagccgcgttcgggatgctggctgtgtagcggcggggatagtgataggggctggtgcctggtactgtgtctacaaatacaccagggggagagaccagaccaagaagagaatggccaagcccaaaaaccgggctgtggctgggactggagccagggctagagctgggctaagagccggattcacaatcgaccttgggtcaggattcagtcccccaaccccagtccgtgctgaagcagaggacagggcccaggatgaagcctctgctctggacacagttggagctgaggcagtggccccagctgcatccagcgc

SEQ ID NO: 2406 - DNA, 758 bp, Homo sapiens
  source 1..758: mol_type = unassigned DNA
tattgcgcagctcgctgccgtgcgtttaacccaggcgaggaggaggaggagaaaattcccccagattcgggcaggcccgcaccccacattccgtcctgttttgagaggaggagggaagagaaataaacgtggcagcgcatagaaggccagcagggagacacctccggcccacacagccgttcaccccccgtcttttcagtcctggaaaaggaattcggtctgtccttaggatgaagctctaactgaactgaagtaaggagaaacagccttgaatctttggagggtctgtcttccttttgggctctgtgcaactgcagctacagtggaaaaaagcaaactgctcttgatcccaggccctgcctaagcctcagcagaacttgtaagcctaaactgaagagcctcacccggacgagcaggcatcccttaaccttaagcaatccagttccacgccctggatcagtgaataaccccagctgcaccatgagccgcgttcgggatgctggctgtgtagcggcggggatagtgataggggctggtgcctggtactgtgtctacaaatacaccagggggagagaccagaccaagaagagaatggccaagcccaaaaaccgggctgtggctgggactggagccagggctagagctgggctaagagccggattcacaatcgaccttgggtcaggattcagtcccccaaccccagtccgtgctgaagcagaggacagggcccaggatgaagcctctgctctggacacagt

SEQ ID NO: 2407 - DNA, 3344 bp, Homo sapiens
  source 1..3344: mol_type = unassigned DNA
tctgagtaccagctccccactgccctgagggcgggccggcctgcggcggagggaaaaaggaagaggagaaggaaattgtcccgaatccctgcagtgggtccaagcctctcccgggtggccagtctttctgtaggttgcggcacaacgccaggcaaaagaagaggaaggaatttaatcctaatcggtggaggtcgatttgagggtctgctgtagcaggtggctccgcttgaagcgagggaggaagtttcctccgatcagtagagattggaaagattgttgggagtggcacaccactagggaaaagaagaaggggcgaactgcttgtcttgaggaggtcaacccccagaatcagctcttgtggccttgaagtggctgaagacgatcaccctccacaggcttgagcccagtcccacagccttcctcccccagcctgagtgactactctattccttggtccctgctattgtcggggacgattgcatgggctacgccaggaaagtaggctgggtgaccgcaggcctggtgattggggctggcgcctgctattgcatttatagactgactaggggaagaaaacagaacaaggaaaaaatggctgagggtggatctggggatgtggatgatgctggggactgttctggggccaggtataatgactggtctgatgatgatgatgacagcaatgagagcaagagtatagtatggtacccaccttgggctcggattgggactgaagctggaaccagagctagggccagggcaagggccagggctacccgggcacgtcgggctgtccagaaacgggcttcccccaattcagatgataccgttttgtcccctcaagagctacaaaaggttctttgcttggttgagatgtctgaaaagccttatattcttgaagcagctttaattgctctgggtaacaatgctgcttatgcatttaacagagatattattcgtgatctgggtggtctcccaattgtcgcaaagattctcaatactcgggatcccatagttaaggaaaaggctttaattgtcctgaataacttgagtgtgaatgctgaaaatcagcgcaggcttaaagtatacatgaatcaagtgtgtgatgacacaatcacttctcgcttgaactcatctgtgcagcttgctggactgagattgcttacaaatatgactgttactaatgagtatcagcacatgcttgctaattccatttctgacttttttcgtttattttcagcgggaaatgaagaaaccaaacttcaggttctgaaactccttttgaatttggctgaaaatccagccatgactagggaactgctcagggcccaagtaccatcttcactgggctccctctttaataagaaggagaacaaagaagttattcttaaacttctggtcatatttgagaacataaatgataatttcaaatgggaagaaaatgaacctactcagaatcaattcggtgaaggttcactttttttctttttaaaagaatttcaagtgtgtgctgataaggttctgggaatagaaagtcaccatgattttttggtgaaagtaaaagttggaaaattcatggccaaacttgctgaacatatgttcccaaagagccaggaataacaccttgattttgtaatttagaagcaacacacattgtaaactattcattttctccaccttgtttatatggtaaaggaatcctttcagctgccagttttgaataatgaatatcatattgtatcatcaatgctgatatttaactgagttggtctttaggtttaagatggataaatgaatatcactacttgttctgaaaacatgtttgttgctttttatctcgctgcctagattgaaatattttgctatttcttctgcataagtgacagtgaaccaattcatcatgagtaagctcccttctgtcattttcattgatttaatttgtgtatcatcaataaaattgtatgttaatgctggaaagaaaaaaagaagaaagaaagaaaccatccctgtccttcagtttataatctagttggagagataagaaacgtacaaaccaaaagataacagaatatctgaagcatgtactcattgtcagatgttccctctgagagcacagaggaggcaaaagcttctgtgggatgtgctagtcggctaaagcttcacagaggaggtggcaattgaaaatgagtcctgaatggggtagggtggttagggaattccatgagacaagacaaggggggcatggtgtgagaaaggcatggaagtaggaaccctcttcctatgacaggagatcattctgcttagagtggagagtgtggagagtgggagtagataattttggaaagctgggtgaagccagttgtggagaattgtttgaatattatcccattgaatacccagagccactaaatctttttttactagaaaataattggggtccatatgaaagtctctattactgagtagtgtcaatgagggtgtggcaaaatggagcctttcacatcctagtggtggccatttggtaatacagatataagccttaaactatgtaaacccttgtcctaaggaagtaattgaataattgcccaaagattgtatgtatgaggctgttcatcccagcactgtctaagctagtaaaaattggaaacaatttaagtatctagcacattggattggttataaagcaaggaatgttcacacagtaggatattataagtatgctgatggaaatctatattgccaggaaaagctattcattatgcgttgtgaagtcagaaagtaaaaaagggtagatagaagtattcgaagtatagttccattttttgagactaataaaacatatgtttaaaaggacactaaaaactggagttatagatatccagatagaaacagtagttatctttgggtagaagaataatgagtgatctttacttttttactttttattcatctttgtgtttttatttatctaaaatgggtattgatttttaggacggttttgaaaaagaaaagtgttgggaatgaagcaagtgattgattggaaaacatactgaatggaagaaatatttagattaaaaatgaggtaggttgaagtttcttctctgaaatgatagataaatggtgaagataaggcttattgtgaggattcagtgaggtaatatatgcaaagtacttacaatgttctggcacatagtaattaattaagaaaatcgagcacccttaattacctagaatgcagggttgttagttttttggttgacttttgttttgctggggcattctgccatgttttagtgtcatttaataaataatagtaacaataaaggttaacatttattaagtga

SEQ ID NO: 2408 - DNA, 3318 bp, Homo sapiens
  source 1..3318: mol_type = unassigned DNA
tctctcccactcgccgcccgctttccaagacatatgtcccgcttgcagcccatttcgatgctgcgaaacgtgggtccaagcctctcccgggtggccagtctttctgtaggttgcggcacaacgccaggcaaaagaagaggaaggaatttaatcctaatcggtggaggtcgatttgagggtctgctgtagcaggtggctccgcttgaagcgagggaggaagtttcctccgatcagtagagattggaaagattgttgggagtggcacaccactagggaaaagaagaaggggcgaactgcttgtcttgaggaggtcaacccccagaatcagctcttgtggccttgaagtggctgaagacgatcaccctccacaggcttgagcccagtcccacagccttcctcccccagcctgagtgactactctattccttggtccctgctattgtcggggacgattgcatgggctacgccaggaaagtaggctgggtgaccgcaggcctggtgattggggctggcgcctgctattgcatttatagactgactaggggaagaaaacagaacaaggaaaaaatggctgagggtggatctggggatgtggatgatgctggggactgttctggggccaggtataatgactggtctgatgatgatgatgacagcaatgagagcaagagtatagtatggtacccaccttgggctcggattgggactgaagctggaaccagagctagggccagggcaagggccagggctacccgggcacgtcgggctgtccagaaacgggcttcccccaattcagatgataccgttttgtcccctcaagagctacaaaaggttctttgcttggttgagatgtctgaaaagccttatattcttgaagcagctttaattgctctgggtaacaatgctgcttatgcatttaacagagatattattcgtgatctgggtggtctcccaattgtcgcaaagattctcaatactcgggatcccatagttaaggaaaaggctttaattgtcctgaataacttgagtgtgaatgctgaaaatcagcgcaggcttaaagtatacatgaatcaagtgtgtgatgacacaatcacttctcgcttgaactcatctgtgcagcttgctggactgagattgcttacaaatatgactgttactaatgagtatcagcacatgcttgctaattccatttctgacttttttcgtttattttcagcgggaaatgaagaaaccaaacttcaggttctgaaactccttttgaatttggctgaaaatccagccatgactagggaactgctcagggcccaagtaccatcttcactgggctccctctttaataagaaggagaacaaagaagttattcttaaacttctggtcatatttgagaacataaatgataatttcaaatgggaagaaaatgaacctactcagaatcaattcggtgaaggttcactttttttctttttaaaagaatttcaagtgtgtgctgataaggttctgggaatagaaagtcaccatgattttttggtgaaagtaaaagttggaaaattcatggccaaacttgctgaacatatgttcccaaagagccaggaataacaccttgattttgtaatttagaagcaacacacattgtaaactattcattttctccaccttgtttatatggtaaaggaatcctttcagctgccagttttgaataatgaatatcatattgtatcatcaatgctgatatttaactgagttggtctttaggtttaagatggataaatgaatatcactacttgttctgaaaacatgtttgttgctttttatctcgctgcctagattgaaatattttgctatttcttctgcataagtgacagtgaaccaattcatcatgagtaagctcccttctgtcattttcattgatttaatttgtgtatcatcaataaaattgtatgttaatgctggaaagaaaaaaagaagaaagaaagaaaccatccctgtccttcagtttataatctagttggagagataagaaacgtacaaaccaaaagataacagaatatctgaagcatgtactcattgtcagatgttccctctgagagcacagaggaggcaaaagcttctgtgggatgtgctagtcggctaaagcttcacagaggaggtggcaattgaaaatgagtcctgaatggggtagggtggttagggaattccatgagacaagacaaggggggcatggtgtgagaaaggcatggaagtaggaaccctcttcctatgacaggagatcattctgcttagagtggagagtgtggagagtgggagtagataattttggaaagctgggtgaagccagttgtggagaattgtttgaatattatcccattgaatacccagagccactaaatctttttttactagaaaataattggggtccatatgaaagtctctattactgagtagtgtcaatgagggtgtggcaaaatggagcctttcacatcctagtggtggccatttggtaatacagatataagccttaaactatgtaaacccttgtcctaaggaagtaattgaataattgcccaaagattgtatgtatgaggctgttcatcccagcactgtctaagctagtaaaaattggaaacaatttaagtatctagcacattggattggttataaagcaaggaatgttcacacagtaggatattataagtatgctgatggaaatctatattgccaggaaaagctattcattatgcgttgtgaagtcagaaagtaaaaaagggtagatagaagtattcgaagtatagttccattttttgagactaataaaacatatgtttaaaaggacactaaaaactggagttatagatatccagatagaaacagtagttatctttgggtagaagaataatgagtgatctttacttttttactttttattcatctttgtgtttttatttatctaaaatgggtattgatttttaggacggttttgaaaaagaaaagtgttgggaatgaagcaagtgattgattggaaaacatactgaatggaagaaatatttagattaaaaatgaggtaggttgaagtttcttctctgaaatgatagataaatggtgaagataaggcttattgtgaggattcagtgaggtaatatatgcaaagtacttacaatgttctggcacatagtaattaattaagaaaatcgagcacccttaattacctagaatgcagggttgttagttttttggttgacttttgttttgctggggcattctgccatgttttagtgtcatttaataaataatagtaacaataaaggttaacatttattaagt

SEQ ID NO: 2409 - DNA, 4041 bp, Homo sapiens
  source 1..4041: mol_type = unassigned DNA
gagggcgggagggctggcccggggtctcgggttgcgcgctgggcctggagggagggggcggcccccgcaccggtccgagttgcggccgcgtggactgcgacccgcgccgcgccgcaccgcgccgcgccctgggaacgccgctccccgcgcgccaacggacccggggaagcccttctggggtccgaggccgcgctgcggggccgcccacgctgcgctccaggagccagagcctgcagggtgggtgtcgggacatgctgatcttccctcaagacagctggcgggcgctctggtcatggaggactgcaatgtgcactcggccgccagcatcctggcctcggtgaaggagcaggaggcccgcttcgagaggctgacacgggcactggagcaggagcggcgccatgttgccctacagctggagcgtgcccagcagcctggcatggtcagtggtggcatgggcagtgggcagcccctgccaatggcctggcaacagctggtcctccaggagcagagcccaggcagccaggcctcactggccacgatgccggaggcacctgatgtgctggaggagaccgtgacggtggaggaggaccccggcacacccacttcccatgtgtctattgtcacatccgaagatggcacaacccggcgcaccgagaccaaggtcaccaagactgtcaagacggtgaccactcggacagtacgccaggtgcccgtgggcccagatggactccccctgctggatggcggccccccactaggcccttttgcagatggtgccctggaccggcatttcctgctgcgtggtggtggcccagtggccacactctctcgagcctacctcagcagtgggggtggctttcccgaaggccccgagccccgggacagccccagctatggcagcctgtcccgagggctgggcatgcggcccccacgtgctggcccccttggcccaggccctggtgatggctgcttcacactgcctggccaccgggaagccttcccggtgggtcctgagcctgggccaccaggtggccgctccctgcccgagcgcttccaggcagagccgtatggcttggaggatgacacgcgcagcctggccgctgatgacgagggtggccctgagctggagcctgactatggcacggccacaaggaggaggcctgagtgtgggcggggccttcataccagggcctacgaggacacagcagatgatggcggcgagctggcggacgagcggcctgcgttcccaatggtgacggcgcccctggcccagcctgaacggggcagcatgggcagcctggaccggctggtgcggcgctcgccctcagtggatagcgcccgcaaggagccgcgctggcgggaccctgagctgcctgaggtgctggccatgctgcggcaccccgtggaccccgtgaaggccaatgcggccgcctacctgcagcatctgtgctttgagaacgagggtgtcaagcggcgtgtacggcagttgcgggggctgccgctgcttgtggcactgctggaccacccgcgggctgaggtgcggcgccgggcctgtggggcactgcgcaacctctcctatggccgcgacactgacaacaaggccgccatccgggactgcggtggtgtgcctgccctggtgcgcctgctgagggctgcccgggacaacgaggtccgtgagcttgtcactggcaccctgtggaacctgtcatcctatgagcccctgaagatggtcatcattgaccatggcctgcagacgctgacccacgaggtgatcgtgccccactcaggatgggagcgtgagcccaacgaggactccaagccacgggacgccgagtggacaactgtcttcaagaacacgtcgggctgcctgaggaatgtgagctccgatggtgctgaggcccggcggcgactccgggagtgtgaagggctggtggacgcgctcctgcatgccctgcagtcggctgtgggccggaaggacactgacaacaagtcggtggagaactgcgtgtgcatcatgcggaacctgtcctaccacgtgcacaaggaggtgcccggggccgacaggtaccaggaggccgagcccgggcccctgggcagtgctgtaggctcccagcgccggaggcgggatgatgccagctgctttggaggcaagaaggccaaagaggagtggttccaccaaggaaagaaggatggtgagatggaccggaactttgacacgctagacctgcccaagcgaactgaggccgccaaaggctttgagctgctgtaccagcccgaggtggtacgtctctacctctccctcctcacggagagccggaacttcaacaccctggaggctgccgccggcgctctgcagaacctcagtgccggcaactggatgtgggccacgtacatccgcgccacagtgcgcaaagagcgcgggctgccggtgcttgtggaactgctgcagtctgagaccgacaaggtggtgcgcgccgtcgccatcgctctgcgcaacctctcgctggaccggcgcaacaaagacctcatcgggagctacgccatggctgagcttgtgcggaatgtgcgcaatgcacaggctccgccgcgaccgggggcctgcctggaggaagacaccgtggtggcggtgctcaacaccatccacgaaatcgtgtccgacagcctggataacgcgcgctcgctcctgcaggcacgcggggtgccagcgttggtggctctcgtggcctccagccaatcggtacgcgaagcgaaggcggcgtcacacgtgctgcagacagtgtggagctacaaggagctgcgtggtaccttgcagaaagatggttggaccaaggcgcgcttccagtcagctgctgctactgccaaggggcctaagggagcactgagtcctgggggcttcgatgacagcacgctgccactggtggacaagagccttgagggcgagaaaactggcagccgggatgtgatccccatggatgcgctgggcccagacggatactccacggtggaccggagggagcggaggccacggggcgccagctctgcaggagaggcctctgagaaggaacccttgaaactcgaccccagcaggaaggcccctccccccgggcccagcaggcccgcggtcaggctggtggacgccgtaggggacgctaagcctcagcccgttgattcctgggtctagcttgcatgcctgggcccaggcccagcctcttgttcttagggcttggatcgtggaagaagggccaccctgagcagatcgtgccgtggagcttggagccccctggcggcaggggttggcagcgcctcgccccagccaagcctgactttggggacaccctcctgcccccccaccccactccccccatcctacctaactccctaggcctgagttagctgtttactgacatggtgctgtgtgtgagcgagtgacagaaggcccgaggaggccgactgggctgctggggcagggcccagggaggtggcagggaagggtgcctggctgggctttggggctggtgggataggagggtgcccctgggaacacagtgccccagtggtgcgggccaggtctggcgccaggggcaggcagctaggcagggagggggctgggaaagaacttggacttctaaaggcggagggtctccctgggcaccctgcaggcaggcagaccacggtgtggggggtgccccacaaggcccagccctgggcaaggaagctttggaagcagcaaggtgggggtcaggctacaggtgccccacctccccagagccctgcagtcacgtgaggcccctgtgcagtagagagcctttctccagcccatgctggctggggccggggctgccgcatctgcctggagcctgggcagcacctccgggactgaccttcggcagtggctgggggactgctttcagtgcctgctgttcgtgactcagaaacagaagaaaaacactgagaaaaagcattaaaaataagccaaaataagactattggtaaacacctaaatttttgtaagaaaatttaaaaattaaagcagcaaaggaa

SEQ ID NO: 2410 - DNA, 3558 bp, Homo sapiens
  source 1..3558: mol_type = unassigned DNA
atgccggccgaactcagacaggagcagagcccaggcagccaggcctcactggccacgatgccggaggcacctgatgtgctggaggagaccgtgacggtggaggaggaccccggcacacccacttcccatgtgtctattgtcacatccgaagatggcacaacccggcgcaccgagaccaaggtcaccaagactgtcaagacggtgaccactcggacagtacgccaggtgcccgtgggcccagatggactccccctgctggatggcggccccccactaggcccttttgcagatggtgccctggaccggcatttcctgctgcgtggtggtggcccagtggccacactctctcgagcctacctcagcagtgggggtggctttcccgaaggccccgagccccgggacagccccagctatggcagcctgtcccgagggctgggcatgcggcccccacgtgctggcccccttggcccaggccctggtgatggctgcttcacactgcctggccaccgggaagccttcccggtgggtcctgagcctgggccaccaggtggccgctccctgcccgagcgcttccaggcagagccgtatggcttggaggatgacacgcgcagcctggccgctgatgacgagggtggccctgagctggagcctgactatggcacggccacaaggaggaggcctgagtgtgggcggggccttcataccagggcctacgaggacacagcagatgatggcggcgagctggcggacgagcggcctgcgttcccaatggtgacggcgcccctggcccagcctgaacggggcagcatgggcagcctggaccggctggtgcggcgctcgccctcagtggatagcgcccgcaaggagccgcgctggcgggaccctgagctgcctgaggtgctggccatgctgcggcaccccgtggaccccgtgaaggccaatgcggccgcctacctgcagcatctgtgctttgagaacgagggtgtcaagcggcgtgtacggcagttgcgggggctgccgctgcttgtggcactgctggaccacccgcgggctgaggtgcggcgccgggcctgtggggcactgcgcaacctctcctatggccgcgacactgacaacaaggccgccatccgggactgcggtggtgtgcctgccctggtgcgcctgctgagggctgcccgggacaacgaggtccgtgagcttgtcactggcaccctgtggaacctgtcatcctatgagcccctgaagatggtcatcattgaccatggcctgcagacgctgacccacgaggtgatcgtgccccactcaggatgggagcgtgagcccaacgaggactccaagccacgggacgccgagtggacaactgtcttcaagaacacgtcgggctgcctgaggaatgtgagctccgatggtgctgaggcccggcggcgactccgggagtgtgaagggctggtggacgcgctcctgcatgccctgcagtcggctgtgggccggaaggacactgacaacaagtcggtggagaactgcgtgtgcatcatgcggaacctgtcctaccacgtgcacaaggaggtgcccggggccgacaggtaccaggaggccgagcccgggcccctgggcagtgctgtaggctcccagcgccggaggcgggatgatgccagctgctttggaggcaagaaggccaaagaggagtggttccaccaaggaaagaaggatggtgagatggaccggaactttgacacgctagacctgcccaagcgaactgaggccgccaaaggctttgagctgctgtaccagcccgaggtggtacgtctctacctctccctcctcacggagagccggaacttcaacaccctggaggctgccgccggcgctctgcagaacctcagtgccggcaactggatgtgggccacgtacatccgcgccacagtgcgcaaagagcgcgggctgccggtgcttgtggaactgctgcagtctgagaccgacaaggtggtgcgcgccgtcgccatcgctctgcgcaacctctcgctggaccggcgcaacaaagacctcatcgggagctacgccatggctgagcttgtgcggaatgtgcgcaatgcacaggctccgccgcgaccgggggcctgcctggaggaagacaccgtggtggcggtgctcaacaccatccacgaaatcgtgtccgacagcctggataacgcgcgctcgctcctgcaggcacgcggggtgccagcgttggtggctctcgtggcctccagccaatcggtacgcgaagcgaaggcggcgtcacacgtgctgcagacagtgtggagctacaaggagctgcgtggtaccttgcagaaagatggttggaccaaggcgcgcttccagtcagctgctgctactgccaaggggcctaagggagcactgagtcctgggggcttcgatgacagcacgctgccactggtggacaagagccttgagggcgagaaaactggcagccgggatgtgatccccatggatgcgctgggcccagacggatactccacggtggaccggagggagcggaggccacggggcgccagctctgcaggagaggcctctgagaaggaacccttgaaactcgaccccagcaggaaggcccctccccccgggcccagcaggcccgcggtcaggctggtggacgccgtaggggacgctaagcctcagcccgttgattcctgggtctagcttgcatgcctgggcccaggcccagcctcttgttcttagggcttggatcgtggaagaagggccaccctgagcagatcgtgccgtggagcttggagccccctggcggcaggggttggcagcgcctcgccccagccaagcctgactttggggacaccctcctgcccccccaccccactccccccatcctacctaactccctaggcctgagttagctgtttactgacatggtgctgtgtgtgagcgagtgacagaaggcccgaggaggccgactgggctgctggggcagggcccagggaggtggcagggaagggtgcctggctgggctttggggctggtgggataggagggtgcccctgggaacacagtgccccagtggtgcgggccaggtctggcgccaggggcaggcagctaggcagggagggggctgggaaagaacttggacttctaaaggcggagggtctccctgggcaccctgcaggcaggcagaccacggtgtggggggtgccccacaaggcccagccctgggcaaggaagctttggaagcagcaaggtgggggtcaggctacaggtgccccacctccccagagccctgcagtcacgtgaggcccctgtgcagtagagagcctttctccagcccatgctggctggggccggggctgccgcatctgcctggagcctgggcagcacctccgggactgaccttcggcagtggctgggggactgctttcagtgcctgctgttcgtgactcagaaacagaagaaaaacactgagaaaaagcattaaaaataagccaaaataagactattggtaaacacctaaatttttgtaagaaaatttaaaaattaaagcagcaaagg

SEQ ID NO: 2411 - DNA, 2700 bp, Homo sapiens
  source 1..2700: mol_type = unassigned DNA
atgccggccgaactcagacaggagcagagcccaggcagccaggcctcactggccacgatgccggaggcacctgatgtgctggaggagaccgtgacggtggaggaggaccccggcacacccacttcccatgtgtctattgtcacatccgaagatggcacaacccggcgcaccgagaccaaggtcaccaagactgtcaagacggtgaccactcggacagtacgccaggtgcccgtgggcccagatggactccccctgctggatggcggccccccactaggcccttttgcagatggtgccctggaccggcatttcctgctgcgtggtggtggcccagtggccacactctctcgagcctacctcagcagtgggggtggctttcccgaaggccccgagccccgggacagccccagctatggcagcctgtcccgagggctgggcatgcggcccccacgtgctggcccccttggcccaggccctggtgatggctgcttcacactgcctggccaccgggaagccttcccggtgggtcctgagcctgggccaccaggtggccgctccctgcccgagcgcttccaggcagagccgtatggcttggaggatgacacgcgcagcctggccgctgatgacgagggtggccctgagctggagcctgactatggcacggccacaaggaggaggcctgagtgtgggcggggccttcataccagggcctacgaggacacagcagatgatggcggcgagctggcggacgagcggcctgcgttcccaatggtgacggcgcccctggcccagcctgaacggggcagcatgggcagcctggaccggctggtgcggcgctcgccctcagtggatagcgcccgcaaggagccgcgctggcgggaccctgagctgcctgaggtgctggccatgctgcggcaccccgtggaccccgtgaaggccaatgcggccgcctacctgcagcatctgtgctttgagaacgagggtgtcaagcggcgtgtacggcagttgcgggggctgccgctgcttgtggcactgctggaccacccgcgggctgaggtgcggcgccgggcctgtggggcactgcgcaacctctcctatggccgcgacactgacaacaaggccgccatccgggactgcggtggtgtgcctgccctggtgcgcctgctgagggctgcccgggacaacgaggtccgtgagcttgtcactggcaccctgtggaacctgtcatcctatgagcccctgaagatggtcatcattgaccatggcctgcagacgctgacccacgaggtgatcgtgccccactcaggatgggagcgtgagcccaacgaggactccaagccacgggacgccgagtggacaactgtcttcaagaacacgtcgggctgcctgaggaatgtgagctccgatggtgctgaggcccggcggcgactccgggagtgtgaagggctggtggacgcgctcctgcatgccctgcagtcggctgtgggccggaaggacactgacaacaagtcggtggagaactgcgtgtgcatcatgcggaacctgtcctaccacgtgcacaaggaggtgcccggggccgacaggtaccaggaggccgagcccgggcccctgggcagtgctgtaggctcccagcgccggaggcgggatgatgccagctgctttggaggcaagaaggccaaagaggagtggttccaccaaggaaagaaggatggtgagatggaccggaactttgacacgctagacctgcccaagcgaactgaggccgccaaaggctttgagctgctgtaccagcccgaggtggtacgtctctacctctccctcctcacggagagccggaacttcaacaccctggaggctgccgccggcgctctgcagaacctcagtgccggcaactggatgtgggccacgtacatccgcgccacagtgcgcaaagagcgcgggctgccggtgcttgtggaactgctgcagtctgagaccgacaaggtggtgcgcgccgtcgccatcgctctgcgcaacctctcgctggaccggcgcaacaaagacctcatcgggagctacgccatggctgagcttgtgcggaatgtgcgcaatgcacaggctccgccgcgaccgggggcctgcctggaggaagacaccgtggtggcggtgctcaacaccatccacgaaatcgtgtccgacagcctggataacgcgcgctcgctcctgcaggcacgcggggtgccagcgttggtggctctcgtggcctccagccaatcggtacgcgaagcgaaggcggcgtcacacgtgctgcagacagtgtggagctacaaggagctgcgtggtaccttgcagaaagatggttggaccaaggcgcgcttccagtcagctgctgctactgccaaggggcctaagggagcactgagtcctgggggcttcgatgacagcacgctgccactggtggacaagagccttgagggcgagaaaactggcagccgggatgtgatccccatggatgcgctgggcccagacggatactccacggtggaccggagggagcggaggccacggggcgccagctctgcaggagaggcctctgagaaggaacccttgaaactcgaccccagcaggaaggcccctccccccgggcccagcaggcccgcggtcaggctggtggacgccgtaggggacgctaagcctcagcccgttgattcctgggtctag

SEQ ID NO: 2412 - DNA, 2871 bp, Homo sapiens
  source 1..2871: mol_type = unassigned DNA
atggaggactgcaatgtgcactcggccgccagcatcctggcctcggtgaaggagcaggaggcccgcttcgagaggctgacacgggcactggagcaggagcggcgccatgttgccctacagctggagcgtgcccagcagcctggcatggtcagtggtggcatgggcagtgggcagcccctgccaatggcctggcaacagctggtcctccaggagcagagcccaggcagccaggcctcactggccacgatgccggaggcacctgatgtgctggaggagaccgtgacggtggaggaggaccccggcacacccacttcccatgtgtctattgtcacatccgaagatggcacaacccggcgcaccgagaccaaggtcaccaagactgtcaagacggtgaccactcggacagtacgccaggtgcccgtgggcccagatggactccccctgctggatggcggccccccactaggcccttttgcagatggtgccctggaccggcatttcctgctgcgtggtggtggcccagtggccacactctctcgagcctacctcagcagtgggggtggctttcccgaaggccccgagccccgggacagccccagctatggcagcctgtcccgagggctgggcatgcggcccccacgtgctggcccccttggcccaggccctggtgatggctgcttcacactgcctggccaccgggaagccttcccggtgggtcctgagcctgggccaccaggtggccgctccctgcccgagcgcttccaggcagagccgtatggcttggaggatgacacgcgcagcctggccgctgatgacgagggtggccctgagctggagcctgactatggcacggccacaaggaggaggcctgagtgtgggcggggccttcataccagggcctacgaggacacagcagatgatggcggcgagctggcggacgagcggcctgcgttcccaatggtgacggcgcccctggcccagcctgaacggggcagcatgggcagcctggaccggctggtgcggcgctcgccctcagtggatagcgcccgcaaggagccgcgctggcgggaccctgagctgcctgaggtgctggccatgctgcggcaccccgtggaccccgtgaaggccaatgcggccgcctacctgcagcatctgtgctttgagaacgagggtgtcaagcggcgtgtacggcagttgcgggggctgccgctgcttgtggcactgctggaccacccgcgggctgaggtgcggcgccgggcctgtggggcactgcgcaacctctcctatggccgcgacactgacaacaaggccgccatccgggactgcggtggtgtgcctgccctggtgcgcctgctgagggctgcccgggacaacgaggtccgtgagcttgtcactggcaccctgtggaacctgtcatcctatgagcccctgaagatggtcatcattgaccatggcctgcagacgctgacccacgaggtgatcgtgccccactcaggatgggagcgtgagcccaacgaggactccaagccacgggacgccgagtggacaactgtcttcaagaacacgtcgggctgcctgaggaatgtgagctccgatggtgctgaggcccggcggcgactccgggagtgtgaagggctggtggacgcgctcctgcatgccctgcagtcggctgtgggccggaaggacactgacaacaagtcggtggagaactgcgtgtgcatcatgcggaacctgtcctaccacgtgcacaaggaggtgcccggggccgacaggtaccaggaggccgagcccgggcccctgggcagtgctgtaggctcccagcgccggaggcgggatgatgccagctgctttggaggcaagaaggccaaaggaaagaaggatggtgagatggaccggaactttgacacgctagacctgcccaagcgaactgaggccgccaaaggctttgagctgctgtaccagcccgaggtggtacgtctctacctctccctcctcacggagagccggaacttcaacaccctggaggctgccgccggcgctctgcagaacctcagtgccggcaactggatgtgggccacgtacatccgcgccacagtgcgcaaagagcgcgggctgccggtgcttgtggaactgctgcagtctgagaccgacaaggtggtgcgcgccgtcgccatcgctctgcgcaacctctcgctggaccggcgcaacaaagacctcatcgggagctacgccatggctgagcttgtgcggaatgtgcgcaatgcacaggctccgccgcgaccgggggcctgcctggaggaagacaccgtggtggcggtgctcaacaccatccacgaaatcgtgtccgacagcctggataacgcgcgctcgctcctgcaggcacgcggggtgccagcgttggtggctctcgtggcctccagccaatcggtacgcgaagcgaaggcggcgtcacacgtgctgcagacagtgtggagctacaaggagctgcgtggtaccttgcagaaagatggttggaccaaggcgcgcttccagtcagctgctgctactgccaaggggcctaagggagcactgagtcctgggggcttcgatgacagcacgctgccactggtggacaagagccttgagggcgagaaaactggcagccgggatgtgatccccatggatgcgctgggcccagacggatactccacggtggaccggagggagcggaggccacggggcgccagctctgcaggagaggcctctgagaaggaacccttgaaactcgaccccagcaggaaggcccctccccccgggcccagcaggcccgcggtcaggctggtggacgccgtaggggacgctaagcctcagcccgttgattcctgggtctag

SEQ ID NO: 2413 - DNA, 2682 bp, Homo sapiens
  source 1..2682: mol_type = unassigned DNA
atgccggccgaactcagacaggagcagagcccaggcagccaggcctcactggccacgatgccggaggcacctgatgtgctggaggagaccgtgacggtggaggaggaccccggcacacccacttcccatgtgtctattgtcacatccgaagatggcacaacccggcgcaccgagaccaaggtcaccaagactgtcaagacggtgaccactcggacagtacgccaggtgcccgtgggcccagatggactccccctgctggatggcggccccccactaggcccttttgcagatggtgccctggaccggcatttcctgctgcgtggtggtggcccagtggccacactctctcgagcctacctcagcagtgggggtggctttcccgaaggccccgagccccgggacagccccagctatggcagcctgtcccgagggctgggcatgcggcccccacgtgctggcccccttggcccaggccctggtgatggctgcttcacactgcctggccaccgggaagccttcccggtgggtcctgagcctgggccaccaggtggccgctccctgcccgagcgcttccaggcagagccgtatggcttggaggatgacacgcgcagcctggccgctgatgacgagggtggccctgagctggagcctgactatggcacggccacaaggaggaggcctgagtgtgggcggggccttcataccagggcctacgaggacacagcagatgatggcggcgagctggcggacgagcggcctgcgttcccaatggtgacggcgcccctggcccagcctgaacggggcagcatgggcagcctggaccggctggtgcggcgctcgccctcagtggatagcgcccgcaaggagccgcgctggcgggaccctgagctgcctgaggtgctggccatgctgcggcaccccgtggaccccgtgaaggccaatgcggccgcctacctgcagcatctgtgctttgagaacgagggtgtcaagcggcgtgtacggcagttgcgggggctgccgctgcttgtggcactgctggaccacccgcgggctgaggtgcggcgccgggcctgtggggcactgcgcaacctctcctatggccgcgacactgacaacaaggccgccatccgggactgcggtggtgtgcctgccctggtgcgcctgctgagggctgcccgggacaacgaggtccgtgagcttgtcactggcaccctgtggaacctgtcatcctatgagcccctgaagatggtcatcattgaccatggcctgcagacgctgacccacgaggtgatcgtgccccactcaggatgggagcgtgagcccaacgaggactccaagccacgggacgccgagtggacaactgtcttcaagaacacgtcgggctgcctgaggaatgtgagctccgatggtgctgaggcccggcggcgactccgggagtgtgaagggctggtggacgcgctcctgcatgccctgcagtcggctgtgggccggaaggacactgacaacaagtcggtggagaactgcgtgtgcatcatgcggaacctgtcctaccacgtgcacaaggaggtgcccggggccgacaggtaccaggaggccgagcccgggcccctgggcagtgctgtaggctcccagcgccggaggcgggatgatgccagctgctttggaggcaagaaggccaaaggaaagaaggatggtgagatggaccggaactttgacacgctagacctgcccaagcgaactgaggccgccaaaggctttgagctgctgtaccagcccgaggtggtacgtctctacctctccctcctcacggagagccggaacttcaacaccctggaggctgccgccggcgctctgcagaacctcagtgccggcaactggatgtgggccacgtacatccgcgccacagtgcgcaaagagcgcgggctgccggtgcttgtggaactgctgcagtctgagaccgacaaggtggtgcgcgccgtcgccatcgctctgcgcaacctctcgctggaccggcgcaacaaagacctcatcgggagctacgccatggctgagcttgtgcggaatgtgcgcaatgcacaggctccgccgcgaccgggggcctgcctggaggaagacaccgtggtggcggtgctcaacaccatccacgaaatcgtgtccgacagcctggataacgcgcgctcgctcctgcaggcacgcggggtgccagcgttggtggctctcgtggcctccagccaatcggtacgcgaagcgaaggcggcgtcacacgtgctgcagacagtgtggagctacaaggagctgcgtggtaccttgcagaaagatggttggaccaaggcgcgcttccagtcagctgctgctactgccaaggggcctaagggagcactgagtcctgggggcttcgatgacagcacgctgccactggtggacaagagccttgagggcgagaaaactggcagccgggatgtgatccccatggatgcgctgggcccagacggatactccacggtggaccggagggagcggaggccacggggcgccagctctgcaggagaggcctctgagaaggaacccttgaaactcgaccccagcaggaaggcccctccccccgggcccagcaggcccgcggtcaggctggtggacgccgtaggggacgctaagcctcagcccgttgattcctgggtctag

SEQ ID NO: 2414 - DNA, 2238 bp, Homo sapiens
  source 1..2238: mol_type = unassigned DNA
cccgggcacctgctgtcaatcgggccaggtgggagcgatgattggccgccgggcccgccctccagaaagccccgcggggctcgcgtaggctgcaggctcggggagggagggcagcggcgccgcgtcgggagccgccgccgtcccggtcctcccgcccgcccgcccatccggtgcctcctgcagcccgcctgctgggcagggccggcgcggcccggccatggagtcctacgacatcatcgccaaccagcctgtggtcatcgacaacggttcgggggtgattaaagctggctttgcaggagaccagattcccaaatactgtttcccaaactatgtcgggcggccgaagcacatgcgggtgatggctggagccctggagggggacctcttcatcggaccaaaagcagaggagcaccgggggctgctgaccatccgctaccccatggagcacggcgtggtgcgagactggaacgacatggaacgcatctggcagtacgtctactccaaggatcagctgcagaccttctcggaggagcatcctgtgctcctcacggaggccccgctcaacccgagtaagaaccgggagaaggcggcagaggtgttctttgagaccttcaacgtgccggccctgttcatctccatgcaggctgtgctcagtctgtacgcaacaggacgcacgacaggagtggttctagactcaggggacggggtcactcatgctgtgcccatctatgagggctttgccatgcctcactccatcatgcgggtggacattgccggccgcgacgtctcccgctacctccgactcctgctgcgcaaggaaggggttgacttccatacctcggctgagtttgaggttgtccggacaatcaaagagcgagcgtgctacctgtccatcaacccacagaaggatgaggctctggagacggagaaggtgcagtacacgttgccagacggcagcacgcttgatgtggggcctgcacgattccgggcccccgagctgctgttccagccggaccttgtcggggatgagagtgaggggctccatgaggtggtggccttcgccatacacaagtccgacatggacctgcgccggacgctgttcgccaacatcgtgctctcaggtggctcaacgcttttcaaaggcttcggagaccgattactcagtgaagtgaagaagcttgccccaaaggatatcaaaatcaagatctcagccccgcaggaacggctgtactccacatggattggcggctccatcctggcctcgctggacacttttaagaagatgtgggtgtccaaaaaggagtatgaagaggatggctcccgtgctattcatcgcaaaactttctagtgcccaaggagggcggggcatgttgggagagggggagggaggggagacagagcctttaaccctttttggtcttggctcgtatactaggcttagggtcccctgcatgccctgaacccctgggtgggtggcacagcagtgcccccctgcagccttcccctctacacaggacatgcacacacaagtaacattgagctgcatggacaggagccttgagctggcgtgtgggaattgagcgccatgtcaggctgttgtgggtatccccctggcagggccagctaggcctgtggttccctgctccgactctcagggctgcctccctgagctccagggccagaatgcctggatgcctgggtagccagtttggggagtgggctgcaaggggcagccagcagctcccactggtgtgtcactgcatccattgccacctcctgttcgtgacctgacagggtgacacagcccctttcacactctgtcctcctatcttcctgggtagatgccctggtgtagggctgagtactgaatggtcttccatccccagcaagggggtgcagcccagggtcaggcccttcagagccagggcagaggatgcacggtggctagagccgctgcactatccttttcagagcacttcatccacttgctcctccctctaccctcggcaccctgggtgggaaagggttgatgctcatcatttattgaggggaagccacttaataaggagtcagacctaaaagggggtgggggacattttcttacctcacccaagaaagaggtcgtcacttttgctgtggccagggccccacctccctctctcagatatgtacaataatttaacacggttgcctgaaaaaaacttttgtaaatcattatagtaataattatggacaagg

SEQ ID NO: 2415 - DNA, 1292 bp, Homo sapiens
  source 1..1292: mol_type = unassigned DNA
gaacttcatctctctccccagaaaaggctcaacatcaactatatagccaacatgtccaaggtgtttaagaagaccagctccaatgggaagctctccatctacctggggaaacgggacttcgtggaccatgtggacacggtggaacccattgacggtgttgtcctggttgatcctgagtacttaaaatgtcgaaagttgtttgtcatgttgacatgtgcctttcgctatggccgtgatgacttggaagtgattggtctgacgttccgaaaagatctgtatgtgcagaccctgcaagtggtcccagctgaatccagcagccctcaggggcccctcacagtcctacaggagcgactactgcacaagctaggggacaatgcctacccctttaccctgcagatggtgaccaacctgccctgttctgtgacactgcagccaggtcctgaagatgcaggaaagccctgtgggattgactttgaagtgaagagtttctgtgctgaaaacccagaggagacagtctccaagagagactatgtgcggctggttgtccggaaagtacaatttgcaccaccggaggcaggccctggcccctcagcccagaccatccgccgcttccttctgtcagctcagcccctacaactccaggcctggatggacagggaggttcactaccacggagaacccatctctgtcaatgtttctatcaacaactgcaccaacaaggtcatcaaaaaaatcaagatttcagttgaccagatcacagatgttgtcctgtattcactagacaagtacaccaagactgtgttcattcaggaattcacggagactgtagctgctaattccagcttctcccagagctttgcagtaaccccaatcctggctgccagctgccagaaacggggcctggcactggatggcaaacttaagcatgaagataccaacctggcctctagcacaattattagaccgggaatggacaaagagctgctggggatcctggtgtcctacaaagtcagagtcaacctgatggtgtcctgtggtggcatcctaggagacctgacagccagcgatgttggtgtggagctacccttggtcctgatccatccgaagccatctcatgaggccgctagctctgaggacatagtcatcgaggagtttacgcggaaaggcgaggaggagagccagaaggctgtggaggctgagggagatgaggggagctgagcacctcgctctggtgcccgtctgtgtgggagcccccactgtaacactctaataaatcagtttgttcagatgtg

SEQ ID NO: 2416 - DNA, 1309 bp, Homo sapiens
  source 1..1309: mol_type = unassigned DNA
gagctggagactgatgtgaacttcatctctctccccagaaaaggctcaacatcaactatatagccaacatgtccaaggtgtttaagaagaccagctccaatgggaagctctccatctacctggggaaacgggacttcgtggaccatgtggacacggtggaacccattgacggtgttgtcctggttgatcctgagtacttaaaatgtcgaaagttgtttgtcatgttgacatgtgcctttcgctatggccgtgatgacttggaagtgattggtctgacgttccgaaaagatctgtatgtgcagaccctgcaagtggtcccagctgaatccagcagccctcaggggcccctcacagtcctacaggagcgactactgcacaagctaggggacaatgcctacccctttaccctgcagatggtgaccaacctgccctgttctgtgacactgcagccaggtcctgaagatgcaggaaagccctgtgggattgactttgaagtgaagagtttctgtgctgaaaacccagaggagacagtctccaagagagactatgtgcggctggttgtccggaaagtacaatttgcaccaccggaggcaggccctggcccctcagcccagaccatccgccgcttccttctgtcagctcagcccctacaactccaggcctggatggacagggaggttcactaccacggagaacccatctctgtcaatgtttctatcaacaactgcaccaacaaggtcatcaaaaaaatcaagatttcagttgaccagatcacagatgttgtcctgtattcactagacaagtacaccaagactgtgttcattcaggaattcacggagactgtagctgctaattccagcttctcccagagctttgcagtaaccccaatcctggctgccagctgccagaaacggggcctggcactggatggcaaacttaagcatgaagataccaacctggcctctagcacaattattagaccgggaatggacaaagagctgctggggatcctggtgtcctacaaagtcagagtcaacctgatggtgtcctgtggtggcatcctaggagacctgacagccagcgatgttggtgtggagctacccttggtcctgatccatccgaagccatctcatgcttctgcaagctctgaggacatagtcatcgaggagtttacgcggaaaggcgaggaggagagccagaaggctgtggaggctgagggagatgaggggagctgagcacctcgctctggtgcccgtctgtgtgggagcccccactgtaacactctaataaatcagtttgttcagatgtg

SEQ ID NO: 2417 - DNA, 1298 bp, Homo sapiens
  source 1..1298: mol_type = unassigned DNA
aagaggctggggaggcaggcatagcaaccagagctggagactgatgtgaacttcatctctctccccagaaaaggctcaacatcaactatatagccaacatgtccaaggtgtttaagaagaccagctccaatgggaagctctccatctacctggggaaacgggacttcgtggaccatgtggacacggtggaacccattgacggtgttgtcctggttgatcctgagtacttaaaatgtcgaaagttgtttgtcatgttgacatgtgcctttcgctatggccgtgatgacttggaagtgattggtctgacgttccgaaaagatctgtatgtgcagaccctgcaagtggtcccagctgaatccagcagccctcaggggcccctcacagtcctacaggagcgactactgcacaagctaggggacaatgcctacccctttaccctgcagatggtgaccaacctgccctgttctgtgacactgcagccaggtcctgaagatgcaggaaagccctgtgggattgactttgaagtgaagagtttctgtgctgaaaacccagaggagacagtctccaagagagactatgtgcggctggttgtccggaaagtacaatttgcaccaccggaggcaggccctggcccctcagcccagaccatccgccgcttccttctgtcagctcagcccctacaactccaggcctggatggacagggaggttcactaccacggagaacccatctctgtcaatgtttctatcaacaactgcaccaacaaggtcatcaaaaaaatcaagatttcagttgaccagatcacagatgttgtcctgtattcactagacaagtacaccaagactgtgttcattcaggaattcacggagactgtagctgctaattccagcttctcccagagctttgcagtaaccccaatcctggctgccagctgccagaaacggggcctggcactggatggcaaacttaagcatgaagataccaacctggcctctagcacaattattagaccgggaatggacaaagagctgctggggatcctggtgtcctacaaagtcagagtcaacctgatggtgtcctgtggtggcatcctaggagacctgacagccagcgatgttggtgtggagctacccttggtcctgatccatccgaagccatctcatgaggccgctaggtaatggaatacaagattgggaagccccattcccctcttcccatttccaccctccatgttatgacgatagaaatgtgaaaatgcttccttggggtgctttcaatacatgtgcagtggaaacata

SEQ ID NO: 2418 - DNA, 1579 bp, Homo sapiens
  source 1..1579: mol_type = unassigned DNA
agcgggcggcgggcgcgcgcaccatgggggagaaacccgggaccagggtcttcaagaagtcgagccctaactgcaagctcaccgtgtacttgggcaagcgggacttcgtagatcacctggacaaagtggaccctgtagatggcgtggtgcttgtggaccctgactacctgaaggaccgcaaagtgtttgtgaccctcacctgcgccttccgctatggccgtgaagacctggatgtgctgggcttgtccttccgcaaagacctgttcatcgccacctaccaggccttccccccggtgcccaacccaccccggccccccacccgcctgcaggaccggctgctgaggaagctgggccagcatgcccaccccttcttcttcaccataccccagaatcttccatgctccgtcacactgcagccaggcccagaggatacaggaaaggcctgcggcgtagactttgagattcgagccttctgtgctaaatcactagaagagaaaagccacaaaaggaactctgtgcggctggtgatccgaaaggtgcagttcgccccggagaaacccggcccccagccttcagccgaaaccacacgccacttcctcatgtctgaccggtccctgcacctcgaggcttccctggacaaggagctgtactaccatggggagcccctcaatgtaaatgtccacgtcaccaacaactccaccaagaccgtcaagaagatcaaagtctctgtgagacagtacgccgacatctgcctcttcagcaccgcccagtacaagtgtcctgtggctcaactcgaacaagatgaccagcgtgaaggagggtgccaacaaggaggtgctgggaatcctggtgtcctacagggtcaaggtgaagctggtggtgtctcgaggcggggatgtctctgtggagctgccttttgttcttatgcaccccaagccccacgaccacatccccctccccagaccccagtcagccgctccggagacagatgtccctgtggacaccaacctcattgaatttgataccaactatgccacagatgatgacattgtgtttgaggactttgcccggcttcggctgaaggggatgaaggatgacgactatgatgatcaactctgctaggaagcggggtgggaagaagggaggggatggggttgggagaggtgagggcaggattaagatccccactgtcaatgggggattgtcccagcccctcttcccttcccctcacctggaagcttcttcaaccaatcccttcacactctctcccccatccccccaagatacacactggaccctctcttgctgaatgtgggcattaattttttgactgcagctctgcttctccagccccgccgtgggtggcaagctgtgttcatacctaaattttctggaaggggacagtgaaaagaggagtgacaggagggaaagggggagacaaaactcctactctcaacctcacaccaacacctcccattatcactctctctgcccccattccttcaagaggagaccctttggggacaaggccgtttctttgtttctgagcataaagaagaaaataaatcttttactaagc

SEQ ID NO: 2419 - DNA, 4188 bp, Homo sapiens
  source 1..4188: mol_type = unassigned DNA
acaaagctgctcttaaagtgagctggcagcttttagccgcccgtctttgtaaggagaccactgagacgagcgggagcgcggagcagcagcctctgctgccctgactttttaagaaatctcaatgaactatttgtagagaatcactgatccggcctgcaagcattttgcacggcaaaaatatcgatcagtgttaagtgaagatcacattttatatgcgatcttgacttttttgtcttacattatatttttatagattttgttataaacatggtgctgggaaaggtgaagagtttgacaataagctttgactgtcttaatgacagcaatgtccctgtgtattctagtggggataccgtctcaggaagggtaaatttagaagttactggggaaatcagagtaaaatctcttaaaattcatgcaagaggacatgcgaaagtacgctggactgaatctagaaacgccggctccaatactgcctatacacagaattacactgaagaagtagagtatttcaaccataaagacatcttaattgggcacgaaagagatgatgataattccgaagaaggcttccacactattcattcaggaaggcatgaatatgcattcagcttcgagcttccacagacaccactcgctacctcattcgaaggccgacatggcagtgtgcgctattgggtgaaagccgaattgcacaggccttggctactaccagtaaaattaaagaaggaatttacagtctttgagcatatagatatcaacactccttcattactgtcaccccaagcaggcacaaaagaaaagacactctgttgctggttctgtacctcaggcccaatatccttaagtgccaaaattgaaaggaagggctataccccaggtgaatcaattcagatatttgctgagattgagaactgctcttcccgaatggtggtgccaaaggcagccatttaccaaacacaggccttctatgccaaagggaaaatgaaggaagtaaaacagcttgtggctaacttgcgtggggaatccttatcatctggaaagacagagacgtggaatggcaagttgctgaaaattccaccagtttctccctctatcctcgactgtagtataatccgcgtggaatattcactaatggtatatgtggatattcctggagctatggatttatttcttaatttgccacttgtcatcggtaccattcctctacatccatttggtagcagaacctcaagtgtaagcagtcagtgtagcatgaatatgaactggctcagtttatcacttcctgaaagacctgaagcaccacccagctatgcagaagtggtaacagaggaacaaaggcggaacaatcttgcaccagtgagtgcttgtgatgactttgagagagcccttcaaggaccactgtttgcatatatccaggagtttcgattcttgcctccacctctttattcagagattgatccaaatcctgatcagtcagcagatgatagaccatcctgcccctctcgttgaaggaacacttggttgaatcaagttgatgtgggttccgaactgtatctcttccggctgaggacagagaagtatcttggagacacgtttcagaggaagtggaattacttttgcccagaaaaatggcgaatacatgaaacaaccagtgatcatgctttagaagcctacagcaacattctgagactgctccaacatgcttgaagatctaagcttttctcttttaaaactggcacatactcagagcagtcttcttagcctatggtcgtacgtgtcaagacatcacgttgtaaagagggatgatttccttcttttgatttgaaaatttgcacatgctcaatgcttacattgtgcggttcgacgtcactacagcttctttttttttttttttttttttctatttttgccagactcttgatactcttaaaacttgtttgtggtcagcacaacaaggaacaaaacaaagctttgaaaaaactttaacatgaaaaaacgcactgacatttttttttatttaatatagcctggactttacctgcgtatgcacatgctcagaattgtctactaggctgactatgtatcacctcttcagcttggatccaattgtggatttatttacaaacatcaaatgccttcaagccaatcctttttgctgtatgttttgcagcctactgtagtagatacgcaacagataatgtgggaaaaaaagagataagaggaggaagctaataagagactgtcaagattgtataccttcttggtttcttttaagaatttgttgcctttctactattacagcaaagcagcattttgttactgactgcctaaaatcacttaatctcaggtgaacgcatcacttgccaaactgttggaatgctatttgtgttttgttgcactgtttttttcgtttgtttgtttgtttatttggttggctttttggagagggaaatttggaaacgggacatacacaaaagttacacacccacattccctttttatcatgacatacaagaagaaactagcagagctaagaatggagtgaagaaaggcagtatggcaggcaccagcaaagagttgagggctgttgctcttaaaaattattttttttattattattttgaaagtatggaagttttccattcactggggaaaggagggaaaagtgcatttatttttatacagagttacttaattacctccaaaacacatatgttggaaatcgcttttgctggtgcaaagtatattaatgagcaggaatacatacattgaggttatgaatagagagctcaatttgtacctttgctgtcttgctcaagcttggtatggcatgaaaactcgactttattccaaaagtaacttcaaaatttaaaatactagaacgtttgctgcgataaatcttttggatttttgtgtttttctaatgagaatactgtttttcattacctaaagaacaatttgctaaacatgagaaatcactcactttgattatgtatagattacataggaagaacaatcacatcagtaagttatagtttatattaaaggtaattttctgttggctcataacaaatataccagcattcatgatagcatttcagcattttccaaggtaccaagtgtacttattttgttgttgttgttgttgttgtattttagaaggaattcagctctgatgtttttaaagaaaaccagcatctctgatgttgcaacatacgtgtaaaatgggtgttacatctatcctgccatttaaccccacagttaataaagtggctgaaaataatagtagctctggcttggtgcttgacctggttaaatactgtcttaaagctcatacaaaacaaataggcttttccataagtggcctttaagaaaacatggaagacaattcatgtttgacaaatgctgacagggtgaagaaagcccagtgtaaaaatgaatcgcgttttaagtgattcggttaaagagtttgggctcccgtagcaaactaatactagataataaggaaatgggggtgaaatatttttttattgttgaatcattttgtgaatgtccccctcaaaaaaagctaatggaatatttggcataaagggcatttggtggttttatttttgtttgagggggattgtcagaaaatcccttttctctcttacgtctaactgactagggaacaattgttgatatgcatagcattggaatacttgtcattatatactcttacaaataacacatgaagcaagaatgaccaatattctgataattggcactggatcacaaaatgtgataaaactttaaatgtataaaactttatcaaataaagttttattttcccctttaaaatgtatttctttagaggcattacttttttaaaaatattggtcaattcctgacataagatgtgaggttcacagttgtattccagtattcaagatagattcctgatttttcaattaggaaaagtaaaatccaaaatgttagcaaaacaaagtgcaatattaaatgtttgctttatagattatattctatggctgtttgtaatttctctttttttccttttttatttggtgctgaatatgtccttgtaggctctgttttaagaaaacaatatgtgggaaatgatttaatttttcctattgctcttccttgtggaaaataaagtgttttgtttttttctgttttgtataa

SEQ ID NO: 2420 - DNA, 1895 bp, Homo sapiens
  source 1..1895: mol_type = unassigned DNA
gggagccgggagcgggctggcccgcgctcctcctgctggctggggattttccagcctgggcgctgacgccgcggacctccctgcgaccgtcgcggaccatgggcgacaaagggacccgagtgttcaagaaggccagtccaaatggaaagctcaccgtctacctgggaaagcgggactttgtggaccacatcgacctcgtggaccctgtggatggtgtggtcctggtggatcctgagtatctcaaagagcggagagtctatgtgacgctgacctgcgccttccgctatggccgggaggacctggatgtcctgggcctgacctttcgcaaggacctgtttgtggccaacgtacagtcgttcccaccggcccccgaggacaagaagcccctgacgcggctgcaggaacgcctcatcaagaagctgggcgagcacgcttaccctttcacctttgagatccctccaaaccttccatgttctgtgacactgcagccggggcccgaagacacggggaaggcttgcggtgtggactatgaagtcaaagccttctgcgcggagaatttggaggagaagatccacaagcggaattctgtgcgtctggtcatccggaaggttcagtatgccccagagaggcctggcccccagcccacagccgagaccaccaggcagttcctcatgtcggacaagcccttgcacctagaagcctctctggataaggagatctattaccatggagaacccatcagcgtcaacgtccacgtcaccaacaacaccaacaagacggtgaagaagatcaagatctcagtgcgccagtatgcagacatctgccttttcaacacagctcagtacaagtgccctgttgccatggaagaggctgatgacactgtggcacccagctcgacgttctgcaaggtctacacactgacccccttcctagccaataaccgagagaagcggggcctcgccttggacgggaagctcaagcacgaagacacgaacttggcctctagcaccctgttgagggaaggtgccaaccgtgagatcctggggatcattgtttcctacaaagtgaaagtgaagctggtggtgtctcggggcggcgacgtggccgtggaactgcccttcaccctaatgcaccccaagcccaaagaggaacccccgcatcgggaagttccagagaacgagacgccagtagataccaatctcatagaacttgacacaaatgatgacgacattgtatttgaggactttgctcgccagagactgaaaggcatgaaggatgacaaggaggaagaggaggatggtaccggctctccacagctcaacaacagatagacgggccggccctgcctccacgtggctccggctccactctcgtgcactcggatgcttactcgtcttcttcctgttctggtttcttttcccctttgttcttccagtttctaccagggggccccgtgggcttccagatcacggtgatgaacctctggcctcaggattggccccacatcaccacgccaacaggaccacagcgcactggctccaccccatctctgccatctccactcccctccttttcatgctgtctcccagaaaagctgccagggctctggccttggaattggacttgagatggggagcagacaggggaggatggggaatgtgggacacggtgtggtgggcatgagggcttggaggggtggggatgagggctcaagacacgagagaagatgtccacggtcccaggtggttaacaaagttctggcagctaaaagatgaccgcgttgaaggccacctccttctggctgggaggggcagaactgtggacagattctcaatgcctttttgaagttctgacccaccaaagaccttctgccttcaccctcctccccacctgat

SEQ ID NO: 2421 - DNA, 2204 bp, Homo sapiens
  source 1..2204: mol_type = unassigned DNA
accccgcgcggttccacgcccctggccgcggcccgggcgctgcgctgctcgacgcggcgggcggcgggcggggaccgggggcgggggcggcggcggcggccgggagagcggaggaggcggagcagggagccgggagcgggctggcccgcgctcctcctgctggctggggattttccagcctgggcgctgacgccgcggacctccctgcgaccgtcgcggaccatgggcgacaaagggacccgagtgttcaagaaggccagtccaaatggaaagctcaccgtctacctgggaaagcgggactttgtggaccacatcgacctcgtggaccctgtggatggtgtggtcctggtggatcctgagtatctcaaagagcggagagtctatgtgacgctgacctgcgccttccgctatggccgggaggacctggatgtcctgggcctgacctttcgcaaggacctgtttgtggccaacgtacagtcgttcccaccggcccccgaggacaagaagcccctgacgcggctgcaggaacgcctcatcaagaagctgggcgagcacgcttaccctttcacctttgagatccctccaaaccttccatgttctgtgacactgcagccggggcccgaagacacggggaaggcttgcggtgtggactatgaagtcaaagccttctgcgcggagaatttggaggagaagatccacaagcggaattctgtgcgtctggtcatccggaaggttcagtatgccccagagaggcctggcccccagcccacagccgagaccaccaggcagttcctcatgtcggacaagcccttgcacctagaagcctctctggataaggagatctattaccatggagaacccatcagcgtcaacgtccacgtcaccaacaacaccaacaagacggtgaagaagatcaagatctcagtgcgccagtatgcagacatctgccttttcaacacagctcagtacaagtgccctgttgccatggaagaggctgatgacactgtggcacccagctcgacgttctgcaaggtctacacactgacccccttcctagccaataaccgagagaagcggggcctcgccttggacgggaagctcaagcacgaagacacgaacttggcctctagcaccctgttgagggaaggtgccaaccgtgagatcctggggatcattgtttcctacaaagtgaaagtgaagctggtggtgtctcggggcggccttctcaggggtctctgtttcagcgacgtggccgtggaactgcccttcaccctaatgcaccccaagcccaaagaggaacccccgcatcgggaagttccagagaacgagacgccagtagataccaatctcatagaacttgacacaaatgatgacgacattgtatttgaggactttgctcgccagagactgaaaggcatgaaggatgacaaggaggaagaggaggatggtaccggctctccacagctcaacaacagatagacgggccggccctgcctccacgtggctccggctccactctcgtgcactcggatgcttactcgtcttcttcctgttctggtttcttttcccctttgttcttccagtttctaccagggggccccgtgggcttccagatcacggtgatgaacctctggcctcaggattggccccacatcaccacgccaacaggaccacagcgcactggctccaccccatctctgccatctccactcccctccttttcatgctgtctcccagaaaagctgccagggctctggccttggaattggacttgagatggggagcagacaggggaggatggggaatgtgggacacggtgtggtgggcatgagggcttggaggggtggggatgagggctcaagacacgagagaagatgtccacggtcccaggtggttaacaaagttctggcagctaaaagatgaccgcgttgaaggccacctccttctggctgggaggggcagaactgtggacagattctcaatgcctttttgaagttctgacccaccaaagaccttctgccttcaccctcctccccacctgatgtccctctgtgtctgatagtgatgttggtgaaagttcgtagaccccaggagtagagaaaagcaactggactgactttcttaccagcagttacctagactgaggcaagctgtgtggactcacccaagtatatttcagtactgtcaggctgtgacatcttagc

SEQ ID NO: 2422 - DNA, 3336 bp, Homo sapiens
  source 1..3336: mol_type = unassigned DNA
gggagccgggagcgggctggcccgcgctcctcctgctggctggggattttccagcctgggcgctgacgccgcggacctccctgcgaccgtcgcggaccatgggcgacaaagggacccgagtgttcaagaaggccagtccaaatggaaagctcaccgtctacctgggaaagcgggactttgtggaccacatcgacctcgtggaccctgtggatggtgtggtcctggtggatcctgagtatctcaaagagcggagagtctatgtgacgctgacctgcgccttccgctatggccgggaggacctggatgtcctgggcctgacctttcgcaaggacctgtttgtggccaacgtacagtcgttcccaccggcccccgaggacaagaagcccctgacgcggctgcaggaacgcctcatcaagaagctgggcgagcacgcttaccctttcacctttgagatccctccaaaccttccatgttctgtgacactgcagccggggcccgaagacacggggaaggcttgcggtgtggactatgaagtcaaagccttctgcgcggagaatttggaggagaagatccacaagcggaattctgtgcgtctggtcatccggaaggttcagtatgccccagagaggcctggcccccagcccacagccgagaccaccaggcagttcctcatgtcggacaagcccttgcacctagaagcctctctggataaggagatctattaccatggagaacccatcagcgtcaacgtccacgtcaccaacaacaccaacaagacggtgaagaagatcaagatctcagtgcgccagtatgcagacatctgccttttcaacacagctcagtacaagtgccctgttgccatggaagaggctgatgacactgtggcacccagctcgacgttctgcaaggtctacacactgacccccttcctagccaataaccgagagaagcggggcctcgccttggacgggaagctcaagcacgaagacacgaacttggcctctagcaccctgttgagggaaggtgccaaccgtgagatcctggggatcattgtttcctacaaagtgaaagtgaagctggtggtgtctcggggcggcctgttgggagatcttgcatccagcgacgtggccgtggaactgcccttcaccctaatgcaccccaagcccaaagaggaacccccgcatcgggaagttccagagaacgagacgccagtagataccaatctcatagaacttgacacaaatgatgacgacattgtatttgaggactttgctcgccagagactgaaaggcatgaaggatgacaaggaggaagaggaggatggtaccggctctccacagctcaacaacagatagacgggccggccctgcctccacgtggctccggctccactctcgtgcactcggatgcttactcgtcttcttcctgttctggtttcttttcccctttgttcttccagtttctaccagggggccccgtgggcttccagatcacggtgatgaacctctggcctcaggattggccccacatcaccacgccaacaggaccacagcgcactggctccaccccatctctgccatctccactcccctccttttcatgctgtctcccagaaaagctgccagggctctggccttggaattggacttgagatggggagcagacaggggaggatggggaatgtgggacacggtgtggtgggcatgagggcttggaggggtggggatgagggctcaagacacgagagaagatgtccacggtcccaggtggttaacaaagttctggcagctaaaagatgaccgcgttgaaggccacctccttctggctgggaggggcagaactgtggacagattctcaatgcctttttgaagttctgacccaccaaagaccttctgccttcaccctcctccccacctgatgtccctctgtgtctgatagtgatgttggtgaaagttcgtagaccccaggagtagagaaaagcaactggactgactttcttaccagcagttacctagactgaggcaagctgtgtggactcacccaagtatatttcagtactgtcaggctgtgacatcttagctaccttgtatttcaagtgcatggccctgtctagagatatgcacagagagaaaagcagagggagggagggagggggtcttcagcaagcaccagcccccagcagagtgagctgaagctcctgaggagggttcccgaaggggggcgctcagagatgggggcagggggcggggagaggagagtctgccttatgtcccttccttgtggacttcacatggtcatgcaggaagtgaggatgggtgtccagcgggggccgaggccactagtatcctcctgcttccccctgccattctccagggctggactgaccctatggactgggagagagtgcctgaggccaccatgccacagtcaaagggggtcctatctcagaaggtggcagcatccactgagatatcctcacccgaagggaaggaggctgctgggtagcaaataagccccttcttttcttggtgagttgatgacctccaatagctcccagtgtcatgggtacccagtacgcattagctggtgttgggttgattgagacctggggcagttcctggggcaagaagccagatgggagatgagatagaaagtgttaggagttatcctctttgcctggcctttgagaataacttactgtgtgactttgggcaagttccttccccactctgggcctcagtttctcacttgggaaagcaaggagtttgaccagatgatcacaatgggccttcctagctctggccaccaagaatttgtgaacattagagctcctggtctggtgggtagagccagagctgctgactggtctctctgcctccagaggggatttattggacctcagaggtggcagggccctatggagcaccaactgccctcaaccccaccctgtgcccaagactgggaagggattgatgtcaggctgtggccataggtagcatgagttgcccaaggagggacagagcatatctttgctgaggcttggctgaggggcttatgatagggcttgcagtacctcacagccccctgtgggcacagacaccctgaggtttacccaggcaaatatattgattagcaggacaagggctctctcctcagtttctgctcccttccatctctctcccatacttgtctgaaaagggagacaaaaaatcttatacaagtggcatctcaatcctttccagtccagcacctcctggggcaggcagtgtgacttatttcctgtggtgaaatcacctgtttcacaagcctggcagcgcgacttctgagtctcatgac

SEQ ID NO: 2423 - DNA, 1918 bp, Homo sapiens
  source 1..1918: mol_type = unassigned DNA
ccccgcgtgtctgctaggagagggcgggcagcgccgcggcgcgcgcgatccggctgacgcatctggccccggttccccaagaccagagcggggccgggagggagggggaagaggcgagagcgcggagggcgcgcgtgcgcattggcgcggggaggagcagggatcttggcagcgggcgaggaggctgcgagcgagccgcgaaccgagcgggcggcgggcgcgcgcaccatgggggagaaacccgggaccagggtcttcaagaagtcgagccctaactgcaagctcaccgtgtacttgggcaagcgggacttcgtagatcacctggacaaagtggaccctgtagatggcgtggtgcttgtggaccctgactacctgaaggaccgcaaagtgtttgtgaccctcacctgcgccttccgctatggccgtgaagacctggatgtgctgggcttgtccttccgcaaagacctgttcatcgccacctaccaggccttccccccggtgcccaacccaccccggccccccacccgcctgcaggaccggctgctgaggaagctgggccagcatgcccaccccttcttcttcaccataccccagaatcttccatgctccgtcacactgcagccaggcccagaggatacaggaaaggcctgcggcgtagactttgagattcgagccttctgtgctaaatcactagaagagaaaagccacaaaaggaactctgtgcggctggtgatccgaaaggtgcagttcgccccggagaaacccggcccccagccttcagccgaaaccacacgccacttcctcatgtctgaccggtccctgcacctcgaggcttccctggacaaggagctgtactaccatggggagcccctcaatgtaaatgtccacgtcaccaacaactccaccaagaccgtcaagaagatcaaagtctctgtgagacagtacgccgacatctgcctcttcagcaccgcccagtacaagtgtcctgtggctcaactcgaacaagatgaccaggtatctcccagctccacattctgtaaggtgtacaccataaccccactgctcagcgacaaccgggagaagcggggtctcgccctggatgggaaactcaagcacgaggacaccaacctggcttccagcaccatcgtgaaggagggtgccaacaaggaggtgctgggaatcctggtgtcctacagggtcaaggtgaagctggtggtgtctcgaggcggggatgtctctgtggagctgccttttgttcttatgcaccccaagccccacgaccacatccccctccccagaccccagtcagccgctccggagacagatgtccctgtggacaccaacctcattgaatttgataccaactatgccacagatgatgacattgtgtttgaggactttgcccggcttcggctgaaggggatgaaggatgacgactatgatgatcaactctgctaggaagcggggtgggaagaagggaggggatggggttgggagaggtgagggcaggattaagatccccactgtcaatgggggattgtcccagcccctcttcccttcccctcacctggaagcttcttcaaccaatcccttcacactctctcccccatccccccaagatacacactggaccctctcttgctgaatgtgggcattaattttttgactgcagctctgcttctccagccccgccgtgggtggcaagctgtgttcatacctaaattttctggaaggggacagtgaaaagaggagtgacaggagggaaagggggagacaaaactcctactctcaacctcacaccaacacctcccattatcactctctctgcccccattccttcaagaggagaccctttggggacaaggccgtttctttgtttctgagcataaagaagaaaataaatcttttactaagcatg

SEQ ID NO: 2424 - DNA, 1873 bp, Homo sapiens
  source 1..1873: mol_type = unassigned DNA
ccccgcgtgtctgctaggagagggcgggcagcgccgcggcgcgcgcgatccggctgacgcatctggccccggttccccaagaccagagcggggccgggagggagggggaagaggcgagagcgcggagggcgcgcgtgcgcattggcgcggggaggagcagggatcttggcagcgggcgaggaggctgcgagcgagccgcgaaccgagcgggcggcgggcgcgcgcaccatgggggagaaacccgggaccagggtcttcaagaagtcgagccctaactgcaagctcaccgtgtacttgggcaagcgggacttcgtagatcacctggacaaagtggaccctgtagtgtttgtgaccctcacctgcgccttccgctatggccgtgaagacctggatgtgctgggcttgtccttccgcaaagacctgttcatcgccacctaccaggccttccccccggtgcccaacccaccccggccccccacccgcctgcaggaccggctgctgaggaagctgggccagcatgcccaccccttcttcttcaccataccccagaatcttccatgctccgtcacactgcagccaggcccagaggatacaggaaaggcctgcggcgtagactttgagattcgagccttctgtgctaaatcactagaagagaaaagccacaaaaggaactctgtgcggctggtgatccgaaaggtgcagttcgccccggagaaacccggcccccagccttcagccgaaaccacacgccacttcctcatgtctgaccggtccctgcacctcgaggcttccctggacaaggagctgtactaccatggggagcccctcaatgtaaatgtccacgtcaccaacaactccaccaagaccgtcaagaagatcaaagtctctgtgagacagtacgccgacatctgcctcttcagcaccgcccagtacaagtgtcctgtggctcaactcgaacaagatgaccaggtatctcccagctccacattctgtaaggtgtacaccataaccccactgctcagcgacaaccgggagaagcggggtctcgccctggatgggaaactcaagcacgaggacaccaacctggcttccagcaccatcgtgaaggagggtgccaacaaggaggtgctgggaatcctggtgtcctacagggtcaaggtgaagctggtggtgtctcgaggcggggatgtctctgtggagctgccttttgttcttatgcaccccaagccccacgaccacatccccctccccagaccccagtcagccgctccggagacagatgtccctgtggacaccaacctcattgaatttgataccaactatgccacagatgatgacattgtgtttgaggactttgcccggcttcggctgaaggggatgaaggatgacgactatgatgatcaactctgctaggaagcggggtgggaagaagggaggggatggggttgggagaggtgagggcaggattaagatccccactgtcaatgggggattgtcccagcccctcttcccttcccctcacctggaagcttcttcaaccaatcccttcacactctctcccccatccccccaagatacacactggaccctctcttgctgaatgtgggcattaattttttgactgcagctctgcttctccagccccgccgtgggtggcaagctgtgttcatacctaaattttctggaaggggacagtgaaaagaggagtgacaggagggaaagggggagacaaaactcctactctcaacctcacaccaacacctcccattatcactctctctgcccccattccttcaagaggagaccctttggggacaaggccgtttctttgtttctgagcataaagaagaaaataaatcttttactaagcatg

SEQ ID NO: 2425 - DNA, 1960 bp, Homo sapiens
  source 1..1960: mol_type = unassigned DNA
aatggccccgcgtgtctgctaggagagggcgggcagcgccgcggcgcgcgcgatccggctgacgcatctggccccggttccccaagaccagagcggggccgggagggagggggaagaggcgagagcgcggagggcgcgcgtgcgcattggcgcggggaggagcagggatcttggcagcgggcgaggaggctgcgagcgagccgcgaaccgagcgggcggcgggcgcgcgcaccatgggggagaaacccgggaccagggtcttcaagaagtcgagccctaactgcaagctcaccgtgtacttgggcaagcgggacttcgtagatcacctggacaaagtggaccctgtagatggcgtggtgcttgtggaccctgactacctgaaggaccgcaaagtgtttgtgaccctcacctgcgccttccgctatggccgtgaagacctggatgtgctgggcttgtccttccgcaaagacctgttcatcgccacctaccaggccttccccccggtgcccaacccaccccggccccccacccgcctgcaggaccggctgctgaggaagctgggccagcatgcccaccccttcttcttcaccataccccagaatcttccatgctccgtcacactgcagccaggcccagaggatacaggaaaggcctgcggcgtagactttgagattcgagccttctgtgctaaatcactagaagagaaaagccacaaaaggaactctgtgcggctggtgatccgaaaggtgcagttcgccccggagaaacccggcccccagccttcagccgaaaccacacgccacttcctcatgtctgaccggtccctgcacctcgaggcttccctggacaaggagctgtactaccatggggagcccctcaatgtaaatgtccacgtcaccaacaactccaccaagaccgtcaagaagatcaaagtctctgtgagacagtacgccgacatctgcctcttcagcaccgcccagtacaagtgtcctgtggctcaactcgaacaagatgaccaggtatctcccagctccacattctgtaaggtgtacaccataaccccactgctcagcgacaaccgggagaagcggggtctcgccctggatgggaaactcaagcacgaggacaccaacctggcttccagcaccatcgtgaaggagggtgccaacaaggaggtgctgggaatcctggtgtcctacagggtcaaggtgaagctggtggtgtctcgaggcggggatgtctctgtggagctgccttttgttcttatgcaccccaagccccacgaccacatccccctccccagaccccagtcagcacccacccccacaccccctcttcccgtccccccagccgctccggagacagatgtccctgtggacaccaacctcattgaatttgataccaactatgccacagatgatgacattgtgtttgaggactttgcccggcttcggctgaaggggatgaaggatgacgactatgatgatcaactctgctaggaagcggggtgggaagaagggaggggatggggttgggagaggtgagggcaggattaagatccccactgtcaatgggggattgtcccagcccctcttcccttcccctcacctggaagcttcttcaaccaatcccttcacactctctcccccatccccccaagatacacactggaccctctcttgctgaatgtgggcattaattttttgactgcagctctgcttctccagccccgccgtgggtggcaagctgtgttcatacctaaattttctggaaggggacagtgaaaagaggagtgacaggagggaaagggggagacaaaactcctactctcaacctcacaccaacacctcccattatcactctctctgcccccattccttcaagaggagaccctttggggacaaggccgtttctttgtttctgagcataaagaagaaaataaatcttttactaagcatga

SEQ ID NO: 2426 - DNA, 1721 bp, Homo sapiens
  source 1..1721: mol_type = unassigned DNA
tggcagcgggcgaggaggctgcgagcgagccgcgaaccgagcgggcggcgggcgcgcgcaccatgggggagaaacccgggaccagctcaccgtgtacttgggcaagcgggacttcgtagatcacctggacaaagtggaccctgtagatggcgtggtgcttgtggaccctgactacctgaaggaccgcaaagtgtttgtgaccctcacctgcgccttccgctatggccgtgaagacctggatgtgctgggcttgtccttccgcaaagacctgttcatcgccacctaccaggccttccccccggtgcccaacccaccccggccccccacccgcctgcaggaccggctgctgaggaagctgggccagcatgcccaccccttcttcttcaccataccccagaatcttccatgctccgtcacactgcagccaggcccagaggatacaggaaaggcctgcggcgtagactttgagattcgagccttctgtgctaaatcactagaagagaaaagccacaaaaggaactctgtgcggctggtgatccgaaaggtgcagttcgccccggagaaacccggcccccagccttcagccgaaaccacacgccacttcctcatgtctgaccggtccctgcacctcgaggcttccctggacaaggagctgtactaccatggggagcccctcaatgtaaatgtccacgtcaccaacaactccaccaagaccgtcaagaagatcaaagtctctgtgagacagtacgccgacatctgcctcttcagcaccgcccagtacaagtgtcctgtggctcaactcgaacaagatgaccaggtatctcccagctccacattctgtaaggtgtacaccataaccccactgctcagcgacaaccgggagaagcggggtctcgccctggatgggaaactcaagcacgaggacaccaacctggcttccagcaccatcgtgaaggagggtgccaacaaggaggtgctgggaatcctggtgtcctacagggtcaaggtgaagctggtggtgtctcgaggcggggatgtctctgtggagctgccttttgttcttatgcaccccaagccccacgaccacatccccctccccagaccccagtcagccgctccggagacagatgtccctgtggacaccaacctcattgaatttgataccaactatgccacagatgatgacattgtgtttgaggactttgcccggcttcggctgaaggggatgaaggatgacgactatgatgatcaactctgctaggaagcggggtgggaagaagggaggggatggggttgggagaggtgagggcaggattaagatccccactgtcaatgggggattgtcccagcccctcttcccttcccctcacctggaagcttcttcaaccaatcccttcacactctctcccccatccccccaagatacacactggaccctctcttgctgaatgtgggcattaattttttgactgcagctctgcttctccagccccgccgtgggtggcaagctgtgttcatacctaaattttctggaaggggacagtgaaaagaggagtgacaggagggaaagggggagacaaaactcctactctcaacctcacaccaacacctcccattatcactctctctgcccccattccttcaagaggagaccctttggggacaaggccgtttctttgtttctgagcataaagaagaaaataaatcttttactaagcatg

SEQ ID NO: 2427 - DNA, 1368 bp, Homo sapiens
  source 1..1368: mol_type = unassigned DNA
gtttggctggttgctaaggtgaggttggcgctaccggaacataagagtgattggtgttcttcgtatggtgcgctccgctggatcacgtgagccagttccaaaatggcggcaggggtggccgggtggggggttgaggcagaggagttcgaagatgctcctgatgtggagccgctggagcctacacttagcaacatcatcgagcagcgcagcctgaagtggatcttcgtcgggggcaagggtggtgtgggcaagaccacctgcagctgcagcctggcagtccagctctccaaggggcgtgagagtgttctgatcatctccacagacccagcacacaacatctcagatgcttttgaccagaagttctcaaaggtgcctaccaaggtcaaaggctatgacaacctctttgctatggagattgaccccagcctgggcgtggcggagctgcctgacgagttcttcgaggaggacaacatgctgagcatgggcaagaagatgatgcaggaggccatgagcgcatttcccggcatcgatgaggccatgagctatgccgaggtcatgaggctggtgaagggcatgaacttctcggtggtggtatttgacacggcacccacgggccacaccctgaggctgctcaacttccccaccatcgtggagcggggcctgggccggcttatgcagatcaagaaccagatcagccctttcatctcacagatgtgcaacatgctgggcctgggggacatgaacgcagaccagctggcctccaagctggaggagacgctgcccgtcatccgctcagtcagcgaacagttcaaggaccctgagcagacaactttcatctgcgtatgcattgctgagttcctgtccctgtatgagacagagaggctgatccaggagctggccaagtgcaagattgacacacacaatataattgtcaaccagctcgtcttccccgaccccgagaagccctgcaagatgtgtgaggcccgtcacaagatccaggccaagtatctggaccagatggaggacctgtatgaagacttccacatcgtgaagctgccgctgttaccccatgaggtgcggggggcagacaaggtcaacaccttctcggccctcctcctggagccctacaagccccccagtgcccagtagcacagctgccagccccaaccgctgccatttcacactcaccctccaccctccccaccccctcggggcagagtttgcacaaagtcccccccataatacagggggagccacttgggcaggaggcagggaggggtccattccccctggtggggctggtggggagctgtagttgccccctacctctcccacctcttgctcttcaataaaatgatcttaaactgc

SEQ ID NO: 2428 - DNA, 1280 bp, Homo sapiens
  source 1..1280: mol_type = unassigned DNA
gagccagttccaaaatggcggcaggggtggccgggtggggggttgaggcagaggagttcgaagatgctcctgatgtggagccgctggagcctacacttagcaacatcatcgagcagcgcagcctgaagtggatcttcgtcgggggcaagggtggtgtgggcaagaccacctgcagctgcagcctggcagtccagctctccaaggggcgtgagagtgttctgatcatctccacagacccagcacacaacatctcagatgcttttgaccagaagttctcaaaggtgcctaccaaggtcaaaggctatgacaacctctttgctatggagattgaccccagcctgggcgtggcggagctgcctgacgagttcttcgaggaggacaacatgctgagcatgggcaagaagatgatgcaggaggccatgagcgcatttcccggcatcgatgaggccatgagctatgccgaggtcatgaggctggtgaagggcatgaacttctcggtggtggtatttgacacggcacccacgggccacaccctgaggctgctcaacttccccaccatcgtggagcggggcctgggccggcttatgcagatcaagaaccagatcagccctttcatctcacagatgtgcaacatgctgggcctgggggacatgaacgcagaccagctggcctccaagctggaggagacgctgcccgtcatccgctcagtcagcgaacagttcaaggaccctgagcagacaactttcatctgcgtatgcattgctgagttcctgtccctgtatgagacagagaggctgatccaggagctggccaagtgcaagattgacacacacaatataattgtcaaccagctcgtcttccccgaccccgagaagccctgcaagatgtgtgaggcccgtcacaagatccaggccaagtatctggaccagatggaggacctgtatgaagacttccacatcgtgaagctgccgctgttaccccatgaggtgcggggggcagacaaggtcaacaccttctcggccctcctcctggagccctacaagccccccagtgcccagtagcacagctgccagccccaaccgctgccatttcacactcaccctccaccctccccaccccctcggggcagagtttgcacaaagtcccccccataatacagggggagccacttgggcaggaggcagggaggggtccattccccctggtggggctggtggggagctgtagttgccccctacctctcccacctcttgctcttcaataaaatgatcttaaactgc

SEQ ID NO: 2429 - DNA, 2404 bp, Homo sapiens
  source 1..2404: mol_type = unassigned DNA
gagacagtgagtgcgcgccctgagtcgcaggccgaggagacagtgagtgcgcgccctgagtcgcaggccgaggagacatggctgcacttcgtgacgctgagatacagaaggacgtgcagacctactacgggcaggtgctgaagagatcggcagacctccagaccaacggctgtgtcaccacagccaggccggtccccaagcacatccgggaagccttgcaaaatgtacacgaagaagtagccctaagatattatggctgtggtctggtgatccctgagcatctagaaaactgctggattttggatctgggtagtggaagtggcagagattgctatgtacttagccagctggttggtgaaaaaggacacgtgactggaatagacatgaccaaaggccaggtggaagtggctgaaaagtatcttgactatcacatggaaaaatatggcttccaggcatctaatgtgacttttattcatggctacattgagaagttgggagaggctggaatcaagaatgagagccatgatattgttgtatcaaactgtgttattaaccttgtgcctgataaacaacaagtgcttcaggaggcatatcgggtgctgaagcatggtggggagttatatttcagtgacgtctatacgagccttgaactgccagaagaaatcaggacacacaaagttttatggggtgagtgtctgggtggtgctttatactggaaggaacttgctgtccttgctcaaaaaattgggttctgccctccacgtttggtcactgccaatctcattacaattcaaaacaaggaactggaaagagttatcggtgactgtcgttttgtttctgcaacatttcgcctcttcaaacactctaagacaggaccaaccaagagatgccaagttatttacaatggaggaattacaggacatgaaaaagaactaatgtttgatgccaattttacatttaaggaaggtgaaattgttgaagtggatgaagaaacagcagctatcttgaagaattcaagatttgctcaagattttctgatcagaccaattggagagaagttgccaacatctggaggctgttctgctttggagttaaaggatataatcacagatccatttaagcttgcagaagagtctgacagtatgaagtccagatgtgtccctgatgctgctggaggctgctgtggcacaaagaaaagctgctaaatctatagccaaccaggggaccacagtagtgggcaagagtgatctgcatgttttttaacctgcttttccccatagcacagaccataagaaacaacaaatggggccgggcacagtggctcatgcctataatcccagcactttgggaggccgaggcaggcagatcacctgaggtcaggagtttgataccagcctggccaacatggtgaaatcctgtctctaccaaaaatacaaaaaaaattagctgggcatggtggtgcacacctatagtctcagctactcgggaggctgaggcaggagaattgcttgaacccaggaagtagaggctgcagtgagtaagcatcacgccactgtactccagcctgggcaacagagcaagactctgtctcaaaagcaaaaaaaaaaaaaaaaaaagaaagaaagaaaaagaaaacaacaaatggcagagagccaccatattccaaatcactgaaaaaaataaatgaattatttttatttatttatttatttttttgagatggagtctcggtctgttgcccaggctgaagtgcagtggccccatctcaactcactgcaagctccacctcctgggttcacgccattctcctgcctcagactcccaagtagctgggactacaggcacctaccaccatgcccagctaattttttgtatttttagtagagacggggtttcaccatgttagccaggatggtcttgatctcctgacctcgtgatccgcccgcctcggcctcccaaagtgctgggattacaagcatgagccactgcgcccggccataaatgaattatttttaagaggcattgattaaagattcacagcaaatcactagttaagcagattttttttctatttcctacttcaaagttctggtgccacatagtggtcagaaatggaacagagaagctgtcttaagccttgttcaagaagcaggaaaggcatcagaagaagtaacagttggcagagggtctcaggaaaaacatcttccttctgatcttttgcatagcaccttttggaattttcatcatgtttgcttattaaacaaagctcctactgccatcatactaatcatgcaaaaagattgccaaatcatgtttggtaggaggacttttgaggtagcttttgaacaaatgtttttttcttttttctttttttttgcaataaagaaaacaaattaatcataaa

SEQ ID NO: 2430 - DNA, 1335 bp, Homo sapiens
  source 1..1335: mol_type = unassigned DNA
gcgtctgacgtcttaccctccacagaatcggaagttctggactgcagttgagtggaaatgggcaacggcgggcggagcggcctgcagcaggggaaggggaacgtggatggggtggcagcgactcctactgctgcctcggcctcctgccagtacaggtgcatcgaatgcaaccaggaggccaaagagttgtaccgagactataaccacggtgtgctgaagataaccatctgtaaatcctgccagaaacctgtagacaaatatatcgagtatgatcctgttatcatcttgattaatgctatattgtgcaaagctcaggcctacagacatattcttttcaatactcaaataaatatccatggaaaactctgcatattttgtttgctttgtgaagcatacctgaggtggtggcagcttcaagattccaaccagaatactgcccctgatgacttgatcagatatgctaaggaatgggatttctatagaatgtttgcgattgctgctttagaacaaactgcctattttattggcatttttaccttcctgtgggtagaacggcccatgacggcaaaaaaaaagcccaacttcattttgctgctgaaagcattattattatctagctacggaaaactcttgctgattccagctgtcatttgggaacatgactacacatctgtgtgcctcaaactcattaaagtatttgttcttacatcaaattttcaggcaattagagtgaccctaaacatcaaccgtaagctctccttcttggccgtgttgagtggcttactgctggaaagcatcatggtctacttcttccagagtatggaatgggatgttggaagtgattatgccatctttaaatctcaggacttctgaagagttttattcttcttcactatctgtggcatgaccagctgtatctgaaagagaaaagacatgaaatataaaccaacctcctcatttctgttgagtaaaatgaagcaaagattggaaacactttctgaaaaagaaagcaatgataatagcggtggatacccacccccacaaatgcacccaagagacaagccatttacatacagatattcacagtcacacatagaaacacccacatggacacaaggaatgttgctgcagagactgaatgacatgcaacaggtgaaggtttatacgttatacacaaggccaggtaagcgctcataattcacacataataaaacatctaggtttcattcctttgacatgtttatatctttttaatttaaatgttgttactggcttaaaatattttgtgttcttacaatagaaacgcttttaataaagtctttcagaataaaccaa

SEQ ID NO: 2431 - DNA, 991 bp, Homo sapiens
  source 1..991: mol_type = unassigned DNA
gcgggcggagcggcctgcagcaggggaaggggaacgtggatggggtggcagcgactcctactgctgcctcggcctcctgccagtacaggtgcatcgaatgcaaccaggaggccaaagagttgtaccgagactataaccacggtgtgctgaagataaccatctgtaaatcctgccagaaacctgtagacaaatatatcgagtatgatcctgttatcatcttgattaatgctatattgtgcaaagctcaggcctacagacatattcttttcaatactcaaataaatatccatggaaaactctgcatattttgtttgctttgtgaagcatacctgaggtggtggcagcttcaagattccaaccagaatactgcccctgatgacttgatcagatatgctaaggaatgggatttctatagaatgtttgcgattgctgctttagaacaaactgcctattttattggcatttttaccttcctgtgggtagaacggcccatgacggcaaaaaaaaagcccaacttcattttgctgctgaaagcattattattatctagctacggaaaactcttgctgattccagctgtcatttgggaacatgactacacatctgtgtgcctcaaactcattaaagtatttgttcttacatcaaattttcaggcaattagagtgaccctaaacatcaaccgtaagctctccttcttggccgtgttgagtggcttactgctggaaagcatcatggtctacttcttccagagtatggaatgggatgttggaagtgattatgccatctttaaatctcaggacttctgaagaggtcctgcagtgcccttgtctccacctaaccagatacggtcagctttgcctctccatggaataagtgaagactttccaaaaactccagtttgcagtgcttactttttccgttgacctccgagtgctcagcttaacacctacagcagtcacgtgcccaagaacttctgacattgccccagggt

SEQ ID NO: 2432 - DNA, 6276 bp, Homo sapiens
  source 1..6276: mol_type = unassigned DNA
attcagccggtgcgcgcggcggcgggaggcagtggctggggagtcccgtcgacgctctgttccgagagcgtgccccggaccgccagctcagaacaggggcagccgtgtagccgaacggaagctgggagcagccgggactggtggcccgcgcccgagctccgcaggcgggaagcaccctggatttaggaagtcccgggagcagcgcggcggcacctccctcacccaaggggccgcggcgacggtcacggggcgcggcgccaccgtgagcgacccaggccaggattctaaatagacggcccaggctcctcctccgcccgggccgcctcacctgcgggcattgccgcgccgcctccgccggtgtagacggcacctgcgccgccttgctcgcgggtctccgcccctcgcccaccctcactgcgccaggcccaggcagctcacctgtactggcgcgggctgcggaagcctgcgtgagccgaggcgttgaggcgcggcgcccacgccactgtcccgagaggacgcaggtggagcgggcgcggcttcgcggaacccggcgccggccgccgcagtggtcccagcctacaccgggttccggggacccggccgccagtgcccggggagtagccgccgccgtcggctgggcaccatgaacagcagcagcgccaacatcacctacgccagtcgcaagcggcggaagccggtgcagaaaacagtaaagccaatcccagctgaaggaatcaagtcaaatccttccaagcggcatagagaccgacttaatacagagttggaccgtttggctagcctgctgcctttcccacaagatgttattaataagttggacaaactttcagttcttaggctcagcgtcagttacctgagagccaagagcttctttgatgttgcattaaaatcctcccctactgaaagaaacggaggccaggataactgtagagcagcaaatttcagagaaggcctgaacttacaagaaggagaattcttattacaggctctgaatggctttgtattagttgtcactacagatgctttggtcttttatgcttcttctactatacaagattatctagggtttcagcagtctgatgtcatacatcagagtgtatatgaacttatccataccgaagaccgagctgaatttcagcgtcagctacactgggcattaaatccttctcagtgtacagagtctggacaaggaattgaagaagccactggtctcccccagacagtagtctgttataacccagaccagattcctccagaaaactctcctttaatggagaggtgcttcatatgtcgtctaaggtgtctgctggataattcatctggttttctggcaatgaatttccaagggaagttaaagtatcttcatggacagaaaaagaaagggaaagatggatcaatacttccacctcagttggctttgtttgcgatagctactccacttcagccaccatccatacttgaaatccggaccaaaaattttatctttagaaccaaacacaaactagacttcacacctattggttgtgatgccaaaggaagaattgttttaggatatactgaagcagagctgtgcacgagaggctcaggttatcagtttattcatgcagctgatatgctttattgtgccgagtcccatatccgaatgattaagactggagaaagtggcatgatagttttccggcttcttacaaaaaacaaccgatggacttgggtccagtctaatgcacgcctgctttataaaaatggaagaccagattatatcattgtaactcagagaccactaacagatgaggaaggaacagagcatttacgaaaacgaaatacgaagttgccttttatgtttaccactggagaagctgtgttgtatgaggcaaccaacccttttcctgccataatggatcccttaccactaaggactaaaaatggcactagtggaaaagactctgctaccacatccactctaagcaaggactctctcaatcctagttccctcctggctgccatgatgcaacaagatgagtctatttatctctatcctgcttcaagtacttcaagtactgcaccttttgaaaacaactttttcaacgaatctatgaatgaatgcagaaattggcaagataatactgcaccgatgggaaatgatactatcctgaaacatgagcaaattgaccagcctcaggatgtgaactcatttgctggaggtcacccagggctctttcaagatagtaaaaacagtgacttgtacagcataatgaaaaacctaggcattgattttgaagacatcagacacatgcagaatgaaaaatttttcagaaatgatttttctggtgaggttgacttcagagacattgacttaacggatgaaatcctgacgtatgtccaagattctttaagtaagtctcccttcataccttcagattatcaacagcaacagtccttggctctgaactcaagctgtatggtacaggaacacctacatctagaacagcaacagcaacatcaccaaaagcaagtagtagtggagccacagcaacagctgtgtcagaagatgaagcacatgcaagttaatggcatgtttgaaaattggaactctaaccaattcgtgcctttcaattgtccacagcaagacccacaacaatataatgtctttacagacttacatgggatcagtcaagagttcccctacaaatctgaaatggattctatgccttatacacagaactttatttcctgtaatcagcctgtattaccacaacattccaaatgtacagagctggactaccctatggggagttttgaaccatccccataccccactacttctagtttagaagattttgtcacttgtttacaacttcctgaaaaccaaaagcatggattaaatccacagtcagccataataactcctcagacatgttatgctggggccgtgtcgatgtatcagtgccagccagaacctcagcacacccacgtgggtcagatgcagtacaatccagtactgccaggccaacaggcatttttaaacaagtttcagaatggagttttaaatgaaacatatccagctgaattaaataacataaataacactcagactaccacacatcttcagccacttcatcatccgtcagaagccagaccttttcctgatttgacatccagtggattcctgtaattccaagcccaattttgaccctggtttttggattaaattagtttgtgaaggattatggaaaaataaaactgtcactgttggacgtcagcaagttcacatggaggcattgatgcatgctattcacaattattccaaaccaaattttaatttttgcttttagaaaagggagtttaaaaatggtatcaaaattacatatactacagtcaagatagaaagggtgctgccacggagtggtgaggtaccgtctacatttcacattattctgggcaccacaaaatatacaaaactttatcagggaaactaagattcttttaaattagaaaatattctctatttgaattatttctgtcacagtaaaaataaaatactttgagttttgagctactggattcttattagttccccaaatacaaagttagagaactaaactagtttttcctatcatgttaacctctgcttttatctcagatgttaaaataaatggtttggtgctttttataaaaagataatctcagtgctttcctccttcactgtttcatctaagtgcctcacatttttttctacctataacactctaggatgtatattttatataaagtattctttttcttttttaaattaatatctttctgcacacaaatattatttgtgtttcctaaatccaaccattttcattaattcaggcatattttaactccactgcttacctactttcttcaggtaaagggcaaataatgatcgaaaaaataattatttattacataatttagttgtttctagactataaatgttgctatgtgccttatgttgaaaaaatttaaaagtaaaatgtctttccaaattatttcttaattattataaaaatattaagacaatagcacttaaattcctcaacagtgttttcagaagaaataaatataccactctttacctttattgatatctccatgatgatagttgaatgttgcaatgtgaaaaatctgctgttaactgcaaccttgtttattaaattgcaagaagctttatttctagctttttaattaagcaaagcacccatttcaatgtgtataaattgtctttaaaaactgttttagacctataatccttgataatatattgtgttgactttataaatttcgcttcttagaacagtggaaactatgtgtttttctcatatttgaggagtgttaagattgcagatagcaaggtttggtgcaaagtattgtaatgagtgaattgaatggtgcattgtatagatataatgaacaaaattatttgtaagatatttgcagtttttcattttaaaaagtccataccttatatatgcacttaatttgttggggctttacatactttatcaatgtgtctttctaagaaatcaagtaatgaatccaactgcttaaagttggtattaataaaaagacaaccacatagttcgtttaccttcaaactttaggtttttttaatgatatactgatcttcattaccaataggcaaattaatcaccctaccaactttactgtcctaacatggtttaaaagaaaaaatgacaccatcttttattcttttttttttttttttttgagagagagtcttactctgccgcccaaactggagtgcagtggcacaatcttggctcactgcaacctctacctcctgggttcaagtgattctcttgcctcagcctcccgagttgctgggattacaggcatgtgccaccatgcccagctaatttttgtatttttagtagaaacgggtttcaccatgttggccagactggtctcaaactcctgacctcaggtgagcctcccaccttggcctcccaaagtgctgggattacaggcgtgagccactgcattcagctcttcttttctttagatatgagagctgaagagcttagacacattttgcatgtattatttgaaaatctgatggaatcccaaactgagatgtattaaaatacaatttttggccgggtgcagtggctcacgcctgtaatcccagcacttggggagggcgaggagggtggatcacgaggtcaagagatggagaccatcctgaccaacatggtgaaaccctgtctctactaaaaatacagaaattagctgggcatggtggcgtgagcctgtagtcctagctactcaggaggctgaggcaggagaatagcctgaacctgggaatcggaggttgcagagccaagatcgccccactgcactccagcctggcaatagaccgagactccgtctccaaaaaaaaaaaaaatacaatttttatttcttttactttttttagtaagttaatgtatataaaaatggcttcggacaaaatatctctgagttctgtgtattttcagtcaaaactttaaacctgtagaatcaatttaagtgttggaaaaaatttgtctgaaacatttcataatttgtttccagcatgaggtatctaaggatttagaccagaggtctagattaatactctatttttacatttaaaccttttattataagtcttacataaaccatttttgttactctcttccacatgttactggataaattgtttagtggaaaataggctttttaatcatgaatatgatgacaatcagttatacagttataaaattaaaagtttgaaaagcaatattgtatatttttatctatataaaataactaaaatgtatctaagaataataaaatcacgttaaaccaaatacacgtttgtctgtattgttaagtgccaaacaaaggatacttagtgcactgctacattgtgggatttatttctagatgatgtgcacatctaaggatatggatgtgtctaatttagtcttttcctgtaccaggtttttcttacaatacctgaagacttaccagtattctagtgtattatgaagctttcaacattactatgcacaaactagtgtttttcgatgttactaaattttaggtaaatgctttcatggcttttttcttcaaaatgttactgcttacatatatcatgcatagatttttgcttaaagtatgatttataatatcctcattatcaaagttgtatacaataatatataataaaataacaaatatgaataa

SEQ ID NO: 2433 - DNA, 4820 bp, Homo sapiens
  source 1..4820: mol_type = unassigned DNA
ccgagagcgtgccccggaccgccagctcagaacaggggcagccgtgtagccgaacggaagctgggagcagccgggactggtggcccgcgcccgagctccgcaggcgggaagcaccctggatttaggaagtcccgggagcagcgcggcggcacctccctcacccaaggggccgcggcgacggtcacggggcgcggcgccaccgtgagcgacccaggccaggattctaaatagacggcccaggctcctcctccgcccgggccgcctcacctgcgggcattgccgcgccgcctccgccggtgtagacggcacctgcgccgccttgctcgcgggtctccgcccctcgcccaccctcactgcgccaggcccaggcagctcacctgtactggcgcgggctgcggaagcctgcgtgagccgaggcgttgaggcgcggcgcccacgccactgtcccgagaggacgcaggtggagcgggcgcggcttcgcggaacccggcgccggccgccgcagtggtcccagcctacaccgggttccggggacccggccgccagtgcccggggagtagccgccgccgtcggctgggcaccatgaacagcagcagcgccaacatcacctacgccagtcgcaagcggcggaagccggtgcagaaaacagtaaagccaatcccagctgaaggaatcaagtcaaatccttccaagcggcatagagaccgacttaatacagagttggaccgtttggctagcctgctgcctttcccacaagatgttattaataagttggacaaactttcagttcttaggctcagcgtcagttacctgagagccaagagcttctttgatgttgcattaaaatcctcccctactgaaagaaacggaggccaggataactgtagagcagcaaatttcagagaaggcctgaacttacaagaaggagaattcttattacaggctctgaatggctttgtattagttgtcactacagatgctttggtcttttatgcttcttctactatacaagattatctagggtttcagcagtctgatgtcatacatcagagtgtatatgaacttatccataccgaagaccgagctgaatttcagcgtcagctacactgggcattaaatccttctcagtgtacagagtctggacaaggaattgaagaagccactggtctcccccagacagtagtctgttataacccagaccagattcctccagaaaactctcctttaatggagaggtgcttcatatgtcgtctaaggtgtctgctggataattcatctggttttctggcaatgaatttccaagggaagttaaagtatcttcatggacagaaaaagaaagggaaagatggatcaatacttccacctcagttggctttgtttgcgatagctactccacttcagccaccatccatacttgaaatccggaccaaaaattttatctttagaaccaaacacaaactagacttcacacctattggttgtgatgccaaaggaagaattgttttaggatatactgaagcagagctgtgcacgagaggctcaggttatcagtttattcatgcagctgatatgctttattgtgccgagtcccatatccgaatgattaagactggagaaagtggcatgatagttttccggcttcttacaaaaaacaaccgatggacttgggtccagtctaatgcacgcctgctttataaaaatggaagaccagattatatcattgtaactcagagaccactaacagatgaggaaggaacagagcatttacgaaaacgaaatacgaagttgccttttatgtttaccactggagaagctgtgttgtatgaggcaaccaacccttttcctgccataatggatcccttaccactaaggactaaaaatggcactagtggaaaagactctgctaccacatccactctaagcaaggactctctcaatcctagttccctcctggctgccatgatgcaacaagatgagtctatttatctctatcctgcttcaagtacttcaagtactgcaccttttgaaaacaactttttcaacgaatctatgaatgaatgcagaaattggcaagataatactgcaccgatgggaaatgatactatcctgaaacatgagcaaattgaccagcctcaggatgtgaactcatttgctggaggtcacccagggctctttcaagatagtaaaaacagtgacttgtacagcataatgaaaaacctaggcattgattttgaagacatcagacacatgcagaatgaaaaatttttcagaaatgatttttctggtgaggttgacttcagagacattgacttaacggatgaaatcctgacgtatgtccaagattctttaagtaagtctcccttcataccttcagattatcaacagcaacagtccttggctctgaactcaagctgtatggtacaggaacacctacatctagaacagcaacagcaacatcaccaaaagcaagtagtagtggagccacagcaacagctgtgtcagaagatgaagcacatgcaagttaatggcatgtttgaaaattggaactctaaccaattcgtgcctttcaattgtccacagcaagacccacaacaatataatgtctttacagacttacatgggatcagtcaagagttcccctacaaatctgaaatggattctatgccttatacacagaactttatttcctgtaatcagcctgtattaccacaacattccaaatgtacagagctggactaccctatggggagttttgaaccatccccataccccactacttctagtttagaagattttgtcacttgtttacaacttcctgaaaaccaaaagcatggattaaatccacagtcagccataataactcctcagacatgttatgctggggccgtgtcgatgtatcagtgccagccagaacctcagcacacccacgtgggtcagatgcagtacaatccagtactgccaggccaacaggcatttttaaacaagtttcagaatggagttttaaatgaaacatatccagctgaattaaataacataaataacactcagactaccacacatcttcagccacttcatcatccgtcagaagccagaccttttcctgatttgacatccagtggattcctgtaattccaagcccaattttgaccctggtttttggattaaattagtttgtgaaggattatggaaaaataaaactgtcactgttggacgtcagcaagttcacatggaggcattgatgcatgctattcacaattattccaaaccaaattttaatttttgcttttagaaaagggagtttaaaaatggtatcaaaattacatatactacagtcaagatagaaagggtgctgccacggagtggtgaggtaccgtctacatttcacattattctgggcaccacaaaatatacaaaactttatcagggaaactaagattcttttaaattagaaaatattctctatttgaattatttctgtcacagtaaaaataaaatactttgagttttgagctactggattcttattagttccccaaatacaaagttagagaactaaactagtttttcctatcatgttaacctctgcttttatctcagatgttaaaataaatggtttggtgctttttataaaaagataatctcagtgctttcctccttcactgtttcatctaagtgcctcacatttttttctacctataacactctaggatgtatattttatataaagtattctttttcttttttaaattaatatctttctgcacacaaatattatttgtgtttcctaaatccaaccattttcattaattcaggcatattttaactccactgcttacctactttcttcaggtaaagggcaaataatgatcgaaaaaataattatttattacataatttagttgtttctagactataaatgttgcagagccaagatcgccccactgcactccagcctggcaatagaccgagactccgtctccaaaaaaaaaaaaaatacaatttttatttcttttactttttttagtaagttaatgtatataaaaatggcttcggacaaaatatctctgagttctgtgtattttcagtcaaaactttaaacctgtagaatcaatttaagtgttggaaaaaatttgtctgaaacatttcataatttgtttccagcatgaggtatctaaggatttagaccagaggtctagattaatactctatttttacatttaaaccttttattataagtcttacataaaccatttttgttactctcttccacatgttactggataaattgtttagtggaaaataggctttttaatcatgaatatgatgacaatcagttatacagttataaaattaaaagtttgaaaagcaatattgtatatttttatctatataaaataactaaaatgtatctaagaataataaaatcacgttaaaccaaatacacgtttgtctgtattgttaagtgccaaacaaaggatacttagtgcactgctacattgtgggatttatttctagatgatgtgcacatctaaggatatggatgtgtctaatttagtcttttcctgtaccaggtttttcttacaatacctgaagacttaccagtattctagtgtattatgaagctttcaacattactatgcacaaactagtgtttttcgatgttactaaattttaggtaaatgctttcatggcttttttcttcaaaatgttactgcttacatatatcatgcatagatttttgcttaaagtatgatttataatatcctcattatcaaagttgtatacaataatatataataaaataacaaatatgaataata

SEQ ID NO: 2434 - DNA, 1221 bp, Homo sapiens
  source 1..1221: mol_type = unassigned DNA
ccctcaaccaaaatggcgctagctcggaagctgccgaggtgctaggagttgccgaagcaagtccggaagctaccgagcgagtccggaagttgccgaaagggagcagcggggaaggaggatggcggatatcatcgcaagactccgggaggacgggatccaaaaacgtgtgatacaggaaggccgaggagagctcccggactttcaagatgggaccaaggccacgttccactaccggacgctgcacagtgacgacgagggcaccgtgctggacgacagccgggctcgtggcaagcccatggagctcatcattggcaagaagttcaagctgcctgtgtgggagaccatcgtgtgcaccatgcgagaaggggagattgcccagttcctctgtgacatcaagcatgtggtcctgtacccgctggtggccaagagtctccgcaacatcgcggtgggcaaggaccccctggagggccagcggcactgctgcggtgttgcacagatgcgtgaacacagctccctgggccatgctgacctggacgccctgcagcagaacccccagcccctcatcttccacatggagatgctgaaggtggagagccctggcacgtaccagcaggacccatgggccatgacagacgaagagaaggcaaaggcagtgccacttatccaccaggagggcaaccggttgtaccgcgaggggcatgtgaaggaggctgctgccaagtactacgatgccattgcctgcctcaagaacctgcagatgaaggaacagcctgggtcccctgaatggatccagctggaccagcagatcacgccgctgctgctcaactactgccagtgcaagctggtggtcgaggagtactacgaggtgctggaccactgctcttccatcctcaacaagtacgacgacaacgtcaaggcctacttcaagcggggcaaggcccacgcggccgtgtggaatgcccaggaggcccaggctgactttgccaaagtgctggagctggacccagccctggcgcctgtggtgagccgagagctgcaggccctggaggcacggatccggcagaaggacgaagaggacaaagcccggttccgggggatcttctcccattgacaggagcacttggccctgccttacctgccaagcccactgctgcagctgccagcccccctgcccgtgctgcgtcatgcttctgtgtatataaaggcctttatttatctctc

SEQ ID NO: 2435 - DNA, 2781 bp, Homo sapiens
  source 1..2781: mol_type = unassigned DNA
gctgggtaaatcccagagtctcagccgcctaagtgtcttccccggaggtgagattatctccgcctgtgctggacacctccctttctcctgcagccatggatgccgctctgctcctgaacgtggaaggggtcaagaaaaccattctgcacgggggcacgggcgagctcccaaacttcatcaccggatcccgagtgatctttcatttccgcaccatgaaatgtgatgaggagcggacagtcattgacgacagtcggcaggtgggccagcccatgcacatcatcatcggaaacatgttcaagctcgaggtctgggagatcctgcttacctccatgcgggtgcacgaggtggccgagttctggtgcgacaccatcgttgatgccccgagtgattaccagagggagacctggaacctgagcaatcatgagaagatgaaggcggtgcccgtcctccacggagagggaaatcggctcttcaagctgggccgctacgaggaggcctcttccaagtaccaggaggccatcatctgcctaaggaacctgcagaccaaggagaagccatgggaggtgcagtggctgaagctggagaagatgatcaatactctgatcctcaactactgccagtgcctgctgaagaaggaggagtactatgaggtgctggagcacaccagtgatattctccggcaccacccaggcatcgtgaaggcctactacgtgcgtgcccgggctcacgcagaggtgtggaatgaggccgaggccaaggcggacctccagaaagtgctggagctggagccgtccatgcagaaggcggtgcgcagggagctgaggctgctggagaaccgcatggcggagaagcaggaggaggagcggctgcgctgccggaacatgctgagccagggtgccacgcagcctcccgcagagccacccacagagccacccgcacagtcatccacagagccacctgcagagccacccacagcaccatctgcagagctgtccgcagggccccctgcagagccagccacagagccacccccgtccccagggcactcgctgcagcactgagccccctgaggcccacagccacccaggcagggagcaagtggcctggtcacttctggttcgattgaccaggatcgtggtgtcactttttaaaatttaaaattaatttttgaaatcaaagtcagacacacccatggtaaaaaaaaaaaaaaaaacaatcccaagggtacagaagagcttatgaataaaagtagttttctcctctacccctctcattccttccgtgccatggttttaattgaccctgtttttaattcttctggtagttttctctatttccaagtaatctgtttaaatcagtttctagattttaccccatgtcaatgacaaatgaggatttgatgctctgatcctttctcatgcctgatacccctccctgtctccccattttggatagttacatttgggggtcatctcggtgatttttgtaactttacgcaggacacttagagctctctagaatcccactgactttagtgggtcttgatgtagggtgggcaagccccgacactggagcttagcctgagagggttcttggcctcccccaggaaagatttcaaaggcaagcgccagtggtagggtagaagaaaacagctgtggtcgggcacggtggctcacgcctataatcccagcactttgggaggccgaggcgggtggatcacctgaggtcaggagttccagaccagcctggccaacatggtgaaacctcatctctactaaaaatacaaaaaaactagctgggcgtggtggcgggcgcctataatcccagctacttgggaggctgaggcaggagaattgattgaacctgggaggcggaggttgcagtgagccaagatcacgtcattgcactccagcctggtcaacaagagtaaaacttcatctcaaaaaacaaaacaaaacaaaaacaacaacaaaaaacaaaagaaaaacaaacaaaaccaaaaccaaaacagctgtattgaagctgcagtgttgcagctctgtgactgccctgcagagcagggctaccccataggcagcgagcagcagctcagggcagttctgcagtcagatttatacccacttttaattacatgtagattaaggagctgcatatacaaagatttctagggaaggagtagtaacttctgggtcctggggtctttgccacggaacagggcagtatgccagggtgttgccacggcaatggtaaactgacatggcaccctgggggtcatgccttagggaaagccgcttccactcgcccctgttttagctcatcttcaagttagtctggtgtccaagctccaccgcctgcctcagtctggtgacctccttctgtgtctgatgagcatggcagcgttgggaccttccccttccaactctctccctcctcttcgtcctccctaaaggacgggtacgaggaggggctatcacgccagcgacatcctctagcaccacccaggtgtgtggggtggggcaggggggcgacgaagtatccagcccagggccacgtagtcaactgccaagggcttcctgggcttctcttctgccccagagcttgtctccacccagcaggggttcccccagcgctaactgtatccctaaagttctgatgtactttacttttccatcttccttgttgttaacatctaccttctgctctgtaagcaaaactaaatcttctgtgctttgtccataggttgattctacaatctgaaaatcaataaacagcatttgcatg

SEQ ID NO: 2436 - DNA, 2790 bp, Homo sapiens
  source 1..2790: mol_type = unassigned DNA
gctgggtaaatcccagagtctcagccgcctaagtgtcttccccggaggtgagattatctccgcctgtgctggacacctccctttctcctgcagccatggatgccgctctgctcctgaacgtggaaggggtcaagaaaaccattctgcacgggggcacgggcgagctcccaaacttcatcaccggatcccgacacacgggggtctaccccatcctatcccggagcctgaggcagatggcccagggcaaggaccccacagagtggcacgtgcacacgtgcgggctggccaacatgttcgcctaccacacgctgggctacgaggacctggacgagctgcagaaggagcctcagcctctggtctttgtgatcgagctgctgcaggttgatgccccgagtgattaccagagggagacctggaacctgagcaatcatgagaagatgaaggcggtgcccgtcctccacggagagggaaatcggctcttcaagctgggccgctacgaggaggcctcttccaagtaccaggaggccatcatctgcctaaggaacctgcagaccaaggagaagccatgggaggtgcagtggctgaagctggagaagatgatcaatactctgatcctcaactactgccagtgcctgctgaagaaggaggagtactatgaggtgctggagcacaccagtgatattctccggcaccacccaggcatcgtgaaggcctactacgtgcgtgcccgggctcacgcagaggtgtggaatgaggccgaggccaaggcggacctccagaaagtgctggagctggagccgtccatgcagaaggcggtgcgcagggagctgaggctgctggagaaccgcatggcggagaagcaggaggaggagcggctgcgctgccggaacatgctgagccagggtgccacgcagcctcccgcagagccacccacagagccacccgcacagtcatccacagagccacctgcagagccacccacagcaccatctgcagagctgtccgcagggccccctgcagagccagccacagagccacccccgtccccagggcactcgctgcagcactgagccccctgaggcccacagccacccaggcagggagcaagtggcctggtcacttctggttcgattgaccaggatcgtggtgtcactttttaaaatttaaaattaatttttgaaatcaaagtcagacacacccatggtaaaaaaaaaaaaaaaaacaatcccaagggtacagaagagcttatgaataaaagtagttttctcctctacccctctcattccttccgtgccatggttttaattgaccctgtttttaattcttctggtagttttctctatttccaagtaatctgtttaaatcagtttctagattttaccccatgtcaatgacaaatgaggatttgatgctctgatcctttctcatgcctgatacccctccctgtctccccattttggatagttacatttgggggtcatctcggtgatttttgtaactttacgcaggacacttagagctctctagaatcccactgactttagtgggtcttgatgtagggtgggcaagccccgacactggagcttagcctgagagggttcttggcctcccccaggaaagatttcaaaggcaagcgccagtggtagggtagaagaaaacagctgtggtcgggcacggtggctcacgcctataatcccagcactttgggaggccgaggcgggtggatcacctgaggtcaggagttccagaccagcctggccaacatggtgaaacctcatctctactaaaaatacaaaaaaactagctgggcgtggtggcgggcgcctataatcccagctacttgggaggctgaggcaggagaattgattgaacctgggaggcggaggttgcagtgagccaagatcacgtcattgcactccagcctggtcaacaagagtaaaacttcatctcaaaaaacaaaacaaaacaaaaacaacaacaaaaaacaaaagaaaaacaaacaaaaccaaaaccaaaacagctgtattgaagctgcagtgttgcagctctgtgactgccctgcagagcagggctaccccataggcagcgagcagcagctcagggcagttctgcagtcagatttatacccacttttaattacatgtagattaaggagctgcatatacaaagatttctagggaaggagtagtaacttctgggtcctggggtctttgccacggaacagggcagtatgccagggtgttgccacggcaatggtaaactgacatggcaccctgggggtcatgccttagggaaagccgcttccactcgcccctgttttagctcatcttcaagttagtctggtgtccaagctccaccgcctgcctcagtctggtgacctccttctgtgtctgatgagcatggcagcgttgggaccttccccttccaactctctccctcctcttcgtcctccctaaaggacgggtacgaggaggggctatcacgccagcgacatcctctagcaccacccaggtgtgtggggtggggcaggggggcgacgaagtatccagcccagggccacgtagtcaactgccaagggcttcctgggcttctcttctgccccagagcttgtctccacccagcaggggttcccccagcgctaactgtatccctaaagttctgatgtactttacttttccatcttccttgttgttaacatctaccttctgctctgtaagcaaaactaaatcttctgtgctttgtccataggttgattctacaatctgaaaatcaataaacagcatttgcatg

SEQ ID NO: 2437 - DNA, 2939 bp, Homo sapiens
  source 1..2939: mol_type = unassigned DNA
gtcttccccggaggtgagattatctccgcctgtgctggacacctccctttctcctgcagccatggatgccgctctgctcctgaacgtggaaggggtcaagaaaaccattctgcacgggggcacgggcgagctcccaaacttcatcaccggatcccgagtgatctttcatttccgcaccatgaaatgtgatgaggagcggacagtcattgacgacagtcggcaggtgggccagcccatgcacatcatcatcggaaacatgttcaagctcgaggtctgggagatcctgcttacctccatgcgggtgcacgaggtggccgagttctggtgcgacaccatccacacgggggtctaccccatcctatcccggagcctgaggcagatggcccagggcaaggaccccacagagtggcacgtgcacacgtgcgggctggccaacatgttcgcctaccacacgctgggctacgaggacctggacgagctgcagaaggagcctcagcctctggtctttgtgatcgagctgctgcaggttgatgccccgagtgattaccagagggagacctggaacctgagcaatcatgagaagatgaaggcggtgcccgtcctccacggagagggaaatcggctcttcaagctgggccgctacgaggaggcctcttccaagtaccaggaggccatcatctgcctaaggaacctgcagaccaaggagaagccatgggaggtgcagtggctgaagctggagaagatgatcaatactctgatcctcaactactgccagtgcctgctgaagaaggaggagtactatgaggtgctggagcacaccagtgatattctccggcaccacccaggcatcgtgaaggcctactacgtgcgtgcccgggctcacgcagaggtgtggaatgaggccgaggccaaggcggacctccagaaagtgctggagctggagccgtccatgcagaaggcggtgcgcagggagctgaggctgctggagaaccgcatggcggagaagcaggaggaggagcggctgcgctgccggaacatgctgagccagggtgccacgcagcctcccgcagagccacccacagagccacccgcacagtcatccacagagccacctgcagagccacccacagcaccatctgcagagctgtccgcagggccccctgcagagccagccacagagccacccccgtccccagggcactcgctgcagcactgagccccctgaggcccacagccacccaggcagggagcaagtggcctggtcacttctggttcgattgaccaggatcgtggtgtcactttttaaaatttaaaattaatttttgaaatcaaagtcagacacacccatggtaaaaaaaaaaaaaaaaacaatcccaagggtacagaagagcttatgaataaaagtagttttctcctctacccctctcattccttccgtgccatggttttaattgaccctgtttttaattcttctggtagttttctctatttccaagtaatctgtttaaatcagtttctagattttaccccatgtcaatgacaaatgaggatttgatgctctgatcctttctcatgcctgatacccctccctgtctccccattttggatagttacatttgggggtcatctcggtgatttttgtaactttacgcaggacacttagagctctctagaatcccactgactttagtgggtcttgatgtagggtgggcaagccccgacactggagcttagcctgagagggttcttggcctcccccaggaaagatttcaaaggcaagcgccagtggtagggtagaagaaaacagctgtggtcgggcacggtggctcacgcctataatcccagcactttgggaggccgaggcgggtggatcacctgaggtcaggagttccagaccagcctggccaacatggtgaaacctcatctctactaaaaatacaaaaaaactagctgggcgtggtggcgggcgcctataatcccagctacttgggaggctgaggcaggagaattgattgaacctgggaggcggaggttgcagtgagccaagatcacgtcattgcactccagcctggtcaacaagagtaaaacttcatctcaaaaaacaaaacaaaacaaaaacaacaacaaaaaacaaaagaaaaacaaacaaaaccaaaaccaaaacagctgtattgaagctgcagtgttgcagctctgtgactgccctgcagagcagggctaccccataggcagcgagcagcagctcagggcagttctgcagtcagatttatacccacttttaattacatgtagattaaggagctgcatatacaaagatttctagggaaggagtagtaacttctgggtcctggggtctttgccacggaacagggcagtatgccagggtgttgccacggcaatggtaaactgacatggcaccctgggggtcatgccttagggaaagccgcttccactcgcccctgttttagctcatcttcaagttagtctggtgtccaagctccaccgcctgcctcagtctggtgacctccttctgtgtctgatgagcatggcagcgttgggaccttccccttccaactctctccctcctcttcgtcctccctaaaggacgggtacgaggaggggctatcacgccagcgacatcctctagcaccacccaggtgtgtggggtggggcaggggggcgacgaagtatccagcccagggccacgtagtcaactgccaagggcttcctgggcttctcttctgccccagagcttgtctccacccagcaggggttcccccagcgctaactgtatccctaaagttctgatgtactttacttttccatcttccttgttgttaacatctaccttctgctctgtaagcaaaactaaatcttctgtgctttgtccataggttgattctacaatctgaaaatcaataaacagcatttgcatgatt

SEQ ID NO: 2438 - DNA, 1237 bp, Homo sapiens
  source 1..1237: mol_type = unassigned DNA
tttctcctgcagccatggatgccgctctgctcctgaacgtggaaggggtcaagaaaaccattctgcacgggggcacgggcgagctcccaaacttcatcaccggatcccgagtgatctttcatttccgcaccatgaaatgtgatgaggagcggacagtcattgacgacagtcggcaggtgggccagcccatgcacatcatcatcggaaacatgttcaagctcgaggtctgggagatcctgcttacctccatgcgggtgcacgaggtggccgagttctggtgcgacaccatccacacgggggtctaccccatcctatcccggagcctgaggcagatggcccagggcaaggaccccacagagtggcacgtgcacacgtgcgggctggccaacatgttcgcctaccacacgctgggctacgaggacctggacgagctgcagaaggagcctcagcctctggtctttgtgatcgagctgctgcaggttgatgccccgagtgattaccagagggagacctggaacctgagcaatcatgagaagatgaaggcggtgcccgtcctccacggagagggaaatcggctcttcaagctgggccgctacgaggaggcctcttccaagtaccaggaggccatcatctgcctaaggaacctgcagaccaaggagaagccatgggaggtgcagtggctgaagctggagaagatgatcaatactctgatcctcaactactgccagtgcctgctgaagaaggaggagtactatgaggtgctggagcacaccagtgatattctccggcaccacccaggcatcgtgaaggcctactacgtgcgtgcccgggctcacgcagaggtgtggaatgaggccgaggccaaggcggacctccagaaagtgctggagctggagccgtccatgcagaaggcggtgcgcagggagctgaggctgctggagaacgcatggcggagaagcaggaggaggagcggctgcgctgccggaacatgctgagccagggtgccacgcagcctcccgcagagccacccacagagccacccgcacagtcatccacagagccacctgcagagccacccacagcaccatctgcagagctgtccgcagggccccctgcagagccagccacagagccacccccgtccccagggcactcgctgcagcactgagccccctgaggcccacagccacccaggcagggagcaagtggcctggtcacttctggttcgattgaccag

SEQ ID NO: 2439 - DNA, 1077 bp, Homo sapiens
  source 1..1077: mol_type = unassigned DNA
gtgagattatctccgcctgtgctggacacctccctttctcctgcagccatggatgccgctctgctcctgaacgtggaaggggtcaagaaaaccattctgcacgggggcacgggcgagctcccaaacttcatcaccggatcccgacacacgggggtctaccccatcctatcccggagcctgaggcagatggcccagggcaaggaccccacagagtggcacgtgcacacgtgcgggctggccaacatgttcgcctaccacacgctgggctacgaggacctggacgagctgcagaaggagcctcagcctctggtctttgtgatcgagctgctgcaggttgatgccccgagtgattaccagagggagacctggaacctgagcaatcatgagaagatgaaggcggtgcccgtcctccacggagagggaaatcggctcttcaagctgggccgctacgaggaggcctcttccaagtaccaggaggccatcatctgcctaaggaacctgcagaccaaggagaagccatgggaggtgcagtggctgaagctggagaagatgatcaatactctgatcctcaactactgccagtgcctgctgaagaaggaggagtactatgaggtgctggagcacaccagtgatattctccggcaccacccaggcatcgtgaaggcctactacgtgcgtgcccgggctcacgcagaggtgtggaatgaggccgaggccaaggcggacctccagaaagtgctggagctggagccgtccatgcagaaggcggtgcgcagggagctgaggctgctggagaaccgcatggcggagaagcaggaggaggagcggctgcgctgccggaacatgctgagccagggtgccacgcagcctcccgcagagccacccacagagccacccgcacagtcatccacagagccacctgcagagccacccacagcaccatctgcagagctgtccgcagggccccctgcagagccagccacagagccacccccgtccccagggcactcgctgcagcactgagccccctgaggcccacagccacccaggcagggagcaagtggcctggtcacttct

SEQ ID NO: 2440 - DNA, 3698 bp, Homo sapiens
  source 1..3698: mol_type = unassigned DNA
ggattccgcggtagcggaggcggcggtcaggcgccgcttctggggagtggcctttcttttcccctccctcccggttcggtggcggcggctcctcccactgggggggggggtggcgcggcggcggtggcatctgcggccatggcggcgactactgccaaccccgaaatgacatcagatgtaccatcactgggtccagccattgcctctggaaactctggacctggaattcaaggtggaggagccattgtccagagggctattaagcggcgaccagggctggattttgatgatgatggagaagggaacagtaaatttttgaggtgtgatgatgatcagatgtctaacgataaggagcggtttgccaggtcggatgatgagcagagctctgcggataaagagagacttgccagggaaaatcacagtgaaattgaacggcggcgacggaacaagatgacagcctacatcacagaactgtcagatatggtacccacctgtagtgccctggctcgaaaaccagacaagctaaccatcttacgcatggcagtttctcacatgaagtccttgcggggaactggcaacacatccactgatggctcctataagccgtctttcctcactgatcaggaactgaaacatttgatcttggaggcagcagatggctttctgtttattgtctcatgtgagacaggcagggtggtgtatgtgtctgactccgtgactcctgttttgaaccagccacagtctgaatggtttggcagcacactctatgatcaggtgcacccagatgatgtggataaacttcgtgagcagctttccacttcagaaaatgccctgacagggcgtatcctggatctaaagactggaacagtgaaaaaggaaggtcagcagtcttccatgagaatgtgtatgggctcaaggagatcgtttatttgccgaatgaggtgtggcagtagctctgtggacccagtttctgtgaataggctgagctttgtgaggaacagatgcaggaatggacttggctctgtaaaggatggggaacctcacttcgtggtggtccactgcacaggctacatcaaggcctggcccccagcaggtgtttccctcccagatgatgacccagaggctggccagggaagcaagttttgcctagtggccattggcagattgcaggtaactagttctcccaactgtacagacatgagtaatgtttgtcaaccaacagagttcatctcccgacacaacattgagggtatcttcacttttgtggatcaccgctgtgtggctactgttggctaccagccacaggaactcttaggaaagaatattgtagaattctgtcatcctgaagaccagcagcttctaagagacagcttccaacaggaactctagccaagaaccacggcctacactctccaacacaatccagaggccacaactaggtcccacagctaatttacccctggagatgggctcaggacagctgcctaccctagtctcaccaatcgtggatctaactttgctcctgagactggacagactgcaggacaattccagacacggacagcagagggtgtgggtgtctggccacagtggcagggccagcagcctcatcatcgttcaagttctagtgagcaacatgttcaacaaccgccagcacagcaacctggccagcctgaggtcttccaggagatgctgtccatgctgggagatcagagcaacagctacaacaatgaagaattccctgatctaactatgtttccccccttttcagaatagaactattggggtgaggataaggggtgggggagaaaaaatcactgtttgtttttaaaaagcaaatctttctgtaaacagaataaaagttcctctcccttcccttccctcacccctgacatgtaccccctttcccttctggctgttcccctgctctgttgcctctctaaggtaacatttatagaagaaatggaatgaatctccaaggcttttaggactgtctgaaaatttgaggctgggtgaagttaaaacacctttccttatgtctcctgacctgaaattgtatagtgttgatttgtgctgagatcaagaggcaggttagaagaacctgacatccactgtttgccttggatagtatggcttgtttttggaaagaaattctgaagagagtggaggagaggagaaatgtcctcatatttgaggaccatgaaacattgtaggtatatatggggctttagcaagtttgagcataggctctttttgctgcctgtgagcagtccctctggaaagaaacatgtgagtaagtgagagagagtgtgtgtgtatgtgtgtgtgtgtgtgtgtgcgcacacatgcttctgtatttcactctttctccctattagggagttatgcaaaatttgtccccgattttacctttgtctttctgtgtacttttcaaagagtcctaaggagttaaatcttccaggtattttccacttagtattgcagccaaagaatatttaaataaacgtctttgctgcgcttgcatccatgcccagccaatatacaactgtaaagcaaatatagaaagtcggctgttgatacgattgtctgttatcgaacacattcagtgataaagctgggttactgctgcttttggtgctctcaccttatctggaagatctgcaaacattacctaaataggctggcaagataaacactttctggaacccgagacttggccataaagataatgctgcatttttctgtcagaatcacatatgatgtgtgttctgtagaggttatttctgcatggaaactcaacttcttggattagccgtcccagtgaaaatcctcattgttggagtgtaaaccaaatacgaagccctcttgcaaagtagcctctttcatcccatactcaaaatacccagtttagcaagcaactgagatttaagtctctctggccctaagaggtttttcctctttgctccctccaatcttgagattgggttttgctttagagtgcaagtatcataattccgtatgatagatggggcctggacacccatctcaacagggtcacttggtaattaacaatagccatataaatgcggatacaggttactaccctcaccctttaccttcctcaggtaacagtcgtagataccagcttttttttttttttttttaaattggctttggccagtagctaaagtgcaagactgaattaatgagaagatatattaaatgtagtcataggggactgaggagcaagggtggccttgaagaggccaaaggaatgtccatttgctgagtttcccttccttatgtctccagtctggtgccaggtagtggagtaaaaaaggagacagtttatttttttattctatgtgcacacttacagtatacatatatatttatatcacaatttacgaaaccaaaaagttgagtttccaatggaacccttgttttttaataatcgactttttaaatgtgatcaggactataatattgtacagttattatagggcttttggggaaggggaggatagcgagaagatgctctgggggttttgtttttgcttttccttcagggttttatttttgactgttttgttttcttgttggccatttctgtattgctggcatctgtgctaagctttacagtggcaaaaataatgacatgtagcaaagattttcaaacaaaatattttttccttttg

SEQ ID NO: 2441 - DNA, 2542 bp, Homo sapiens
  source 1..2542: mol_type = unassigned DNA
catggcggcgactactgccaaccccgaaatgacatcagatgtaccatcactgggtccagccattgcctctggaaactctggacctggaattcaaggtggaggagccattgtccagagggctattaagcggcgaccaggcaggcttaaagtatttattgttggctttcctcaggctggattttgatgatgatggagaagggaacagtaaatttttgaggtgtgatgatgatcagatgtctaacgataaggagcggtttgccagggaaaatcacagtgaaattgaacggcggcgacggaacaagatgacagcctacatcacagaactgtcagatatggtacccacctgtagtgccctggctcgaaaaccagacaagctaaccatcttacgcatggcagtttctcacatgaagtccttgcggggaactggcaacacatccactgatggctcctataagccgtctttcctcactgatcaggaactgaaacatttgatcttggaggcagcagatggctttctgtttattgtctcatgtgagacaggcagggtggtgtatgtgtctgactccgtgactcctgttttgaaccagccacagtctgaatggtttggcagcacactctatgatcaggtgcacccagatgatgtggataaacttcgtgagcagctttccacttcagaaaatgccctgacagggcgtatcctggatctaaagactggaacagtgaaaaaggaaggtcagcagtcttccatgagaatgtgtatgggctcaaggagatcgtttatttgccgaatgaggtgtggcagtagctctgtggacccagtttctgtgaataggctgagctttgtgaggaacagatgcaggaatggacttggctctgtaaaggatggggaacctcacttcgtggtggtccactgcacaggctacatcaaggcctggcccccagcaggtgtttccctcccagatgatgacccagaggctggccagggaagcaagttttgcctagtggccattggcagattgcaggtaactagttctcccaactgtacagacatgagtaatgtttgtcaaccaacagagttcatctcccgacacaacattgagggtatcttcacttttgtggatcaccgctgtgtggctactgttggctaccagccacaggaactcttaggaaagaatattgtagaattctgtcatcctgaagaccagcagcttctaagagacagcttccaacaggtagtgaaattaaaaggccaagtgctgtctgtcatgttccggttccggtctaagaaccaagaatggctctggatgagaaccagctcctttactttccagaacccttactcagatgaaattgagtacatcatctgtaccaacaccaatgtgaagcctttgacatataggcagcagcaacagcaaacagaattggacatggtaccaggaagagatggactggccagctacaatcattcccaggtggttcagcctgtgacaaccacaggaccagaacacagcaagccccttgagaagtcagatggtttatttgcccaggatagagatccaagattttcagaaatctatcacaacatcaatgcggatcagagtaaaggcatctcctccagcactgtccctgccacccaacagctattctcccagggcaacacattccctcctaccccccggccggcagagaatttcaggaatagtggcctagcccctcctgtaaccattgtccagccatcagcttctgcaggacagatgttggcccagatttcccgccactccaaccccacccaaggagcaaccccaacttggacccctactacccgctcaggcttttctgcccaggtggctacccaggctactgctaagactcgtacttcccagtttggtgtgggcagctttcagactccatcctccttcagctccatgtccctccctggtgccccaactgcatcgcctggtgctgctgcctaccctagtctcaccaatcgtggatctaactttgctcctgagactggacagactgcaggacaattccagacacggacagcagagggtgtgggtgtctggccacagtggcagggccagcagcctcatcatcgttcaagttctagtgagcaacatgttcaacaaccgccagcacagcaacctggccagcctgaggtcttccaggagatgctgtccatgctgggagatcagagcaacagctacaacaatgaagaattccctgatctaactatgtttccccccttttcagaatagaactattggggtgaggataaggggtgggggagaaaaaatcactgtttgtttttaaaaagcaaatctttctgtaaacagaataaaagttcctctcccttcccttccctcacccctgacatgtaccccctttcccttctggctgttcccctgctctgttgcctctctaaggtaacatttatagaagaaatggaatgaatctccaaggcttttaggactgtctgaaaatttgaggctgggtgaagttaaaacacctttccttatgtctcctgacctgaaattgt

SEQ ID NO: 2442 - DNA, 3701 bp, Homo sapiens
  source 1..3701: mol_type = unassigned DNA
ggattccgcggtagcggaggcggcggtcaggcgccgcttctggggagtggcctttcttttcccctccctcccggttcggtggcggcggctcctcccactgggggggggggtggcgcggcggcggtggcatctgcggccatggcggcgactactgccaaccccgaaatgacatcagatgtaccatcactgggtccagccattgcctctggaaactctggacctggaattcaaggtggaggagccattgtccagagggctattaagcggcgaccagggctggattttgatgatgatggagaagggaacagtaaatttttgaggtgtgatgatgatcagatgtctaacgataaggagcggtttgccaggtcggatgatgagcagagctctgcggataaagagagacttgccagggaaaatcacagtgaaattgaacggcggcgacggaacaagatgacagcctacatcacagaactgtcagatatggtacccacctgtagtgccctggctcgaaaaccagacaagctaaccatcttacgcatggcagtttctcacatgaagtccttgcggggaactggcaacacatccactgatggctcctataagccgtctttcctcactgatcaggaactgaaacatttgatcttggaggcagcagatggctttctgtttattgtctcatgtgagacaggcagggtggtgtatgtgtctgactccgtgactcctgttttgaaccagccacagtctgaatggtttggcagcacactctatgatcaggtgcacccagatgatgtggataaacttcgtgagcagctttccacttcagaaaatgccctgacagggcgtatcctggatctaaagactggaacagtgaaaaaggaaggtcagcagtcttccatgagaatgtgtatgggctcaaggagatcgtttatttgccgaatgaggtgtggcagtagctctgtggacccagtttctgtgaataggctgagctttgtgaggaacagatgcaggaatggacttggctctgtaaaggatggggaacctcacttcgtggtggtccactgcacaggctacatcaaggcctggcccccagcaggtgtttccctcccagatgatgacccagaggctggccagggaagcaagttttgcctagtggccattggcagattgcaggtaactagttctcccaactgtacagacatgagtaatgtttgtcaaccaacagagttcatctcccgacacaacattgagggtatcttcacttttgtggatcaccgctgtgtggctactgttggctaccagccacaggaactcttaggaaagaatattgtagaattctgtcatcctgaagaccagcagcttctaagagacagcttccaacaggaactctagccaagaaccacggcctacactctccaacacaatccagaggccacaactaggtcccacagctaatttacccctggagatgggctcaggacagctggcacccagtctcaccaatcgtggatctaactttgctcctgagactggacagactgcaggacaattccagacacggacagcagagggtgtgggtgtctggccacagtggcagggccagcagcctcatcatcgttcaagttctagtgagcaacatgttcaacaaccgccagcacagcaacctggccagcctgaggtcttccaggagatgctgtccatgctgggagatcagagcaacagctacaacaatgaagaattccctgatctaactatgtttccccccttttcagaatagaactattggggtgaggataaggggtgggggagaaaaaatcactgtttgtttttaaaaagcaaatctttctgtaaacagaataaaagttcctctcccttcccttccctcacccctgacatgtaccccctttcccttctggctgttcccctgctctgttgcctctctaaggtaacatttatagaagaaatggaatgaatctccaaggcttttaggactgtctgaaaatttgaggctgggtgaagttaaaacacctttccttatgtctcctgacctgaaattgtatagtgttgatttgtgctgagatcaagaggcaggttagaagaacctgacatccactgtttgccttggatagtatggcttgtttttggaaagaaattctgaagagagtggaggagaggagaaatgtcctcatatttgaggaccatgaaacattgtaggtatatatggggctttagcaagtttgagcataggctctttttgctgcctgtgagcagtccctctggaaagaaacatgtgagtaagtgagagagagtgtgtgtgtatgtgtgtgtgtgtgtgtgtgcgcacacatgcttctgtatttcactctttctccctattagggagttatgcaaaatttgtccccgattttacctttgtctttctgtgtacttttcaaagagtcctaaggagttaaatcttccaggtattttccacttagtattgcagccaaagaatatttaaataaacgtctttgctgcgcttgcatccatgcccagccaatatacaactgtaaagcaaatatagaaagtcggctgttgatacgattgtctgttatcgaacacattcagtgataaagctgggttactgctgcttttggtgctctcaccttatctggaagatctgcaaacattacctaaataggctggcaagataaacactttctggaacccgagacttggccataaagataatgctgcatttttctgtcagaatcacatatgatgtgtgttctgtagaggttatttctgcatggaaactcaacttcttggattagccgtcccagtgaaaatcctcattgttggagtgtaaaccaaatacgaagccctcttgcaaagtagcctctttcatcccatactcaaaatacccagtttagcaagcaactgagatttaagtctctctggccctaagaggtttttcctctttgctccctccaatcttgagattgggttttgctttagagtgcaagtatcataattccgtatgatagatggggcctggacacccatctcaacagggtcacttggtaattaacaatagccatataaatgcggatacaggttactaccctcaccctttaccttcctcaggtaacagtcgtagataccagcttttttttttttttttttaaattggctttggccagtagctaaagtgcaagactgaattaatgagaagatatattaaatgtagtcataggggactgaggagcaagggtggccttgaagaggccaaaggaatgtccatttgctgagtttcccttccttatgtctccagtctggtgccaggtagtggagtaaaaaaggagacagtttatttttttattctatgtgcacacttacagtatacatatatatttatatcacaatttacgaaaccaaaaagttgagtttccaatggaacccttgttttttaataatcgactttttaaatgtgatcaggactataatattgtacagttattatagggcttttggggaaggggaggatagcgagaagatgctctgggggttttgtttttgcttttccttcagggttttatttttgactgttttgttttcttgttggccatttctgtattgctggcatctgtgctaagctttacagtggcaaaaataatgacatgtagcaaagattttcaaacaaaatattttttccttttgtaaaa

SEQ ID NO: 2443 - DNA, 2427 bp, Homo sapiens
  source 1..2427: mol_type = unassigned DNA
actgggggggggggtggcgcggcggcggtggcatctgcggccatggcggcgactactgccaaccccgaaatgacatcagatgtaccatcactgggtccagccattgcctctggaaactctggacctggaattcaaggtggaggagccattgtccagagggctattaagcggcgaccagggctggattttgatgatgatggagaagggaacagtaaatttttgaggtgtgatgatgatcagatgtctaacgataaggagcggtttgccagggaaaatcacagtgaaattgaacggcggcgacggaacaagatgacagcctacatcacagaactgtcagatatggtacccacctgtagtgccctggctcgaaaaccagacaagctaaccatcttacgcatggcagtttctcacatgaagtccttgcggggaactggcaacacatccactgatggctcctataagccgtctttcctcactgatcaggaactgaaacatttgatcttggaggcagcagatggctttctgtttattgtctcatgtgagacaggcagggtggtgtatgtgtctgactccgtgactcctgttttgaaccagccacagtctgaatggtttggcagcacactctatgatcaggtgcacccagatgatgtggataaacttcgtgagcagctttccacttcagaaaatgccctgacagggcgtatcctggatctaaagactggaacagtgaaaaaggaaggtcagcagtcttccatgagaatgtgtatgggctcaaggagatcgtttatttgccgaatgaggtgtggcagtagctctgtggacccagtttctgtgaataggctgagctttgtgaggaacagatgcaggaatggacttggctctgtaaaggatggggaacctcacttcgtggtggtccactgcacaggctacatcaaggcctggcccccagcaggtgtttccctcccagatgatgacccagaggctggccagggaagcaagttttgcctagtggccattggcagattgcaggtaactagttctcccaactgtacagacatgagtaatgtttgtcaaccaacagagttcatctcccgacacaacattgagggtatcttcacttttgtggatcaccgctgtgtggctactgttggctaccagccacaggaactcttaggaaagaatattgtagaattctgtcatcctgaagaccagcagcttctaagagacagcttccaacaggtagtgaaattaaaaggccaagtgctgtctgtcatgttccggttccggtctaagaaccaagaatggctctggatgagaaccagctcctttactttccagaacccttactcagatgaaattgagtacatcatctgtaccaacaccaatgtgaagaactctagccaagaaccacggcctacactctccaacacaatccagaggccacaactaggtcccacagctaatttacccctggagatgggctcaggacagctggcacccaggcagcagcaacagcaaacagaattggacatggtaccaggaagagatggactggccagctacaatcattcccaggtggttcagcctgtgacaaccacaggaccagaacacagcaagccccttgagaagtcagatggtttatttgcccaggatagagatccaagattttcagaaatctatcacaacatcaatgcggatcagagtaaaggcatctcctccagcactgtccctgccacccaacagctattctcccagggcaacacattccctcctaccccccggccggcagagaatttcaggaatagtggcctagcccctcctgtaaccattgtccagccatcagcttctgcaggacagatgttggcccagatttcccgccactccaaccccacccaaggagcaaccccaacttggacccctactacccgctcaggcttttctgcccagcaggtggctacccaggctactgctaagactcgtacttcccagtttggtgtgggcagctttcagactccatcctccttcagctccatgtccctccctggtgccccaactgcatcgcctggtgctgctgcctaccctagtctcaccaatcgtggatctaactttgctcctgagactggacagactgcaggacaattccagacacggacagcagagggtgtgggtgtctggccacagtggcagggccagcagcctcatcatcgttcaagttctagtgagcaacatgttcaacaaccgccagcacagcaacctggccagcctgaggtcttccaggagatgctgtccatgctgggagatcagagcaacagctacaacaatgaagaattccctgatctaactatgtttccccccttttcagaatagaactattggggtgaggataaggggtgggggagaaaaaatcactgtttgtttttaaaaagc

SEQ ID NO: 2444 - DNA, 2892 bp, Homo sapiens
  source 1..2892: mol_type = unassigned DNA
cttggattccgcggtagcggaggcggcggtcaggcgccgcttctggggagtggcctttcttttcccctccctcccggttcggtggcggcggctcctcccactgggggggggggtggcgcggcggcggtggcatctgcggccatggcggcgactactgccaaccccgcctgatcttggactcaagattctcctgcctcagaccccgagtagctgggactacagaaatgacatcagatgtaccatcactgggtccagccattgcctctggaaactctggacctggaattcaaggtggaggagccattgtccagagggctattaagcggcgaccagggctggattttgatgatgatggagaagggaacagtaaatttttgaggtgtgatgatgatcagatgtctaacgataaggagcggtttgccaggtcggatgatgagcagagctctgcggataaagagagacttgccagggaaaatcacagtgaaattgaacggcggcgacggaacaagatgacagcctacatcacagaactgtcagatatggtacccacctgtagtgccctggctcgaaaaccagacaagctaaccatcttacgcatggcagtttctcacatgaagtccttgcggggaactggcaacacatccactgatggctcctataagccgtctttcctcactgatcaggaactgaaacatttgatcttggaggcagcagatggctttctgtttattgtctcatgtgagacaggcagggtggtgtatgtgtctgactccgtgactcctgttttgaaccagccacagtctgaatggtttggcagcacactctatgatcaggtgcacccagatgatgtggataaacttcgtgagcagctttccacttcagaaaatgccctgacagggcgtatcctggatctaaagactggaacagtgaaaaaggaaggtcagcagtcttccatgagaatgtgtatgggctcaaggagatcgtttatttgccgaatgaggtgtggcagtagctctgtggacccagtttctgtgaataggctgagctttgtgaggaacagatgcaggaatggacttggctctgtaaaggatggggaacctcacttcgtggtggtccactgcacaggctacatcaaggcctggcccccagcagatgatgacccagaggctggccagggaagcaagttttgcctagtggccattggcagattgcaggtaactagttctcccaactgtacagacatgagtaatgtttgtcaaccaacagagttcatctcccgacacaacattgagggtatcttcacttttgtggatcaccgctgtgtggctactgttggctaccagccacaggaactcttaggaaagaatattgtagaattctgtcatcctgaagaccagcagcttctaagagacagcttccaacaggtagtgaaattaaaaggccaagtgctgtctgtcatgttccggttccggtctaagaaccaagaatggctctggatgagaaccagctcctttactttccagaacccttactcagatgaaattgagtacatcatctgtaccaacaccaatgtgaagaactctagccaagaaccacggcctacactctccaacacaatccagaggccacaactaggtcccacagctaatttacccctggagatgggctcaggacagctggcacccaggcagcagcaacagcaaacagaattggacatggtaccaggaagagatggactggccagctacaatcattcccaggtggttcagcctgtgacaaccacaggaccagaacacagcaagccccttgagaagtcagatggtttatttgcccaggatagagatccaagattttcagaaatctatcacaacatcaatgcggatcagagtaaaggcatctcctccagcactgtccctgccacccaacagctattctcccagggcaacacattccctcctaccccccggccggcagagaatttcaggaatagtggcctagcccctcctgtaaccattgtccagccatcagcttctgcaggacagatgttggcccagatttcccgccactccaaccccacccaaggagcaaccccaacttggacccctactacccgctcaggcttttctgcccagcaggtggctacccaggctactgctaagactcgtacttcccagtttggtgtgggcagctttcagactccatcctccttcagctccatgtccctccctggtgccccaactgcatcgcctggtgctgctgcctaccctagtctcaccaatcgtggatctaactttgctcctgagactggacagactgcaggacaattccagacacggacagcagagggtgtgggtgtctggccacagtggcagggccagcagcctcatcatcgttcaagttctagtgagcaacatgttcaacaaccgccagcacagcaacctggccagcctgaggtcttccaggagatgctgtccatgctgggagatcagagcaacagctacaacaatgaagaattccctgatctaactatgtttccccccttttcagaatagaactattggggtgaggataaggggtgggggagaaaaaatcactgtttgtttttaaaaagcaaatctttctgtaaacagaataaaagttcctctcccttcccttccctcacccctgacatgtaccccctttcccttctggctgttcccctgctctgttgcctctctaaggtaacatttatagaagaaatggaatgaatctccaaggcttttaggactgtctgaaaatttgaggctgggtgaagttaaaacacctttccttatgtctcctgacctgaaattgtatagtgttgatttgtgctgagatcaagaggcaggttagaagaacctgacatccactgtt

SEQ ID NO: 2445 - DNA, 1638 bp, Homo sapiens
  source 1..1638: mol_type = unassigned DNA
gagcaactctgttttcaaagcttttgggtggagctgaagcacactgcttattaaagtacactattcaggcatatcatgtaggtttactttctgtgtttctagagaccaagaagcgggacgttcaccatgggaagaaaatcgctgtaccttctgattgtggggatcctcatagcatattatatttatacgcctctcccagataacgttgaggagccatggagaatgatgtggataaacgcacatctgaaaactatacaaaatttggctacatttgtggagctcctgggacttcaccattttatggattcctttaaggttgtcgggagctttgatgaagtcccaccaacctcagatgaaaatgtcactgtgactgagacaaaattcaacaacattcttgttcgggtatatgtgccaaagagaaagtctgaagcactaagaagggggttgttttacatccatggtggaggctggtgcgtgggaagtgctgctctaagtggttatgacttgctgtcaagatggacagcagacagacttgatgctgtcgtcgtatcaaccaactacagattagcacctaagtatcatttcccaattcaatttgaagatgtatataatgccttaaggtggttcttacgtaaaaaagttcttgcaaaatatggtgtgaaccctgagagaatcggtatttctggagatagtgcaggagggaatttagctgcagcagtgactcaacagctccttgatgacccagatgtcaagatcaaactcaagatccagtctttaatttatcctgcccttcagcctcttgatgtagatttaccgtcatatcaagaaaattcaaattttctatttctatccaaatcactcatggtcagattctggagtgaatattttaccactgatagatcacttgaaaaagccatgctttccagacaacatgtacctgtggaatcaagtcatctcttcaaatttgttaattggagttccctgctccctgagaggtttataaaaggacatgtttataacaatccaaattatggcagttctgagctggctaaaaaatatccagggttcctagatgtgagggcagcccctttgttggctgatgacaacaaattacgtggcttacccctgacctatgtcatcacctgtcaatatgatctcttaagagatgatggactcatgtatgtcacccgacttcgcaacactggggttcaggtgactcataaccatgttgaggatggattccatggagcattttcatttctgggacttaaaattagtcacagacttataaatcagtatattgagtggctaaaggaaaatctatagtaaaacatgtagctataacatattttaaaaataaaatctgaaaacctcagaaaatttgcattagaaattggtctttcttagaatggtctagttaagttccacatgtagcataattcttaaataggcacttttctgttttttttttcttactgtgggatttcatttcaattttctacattgtctatctgctttttctgagattttccttcttacactgttaatcttattttaaaaaatattacattcttgtatactttatttttgtgagttggctactatttacgatgcaagagaataaatgtgagcaaatat

SEQ ID NO: 2446 - DNA, 6558 bp, Homo sapiens
  source 1..6558: mol_type = unassigned DNA
cggccgcggcggcggggagagcggagggagcgccgcccgcccgcgccgtcctttgtgtggcggcggcggcgcctgggcctgaccgggtccccggggctgagcgccgggctccgcgccgcccctcccgcgcccctgccaagcgggcgcctatcctctccgagcaagatggcaaccccggcggcggtcaaccctccggaaatggcttcagacatacctggatctgtgacgttgcccgttgcccccatggcggccaccggacaggtgaggatggcgggggccatgcctgcccgtggaggaaagcggcgttccggaatggacttcgatgatgaagatggtgaaggccccagtaaattttcaagagagaatcatagtgaaatcgaaaggcgcagacggaacaagatgactcagtacatcacggagctctccgacatggtccccacatgcagcgcactggctcggaagccagacaagctcaccatcctccgcatggccgtctcgcacatgaagtccatgaggggtacagggaacaagtccaccgatggcgcgtacaagccttccttcctcacagagcaggaactgaagcatctcatccttgaagcagctgatggatttctgtttgtggtggctgctgagacagggcgagtgatttatgtgtctgactccgtcacccctgttctgaaccagccccagtcagagtggtttgggagcacactgtatgaacaggtgcatcctgatgacgtggagaagctgagagagcaactgtgcacctcagaaaactcaatgacaggccggatcttggacctgaagactgggacggtcaagaaagaagggcagcagtcatccatgaggatgtgcatgggctcgcggcggtctttcatctgcaggatgaggtgtggaaatgctcctttggaccaccttcctctaaacagaataaccaccatgaggaaaaggttcaggaatggccttggccctgtgaaagaaggagaagcccaatatgctgtggtccactgtacaggatacatcaaggcctggccaccagcaggaatgaccatacctgaagaagacgctgatgtgggacaaggcagtaaatattgcctcgtggcaattgggagactccaggtgaccagctctcctgtatgcatggacatgaatgggatgtcggtgcccacagagttcttatcccggcataactccgatggaatcatcacatttgtggatccaagatgtatcagtgtgattggctaccaaccccaggatcttctgggaaaggacattttggaattctgccaccctgaggatcaaagccatctgcgtgagagcttccagcaggtggttaagctgaaaggccaagtcctgtcggtcatgtatcgatttcgcaccaagaaccgggagtggatgttgatccgcaccagcagcttcacattccagaatccctattctgatgagattgagtacatcatctgcaccaacaccaacgtcaagcaacttcagcaacagcaggcagaattggaagtgcaccagagagatggattgtcatcgtatgacttatcccaggtccccgtccccaacctaccagccggtgttcatgaggccgggaagtccgtggaaaaggcggatgcaatcttctcccaggaaagagatcctcggtttgctgaaatgtttgcaggaattagtgcatcggagaagaagatgatgagctcagcctctgcagcaggaacccagcagatctactcccaaggaagcccatttccctctggacactccgggaaggccttcagctcttcagtggttcatgtgcctggagtgaatgatattcagtcctcttcttccacgggccagaacatgtcccaaatctcccggcagctaaaccagagtcaggtggcatggacagggagtcgtccgccctttccgggacagcaaatcccatctcagtccagcaagactcagtcatctccctttgggattggaacgagccacacctacccggcagacccctcttcctacagccccctctccagcccagctacctcctcgccaagtgggaatgcctactccagtcttgccaacaggactccagggttcgctgaaagtggacaaagtagcgggcagttccaagggcggccctcggaagtctggtcgcagtggcaaagccagcaccatggccagcagagcggtgagcagcactcccaccagcagcccggtcagactgaagtgttccaggacatgctgcccatgccaggagatccaacccaggggactggcaactataacatcgaagactttgccgacctgggcatgtttccaccgttttctgagtagctgcggccagagtgaggctcctgctgtacagtgccacccatactgtgatgtcgatgcccatgtgaatgaggcccaccctcgccctgcttgccctgccgcaggccccccaccagaagccatctcccccgctgtgtgtccccaggcgcatcattgctccactctcccctgcagccgcggctgctcggccactgaccaggggccctggcagacattaggggatcagttgtatttattgtattttatctgtgtgtgctcaggaggtgagcctagtgggtccttaagtttggttgtgaataatctcttgatagacaatttatacccatgaaagttcagccaatgcccagagtgaccaagcagcaccagcaggcctgcccaggatgctgaaagcagatttcttcttgatttcacttctgatggatgcatggggctctgggggaatgctgggaaaatgggcaagcagagtgcacagccctcgttctgccagctggagccaagaagcacagagacacagaggcgcctgcccctcagctccgctggtctgtctgtgcatccactgtgccgtgggacatatgtaatttgtgcagtgtgacatggacttgctgtcctaatggatgtgttgtgccttgtgtctgtcatgtgtggccagcgtgattgtatagaatccagagtatgtagagagccaaaatgtgtggccctgtccccaagctcagcaccaccggccatgaccagaggttgctcggcccagggtctgggagctgggctaacaggctgacacttcggcagggtcaccaggaggcacagctaggggcatgctcacatgggtaggtcagttctttggtccaagcctctggtgcagattcaagctcctcctcttagaggaagcagctccttcctcccacaggagccccaagggagcactcaccctcctcccaattggatctgaatagctgtgttcctgatcccacataagcatgtctcatccttgccccactggtgagaggaggaccttgtgcctgcccagagcctgcaggacagcacgccttgaggtcagaggcctggcccttctttacagatgtagatagcagggtaggacgcccaggccttctcacatgggcaccatgaaacactttcttccaggccacctgagccttcgttcttcagcccgactggaggaacagcagctctgggaggcacagagtgcaggtctcaggggcagaagacatgggttccagttctggttctgccacacacccaccggccttgaatttctctggtggtctcaagacaagaacaagagctgactctagaatcttctgcctggctgacctctgagcccatgatccctggcttgctgtgcttctcttggatttgaggagagtttatgaatccatccccctgttttcagggacctctgccttctcccacaccccttacactagtgaggactccttcggcctcttgtgtttccttccttttgtgaccattacgccccctccctgtttcttatcaccagcccatcagcccactgactcccatatggtagaaaaggtaccgtggctgctgcagggcacatggagggacctaccctctgggaaagcccttgtgtccctcccagagtccttcaggtaggccctcgcagatgctgcttgctcagaaacaacccgtgcatccctgcccatggattctgcaggacctagaagagtggcattggttctaggaacctgagagtggagtgaggccagcatgcaggaaggagtttggagagagtgtttgctgtgatccattgaaagctccacattaaaccccagccctgtctggccagggagatccatgtgctcaatgttgctgggggacctacaaaagtcaaacattgctcagtaaaatgcctttggctggtcgccagctgtgcatgactgcagttcctagactctaacttaaccccaactttgcagtttctagagctttttgtctgtaatggtgattgggtctccactgtagatgcatgcagtgttcactccaacctcagaggctttcttgcttctggggaaatggcaggtggttgaaaccctgcacatcctcccagggccagccccagaatgggcctttctctgcctgccctgcccttggggccacctctgcctccagcaggcttgagcttgccccaggccttgggcataattatttccccccaaaaaaggcacaaaaataggttttggatcaaagaagtgtttctcagtgaaatgaaaacagtctttttatagcctttagcttgtgagtttggaagtttggggggtcttatgtttgttttgcctcttctgtttcttggaggagagttgaggcttttcttaggtgcatacacagacccaggtgaacacgctgactgtgaacctgccctgtatccggagctgtgctgggcactgaggggatgcaacaaaattaggagaggatccttgctcccaacgtctacttctcctacctcaacaggggtccagggtgcagtgaactcagttcttggcccttgggtgaggattcatggatgaatgaaagctagacctgatggggaggcattatgactaaataggcccagcctccttcccttccagctctgtcctaggagcataggcgggaaatctgagtagagtctgactgcagtttttgcttatgatttgtaaaagccgtcatggggtcaataagaaaataggggtgatggagggggagaagcccaggactgggagaatcgcacatgccccaggggttttcaccaaggattttcaagacaaactggagtaagaattaaagccccagaggatttaattatcctggtttgcaaaagagcctcccatgccagtaccgcccagccttggaggccggaatgctcatggcccctgtggtctgcttgtccttcagcccatgcccagcagatacctctctgactggagacgggctcaaagctggattagaaaggggagaggcacttgtgactttgtttgactctgtgactcacttcctcgctcacaccttgtttgaactactggactttcaactggctttccttaggtcaggcaagcagacagctccccactgaagaggtctgtacagtgacaacccgggccggcagcaaggacacagatgcagccacagtaaggctccatcaggactgggtcagtgatggcaacaggatggccaaggatggctctagaacactctgtccatgcgtcactccccccagttttatttttagctttggcttcagggagtgacagccatcacaaatagccacattctgctctactctccaacataccagattctacactgttgttatttcatgagacgtgaatgttgcagagagtggggggattctggttgttaaggaacttacactggggagctttactcttccgtgtcaacaatgtgactacatgttctccagattagccacacatgcaaacatcagtgtccttctagctttagccgagaaagaaaccagtcccagggaatgaatggtggtctccccactcccggcagcactttaggcagcccataagctatgcgagaatgtgaacgctcaccttgctccgtcacggttctgacctaccacataaacaggaagaagccagtgaccggaacagctctaggaataacaagtcagaatagaagtgtcctttatattaccagaaaatatgggcttggcctaagtcgctgtctcctaacctgccggggtcattccccaccaaacaccccatactaaggagccatgagccacctggacattcaccttttctttgaccatctggagtctggggcaacttaaggaggcaccacacagtggtgcaggcacatttccaagcgtaggtgtccctggcttttgtggccaaagctagtgttatggtcaacaacaggccagggtctgtggggcactgaccttgaaagtggcaaaatggaggtttcacaggctgtgcgggagcaggacggcttgcttcatctaacaatctcagtttcctttaaaaaaagaaagaaaggaaaagatttcataagcaggtgtcagtggacagtttaagtacttaaccatttctctttcttcttatggatgtgaactgtgctgtggataaatcatttgtatttcttgaatgttctctatgactaacagttattaagtcggttgtgtatatgtgtaactaatgtaactgccttttaaaatttcattacaataaaaatgactttgctctgaacaacaaa

SEQ ID NO: 2447 - DNA, 2317 bp, Homo sapiens
  source 1..2317: mol_type = unassigned DNA
gcggccgcggcggcggggagagcggagggagcgccgcccgcccgcgccgtcctttgtgtggcggcggcggcgcctgggcctgaccgggtccccggggctgagcgccgggctccgcgccgcccctcccgcgcccctgccaagcgggcgcctatcctctccgagcaagatggcaaccccggcggcggtcaaccctccggaaatggcttcagacatacctggatctgtgacgttgcccgttgcccccatggcggccaccggacaggtgaggatggcgggggccatgcctgcccgtggaggaaagcggcgttccggaatggacttcgatgatgaagatggtgaaggccccagtaaattttcaagagagaatcatagtgaaatcgaaaggcgcagacggaacaagatgactcagtacatcacggagctctccgacatggtccccacatgcagcgcactggctcggaagccagacaagctcaccatcctccgcatggccgtctcgcacatgaagtccatgaggggtacagggaacaagtccaccgatggcgcgtacaagccttccttcctcacagagcaggaactgaagcatctcatccttgaagcagctgatggatttctgtttgtggtggctgctgagacagggcgagtgatttatgtgtctgactccgtcacccctgttctgaaccagccccagtcagagtggtttgggagcacactgtatgaacaggtgcatcctgatgacgtggagaagctgagagagcaactgtgcacctcagaaaactcaatgacaggccggatcttggacctgaagactgggacggtcaagaaagaagggcagcagtcatccatgaggatgtgcatgggctcgcggcggtctttcatctgcaggatgaggtgtggaaatgctcctttggaccaccttcctctaaacagaataaccaccatgaggaaaaggttcaggaatggccttggccctgtgaaagaaggagaagcccaatatgctgtggtccactgtacaggatacatcaaggcctggccaccagcaggaatgaccatacctgaagaagacgctgatgtgggacaaggcagtaaatattgcctcgtggcaattgggagactccaggtgaccagctctcctgtatgcatggacatgaatgggatgtcggtgcccacagagttcttatcccggcataactccgatggaatcatcacatttgtggatccaagatgtatcagtgtgattggctaccaaccccaggatcttctgggaaaggacattttggaattctgccaccctgaggatcaaagccatctgcgtgagagcttccagcaggtggttaagctgaaaggccaagtcctgtcggtcatgtatcgatttcgcaccaagaaccgggagtggatgttgatccgcaccagcagcttcacattccagaatccctattctgatgagattgagtacatcatctgcaccaacaccaacgtcaagcaacttcagcaacagcaggcagaattggaagtgcaccagagagatggattgtcatcgtatgacttatcccaggtccccgtccccaacctaccagccggtgttcatgaggccgggaagtccgtggaaaaggcggatgcaatcttctcccaggaaagagatcctcggtttgctgaaatgtttgcaggaattagtgcatcggagaagaagatgatgagctcagcctctgcagcaggaacccagcagatctactcccaaggaagcccatttccctctggacactccgggaaggccttcagctcttcagtggttcatgtgcctggagtgaatgatattcagtcctcttcttccacgggccagaacatgtcccaaatctcccggcagctaaaccagagtcaggtggcatggacagggagtcgtccgccctttccgggacagcaaatcccatctcagtccagcaagactcagtcatctccctttgggattggaacgagccacacctacccggcagacccctcttcctacagccccctctccagcccagctacctcctcgccaagtgggaatgcctactccagtcttgccaacaggactccagggttcgctgaaagtggacaaagtagcgggcagttccaagggcggccctcggaagtctggtcgcagtggcaaagccagcaccatggccagcagagcggtgagcagcactcccaccagcagcccggtcagactgaagtgttccaggacatgctgcccatgccaggagatccaaggaatgaatggtggtctccccactcccggcagcactttaggcagcccataagctatgcgagaatgtga

SEQ ID NO: 2448 - DNA, 2458 bp, Homo sapiens
  source 1..2458: mol_type = unassigned DNA
tgacattttctcagcagaatacaaatgcagctacatttcctcccagaggtttctgacatttcttctacacggataacagattctcctaagaaggtgttggtcacaaggaagaaagatctttgtttaatccctctgaaaagaaatggcttcagacatacctggatctgtgacgttgcccgttgcccccatggcggccaccggacaggtgaggatggcgggggccatgcctgcccgtggaggaaagcggcgttccggaatggacttcgatgatgaagatggtgaaggccccagtaaattttcaagagagaatcatagtgaaatcgaaaggcgcagacggaacaagatgactcagtacatcacggagctctccgacatggtccccacatgcagcgcactggctcggaagccagacaagctcaccatcctccgcatggccgtctcgcacatgaagtccatgaggggtacagggaacaagtccaccgatggcgcgtacaagccttccttcctcacagagcaggaactgaagcatctcatccttgaagcagctgatggatttctgtttgtggtggctgctgagacagggcgagtgatttatgtgtctgactccgtcacccctgttctgaaccagccccagtcagagtggtttgggagcacactgtatgaacaggtgcatcctgatgacgtggagaagctgagagagcaactgtgcacctcagaaaactcaatgacaggccggatcttggacctgaagactgggacggtcaagaaagaagggcagcagtcatccatgaggatgtgcatgggctcgcggcggtctttcatctgcaggatgaggtgtggaaatgctcctttggaccaccttcctctaaacagaataaccaccatgaggaaaaggttcaggaatggccttggccctgtgaaagaaggagaagcccaatatgctgtggtccactgtacaggatacatcaaggcctggccaccagcaggaatgaccatacctgaagaagacgctgatgtgggacaaggcagtaaatattgcctcgtggcaattgggagactccaggtgaccagctctcctgtatgcatggacatgaatgggatgtcggtgcccacagagttcttatcccggcataactccgatggaatcatcacatttgtggatccaagatgtatcagtgtgattggctaccaaccccaggatcttctgggaaaggacattttggaattctgccaccctgaggatcaaagccatctgcgtgagagcttccagcaggtggttaagctgaaaggccaagtcctgtcggtcatgtatcgatttcgcaccaagaaccgggagtggatgttgatccgcaccagcagcttcacattccagaatccctattctgatgagattgagtacatcatctgcaccaacaccaacgtcaagcaacttcagcaacagcaggcagaattggaagtgcaccagagagatggattgtcatcgtatgacttatcccaggtccccgtccccaacctaccagccggtgttcatgaggccgggaagtccgtggaaaaggcggatgcaatcttctcccaggaaagagatcctcggtttgctgaaatgtttgcaggaattagtgcatcggagaagaagatgatgagctcagcctctgcagcaggaacccagcagatctactcccaaggaagcccatttccctctggacactccgggaaggccttcagctcttcagtggttcatgtgcctggagtgaatgatattcagtcctcttcttccacgggccagaacatgtcccaaatctcccggcagctaaaccagagtcaggtggcatggacagggagtcgtccgccctttccgggacagcaaatcccatctcagtccagcaagactcagtcatctccctttgggattggaacgagccacacctacccggcagacccctcttcctacagccccctctccagcccagctacctcctcgccaagtgggaatgcctactccagtcttgccaacaggactccagggttcgctgaaagtggacaaagtagcgggcagttccaagggcggccctcggaagtctggtcgcagtggcaaagccagcaccatggccagcagagcggtgagcagcactcccaccagcagcccggtcagactgaagtgttccaggacatgctgcccatgccaggagatccaacccaggggactggcaactataacatcgaagactttgccgacctgggcatgtttccaccgttttctgagtagctgcggccagagtgaggctcctgctgtacagtgccacccatactgtgatgtcgatgcccatgtgaatgaggcccaccctcgccctgcttgccctgccgcaggccccccaccagaagccatctcccccgctgtgtgtccccaggcgcatcattgctccactctcccctgcagccgcggctgctcggccactgacca

SEQ ID NO: 2449 - DNA, 6690 bp, Homo sapiens
  source 1..6690: mol_type = unassigned DNA
atctgtgatgacattttctcagcagaatacaaatgcagctacatttcctcccagaggtttctgacatttcttctacacggataacagattctcctaagaaggtgttggtcacaaggaagaaagatctttgtttaatccctctgaaaagtgtaggaggatcaggtgaccaaggttttttagaattttccctttttgggatctgacgccgacacactattttgaggcagtgacatcatctctttcctctggcgtgccctccttgcggctccatcattcaggccttgtcatctctcacctggactgctgtgaccttcattcattcccaggagaagtccagaaatggcttcagacatacctggatctgtgacgttgcccgttgcccccatggcggccaccggacaggtgaggatggcgggggccatgcctgcccgtggaggaaagcggcgttccggaatggacttcgatgatgaagatggtgaaggccccagtaaattttcaagagagaatcatagtgaaatcgaaaggcgcagacggaacaagatgactcagtacatcacggagctctccgacatggtccccacatgcagcgcactggctcggaagccagacaagctcaccatcctccgcatggccgtctcgcacatgaagtccatgaggggtacagggaacaagtccaccgatggcgcgtacaagccttccttcctcacagagcaggaactgaagcatctcatccttgaagcagctgatggatttctgtttgtggtggctgctgagacagggcgagtgatttatgtgtctgactccgtcacccctgttctgaaccagccccagtcagagtggtttgggagcacactgtatgaacaggtgcatcctgatgacgtggagaagctgagagagcaactgtgcacctcagaaaactcaatgacaggccggatcttggacctgaagactgggacggtcaagaaagaagggcagcagtcatccatgaggatgtgcatgggctcgcggcggtctttcatctgcaggatgaggtgtggaaatgctcctttggaccaccttcctctaaacagaataaccaccatgaggaaaaggttcaggaatggccttggccctgtgaaagaaggagaagcccaatatgctgtggtccactgtacaggatacatcaaggcctggccaccagcaggaatgaccatacctgaagaagacgctgatgtgggacaaggcagtaaatattgcctcgtggcaattgggagactccaggtgaccagctctcctgtatgcatggacatgaatgggatgtcggtgcccacagagttcttatcccggcataactccgatggaatcatcacatttgtggatccaagatgtatcagtgtgattggctaccaaccccaggatcttctgggaaaggacattttggaattctgccaccctgaggatcaaagccatctgcgtgagagcttccagcaggtggttaagctgaaaggccaagtcctgtcggtcatgtatcgatttcgcaccaagaaccgggagtggatgttgatccgcaccagcagcttcacattccagaatccctattctgatgagattgagtacatcatctgcaccaacaccaacgtcaagcaacttcagcaacagcaggcagaattggaagtgcaccagagagatggattgtcatcgtatgacttatcccaggtccccgtccccaacctaccagccggtgttcatgaggccgggaagtccgtggaaaaggcggatgcaatcttctcccaggaaagagatcctcggtttgctgaaatgtttgcaggaattagtgcatcggagaagaagatgatgagctcagcctctgcagcaggaacccagcagatctactcccaaggaagcccatttccctctggacactccgggaaggccttcagctcttcagtggttcatgtgcctggagtgaatgatattcagtcctcttcttccacgggccagaacatgtcccaaatctcccggcagctaaaccagagtcaggtggcatggacagggagtcgtccgccctttccgggacagcaaatcccatctcagtccagcaagactcagtcatctccctttgggattggaacgagccacacctacccggcagacccctcttcctacagccccctctccagcccagctacctcctcgccaagtgggaatgcctactccagtcttgccaacaggactccagggttcgctgaaagtggacaaagtagcgggcagttccaagggcggccctcggaagtctggtcgcagtggcaaagccagcaccatggccagcagagcggtgagcagcactcccaccagcagcccggtcagactgaagtgttccaggacatgctgcccatgccaggagatccaacccaggggactggcaactataacatcgaagactttgccgacctgggcatgtttccaccgttttctgagtagctgcggccagagtgaggctcctgctgtacagtgccacccatactgtgatgtcgatgcccatgtgaatgaggcccaccctcgccctgcttgccctgccgcaggccccccaccagaagccatctcccccgctgtgtgtccccaggcgcatcattgctccactctcccctgcagccgcggctgctcggccactgaccaggggccctggcagacattaggggatcagttgtatttattgtattttatctgtgtgtgctcaggaggtgagcctagtgggtccttaagtttggttgtgaataatctcttgatagacaatttatacccatgaaagttcagccaatgcccagagtgaccaagcagcaccagcaggcctgcccaggatgctgaaagcagatttcttcttgatttcacttctgatggatgcatggggctctgggggaatgctgggaaaatgggcaagcagagtgcacagccctcgttctgccagctggagccaagaagcacagagacacagaggcgcctgcccctcagctccgctggtctgtctgtgcatccactgtgccgtgggacatatgtaatttgtgcagtgtgacatggacttgctgtcctaatggatgtgttgtgccttgtgtctgtcatgtgtggccagcgtgattgtatagaatccagagtatgtagagagccaaaatgtgtggccctgtccccaagctcagcaccaccggccatgaccagaggttgctcggcccagggtctgggagctgggctaacaggctgacacttcggcagggtcaccaggaggcacagctaggggcatgctcacatgggtaggtcagttctttggtccaagcctctggtgcagattcaagctcctcctcttagaggaagcagctccttcctcccacaggagccccaagggagcactcaccctcctcccaattggatctgaatagctgtgttcctgatcccacataagcatgtctcatccttgccccactggtgagaggaggaccttgtgcctgcccagagcctgcaggacagcacgccttgaggtcagaggcctggcccttctttacagatgtagatagcagggtaggacgcccaggccttctcacatgggcaccatgaaacactttcttccaggccacctgagccttcgttcttcagcccgactggaggaacagcagctctgggaggcacagagtgcaggtctcaggggcagaagacatgggttccagttctggttctgccacacacccaccggccttgaatttctctggtggtctcaagacaagaacaagagctgactctagaatcttctgcctggctgacctctgagcccatgatccctggcttgctgtgcttctcttggatttgaggagagtttatgaatccatccccctgttttcagggacctctgccttctcccacaccccttacactagtgaggactccttcggcctcttgtgtttccttccttttgtgaccattacgccccctccctgtttcttatcaccagcccatcagcccactgactcccatatggtagaaaaggtaccgtggctgctgcagggcacatggagggacctaccctctgggaaagcccttgtgtccctcccagagtccttcaggtaggccctcgcagatgctgcttgctcagaaacaacccgtgcatccctgcccatggattctgcaggacctagaagagtggcattggttctaggaacctgagagtggagtgaggccagcatgcaggaaggagtttggagagagtgtttgctgtgatccattgaaagctccacattaaaccccagccctgtctggccagggagatccatgtgctcaatgttgctgggggacctacaaaagtcaaacattgctcagtaaaatgcctttggctggtcgccagctgtgcatgactgcagttcctagactctaacttaaccccaactttgcagtttctagagctttttgtctgtaatggtgattgggtctccactgtagatgcatgcagtgttcactccaacctcagaggctttcttgcttctggggaaatggcaggtggttgaaaccctgcacatcctcccagggccagccccagaatgggcctttctctgcctgccctgcccttggggccacctctgcctccagcaggcttgagcttgccccaggccttgggcataattatttccccccaaaaaaggcacaaaaataggttttggatcaaagaagtgtttctcagtgaaatgaaaacagtctttttatagcctttagcttgtgagtttggaagtttggggggtcttatgtttgttttgcctcttctgtttcttggaggagagttgaggcttttcttaggtgcatacacagacccaggtgaacacgctgactgtgaacctgccctgtatccggagctgtgctgggcactgaggggatgcaacaaaattaggagaggatccttgctcccaacgtctacttctcctacctcaacaggggtccagggtgcagtgaactcagttcttggcccttgggtgaggattcatggatgaatgaaagctagacctgatggggaggcattatgactaaataggcccagcctccttcccttccagctctgtcctaggagcataggcgggaaatctgagtagagtctgactgcagtttttgcttatgatttgtaaaagccgtcatggggtcaataagaaaataggggtgatggagggggagaagcccaggactgggagaatcgcacatgccccaggggttttcaccaaggattttcaagacaaactggagtaagaattaaagccccagaggatttaattatcctggtttgcaaaagagcctcccatgccagtaccgcccagccttggaggccggaatgctcatggcccctgtggtctgcttgtccttcagcccatgcccagcagatacctctctgactggagacgggctcaaagctggattagaaaggggagaggcacttgtgactttgtttgactctgtgactcacttcctcgctcacaccttgtttgaactactggactttcaactggctttccttaggtcaggcaagcagacagctccccactgaagaggtctgtacagtgacaacccgggccggcagcaaggacacagatgcagccacagtaaggctccatcaggactgggtcagtgatggcaacaggatggccaaggatggctctagaacactctgtccatgcgtcactccccccagttttatttttagctttggcttcagggagtgacagccatcacaaatagccacattctgctctactctccaacataccagattctacactgttgttatttcatgagacgtgaatgttgcagagagtggggggattctggttgttaaggaacttacactggggagctttactcttccgtgtcaacaatgtgactacatgttctccagattagccacacatgcaaacatcagtgtccttctagctttagccgagaaagaaaccagtcccagggaatgaatggtggtctccccactcccggcagcactttaggcagcccataagctatgcgagaatgtgaacgctcaccttgctccgtcacggttctgacctaccacataaacaggaagaagccagtgaccggaacagctctaggaataacaagtcagaatagaagtgtcctttatattaccagaaaatatgggcttggcctaagtcgctgtctcctaacctgccggggtcattccccaccaaacaccccatactaaggagccatgagccacctggacattcaccttttctttgaccatctggagtctggggcaacttaaggaggcaccacacagtggtgcaggcacatttccaagcgtaggtgtccctggcttttgtggccaaagctagtgttatggtcaacaacaggccagggtctgtggggcactgaccttgaaagtggcaaaatggaggtttcacaggctgtgcgggagcaggacggcttgcttcatctaacaatctcagtttcctttaaaaaaagaaagaaaggaaaagatttcataagcaggtgtcagtggacagtttaagtacttaaccatttctctttcttcttatggatgtgaactgtgctgtggataaatcatttgtatttcttgaatgttctctatgactaacagttattaagtcggttgtgtatatgtgtaactaatgtaactgccttttaaaatttcattacaataaaaatgactttgctctg

SEQ ID NO: 2450 - DNA, 6409 bp, Homo sapiens
  source 1..6409: mol_type = unassigned DNA
gcgggcgcctatcctctccgagcaagatggcaaccccggcggcggtcaaccctccggaaatggcttcagacatacctggatctgtgacgttgcccgttgcccccatggcggccaccggacaggtgaggatggcgggggccatgcctgcccgtggaggaaagcggcgttccggaatggacttcgatgatgaagatggtgaaggccccagtaaattttcaagagagaatcatagtgaaatcgaaaggcgcagacggaacaagatgactcagtacatcacggagctctccgacatggtccccacatgcagcgcactggctcggaagccagacaagctcaccatcctccgcatggccgtctcgcacatgaagtccatgaggggtacagggaacaagtccaccgatggcgcgtacaagccttccttcctcacagagcaggaactgaagcatctcatccttgaagcagctgatggatttctgtttgtggtggctgctgagacagggcgagtgatttatgtgtctgactccgtcacccctgttctgaaccagccccagtcagagtggtttgggagcacactgtatgaacaggtgcatcctgatgacgtggagaagctgagagagcaactgtgcacctcagaaaactcaatgacaggccggatcttggacctgaagactgggacggtcaagaaagaagggcagcagtcatccatgaggatgtgcatgggctcgcggcggtctttcatctgcaggatgaggtgtggaaatgctcctttggaccaccttcctctaaacagaataaccaccatgaggaaaaggttcaggaatggccttggccctgtgaaagaaggagaagcccaatatgctgtggtccactgtacaggatacatcaaggcctggccaccagcaggaatgaccatacctgaagaagacgctgatgtgggacaaggcagtaaatattgcctcgtggcaattgggagactccaggtgaccagctctcctgtatgcatggacatgaatgggatgtcggtgcccacagagttcttatcccggcataactccgatggaatcatcacatttgtggatccaagatgtatcagtgtgattggctaccaaccccaggatcttctgggaaaggacattttggaattctgccaccctgaggatcaaagccatctgcgtgagagcttccagcaggtggttaagctgaaaggccaagtcctgtcggtcatgtatcgatttcgcaccaagaaccgggagtggatgttgatccgcaccagcagcttcacattccagaatccctattctgatgagattgagtacatcatctgcaccaacaccaacgtcaagcaacttcagcaacagcaggcagaattggaagtgcaccagagagatggattgtcatcgtatgacttatcccaggtccccgtccccaacctaccagccggtgttcatgaggccgggaagtccgtggaaaaggcggatgcaatcttctcccaggaaagagatcctcggtttgctgaaatgtttgcaggaattagtgcatcggagaagaagatgatgagctcagcctctgcagcaggaacccagcagatctactcccaaggaagcccatttccctctggacactccgggaaggccttcagctcttcagtggttcatgtgcctggagtgaatgatattcagtcctcttcttccacgggccagaacatgtcccaaatctccggcagctaaaccagagtcaggtggcatggacagggagtcgtccgccctttccgggacagcaaatcccatctcagtccagcaagactcagtcatctccctttgggattggaacgagccacacctacccggcagacccctcttcctacagccccctctccagcccagctacctcctcgccaagtgggaatgcctactccagtcttgccaacaggactccagggttcgctgaaagtggacaaagtagcgggcagttccaagggcggccctcggaagtctggtcgcagtggcaaagccagcaccatggccagcagagcggtgagcagcactcccaccagcagcccggtcagactgaagtgttccaggacatgctgcccatgccaggagatccaacccaggggactggcaactataacatcgaagactttgccgacctgggcatgtttccaccgttttctgagtagctgcggccagagtgaggctcctgctgtacagtgccacccatactgtgatgtcgatgcccatgtgaatgaggcccaccctcgccctgcttgccctgccgcaggccccccaccagaagccatctcccccgctgtgtgtccccaggcgcatcattgctccactctcccctgcagccgcggctgctcggccactgaccaggggccctggcagacattaggggatcagttgtatttattgtattttatctgtgtgtgctcaggaggtgagcctagtgggtccttaagtttggttgtgaataatctcttgatagacaatttatacccatgaaagttcagccaatgcccagagtgaccaagcagcaccagcaggcctgcccaggatgctgaaagcagatttcttcttgatttcacttctgatggatgcatggggctctgggggaatgctgggaaaatgggcaagcagagtgcacagccctcgttctgccagctggagccaagaagcacagagacacagaggcgcctgcccctcagctccgctggtctgtctgtgcatccactgtgccgtgggacatatgtaatttgtgcagtgtgacatggacttgctgtcctaatggatgtgttgtgccttgtgtctgtcatgtgtggccagcgtgattgtatagaatccagagtatgtagagagccaaaatgtgtggccctgtccccaagctcagcaccaccggccatgaccagaggttgctcggcccagggtctgggagctgggctaacaggctgacacttcggcagggtcaccaggaggcacagctaggggcatgctcacatgggtaggtcagttctttggtccaagcctctggtgcagattcaagctcctcctcttagaggaagcagctccttcctcccacaggagccccaagggagcactcaccctcctcccaattggatctgaatagctgtgttcctgatcccacataagcatgtctcatccttgccccactggtgagaggaggaccttgtgcctgcccagagcctgcaggacagcacgccttgaggtcagaggcctggcccttctttacagatgtagatagcagggtaggacgcccaggccttctcacatgggcaccatgaaacactttcttccaggccacctgagccttcgttcttcagcccgactggaggaacagcagctctgggaggcacagagtgcaggtctcaggggcagaagacatgggttccagttctggttctgccacacacccaccggccttgaatttctctggtggtctcaagacaagaacaagagctgactctagaatcttctgcctggctgacctctgagcccatgatccctggcttgctgtgcttctcttggatttgaggagagtttatgaatccatccccctgttttcagggacctctgccttctcccacaccccttacactagtgaggactccttcggcctcttgtgtttccttccttttgtgaccattacgccccctccctgtttcttatcaccagcccatcagcccactgactcccatatggtagaaaaggtaccgtggctgctgcagggcacatggagggacctaccctctgggaaagcccttgtgtccctcccagagtccttcaggtaggccctcgcagatgctgcttgctcagaaacaacccgtgcatccctgcccatggattctgcaggacctagaagagtggcattggttctaggaacctgagagtggagtgaggccagcatgcaggaaggagtttggagagagtgtttgctgtgatccattgaaagctccacattaaaccccagccctgtctggccagggagatccatgtgctcaatgttgctgggggacctacaaaagtcaaacattgctcagtaaaatgcctttggctggtcgccagctgtgcatgactgcagttcctagactctaacttaaccccaactttgcagtttctagagctttttgtctgtaatggtgattgggtctccactgtagatgcatgcagtgttcactccaacctcagaggctttcttgcttctggggaaatggcaggtggttgaaaccctgcacatcctcccagggccagccccagaatgggcctttctctgcctgccctgcccttggggccacctctgcctccagcaggcttgagcttgccccaggccttgggcataattatttccccccaaaaaaggcacaaaaataggttttggatcaaagaagtgtttctcagtgaaatgaaaacagtctttttatagcctttagcttgtgagtttggaagtttggggggtcttatgtttgttttgcctcttctgtttcttggaggagagttgaggcttttcttaggtgcatacacagacccaggtgaacacgctgactgtgaacctgccctgtatccggagctgtgctgggcactgaggggatgcaacaaaattaggagaggatccttgctcccaacgtctacttctcctacctcaacaggggtccagggtgcagtgaactcagttcttggcccttgggtgaggattcatggatgaatgaaagctagacctgatggggaggcattatgactaaataggcccagcctccttcccttccagctctgtcctaggagcataggcgggaaatctgagtagagtctgactgcagtttttgcttatgatttgtaaaagccgtcatggggtcaataagaaaataggggtgatggagggggagaagcccaggactgggagaatcgcacatgccccaggggttttcaccaaggattttcaagacaaactggagtaagaattaaagccccagaggatttaattatcctggtttgcaaaagagcctcccatgccagtaccgcccagccttggaggccggaatgctcatggcccctgtggtctgcttgtccttcagcccatgcccagcagatacctctctgactggagacgggctcaaagctggattagaaaggggagaggcacttgtgactttgtttgactctgtgactcacttcctcgctcacaccttgtttgaactactggactttcaactggctttccttaggtcaggcaagcagacagctccccactgaagaggtctgtacagtgacaacccgggccggcagcaaggacacagatgcagccacagtaaggctccatcaggactgggtcagtgatggcaacaggatggccaaggatggctctagaacactctgtccatgcgtcactccccccagttttatttttagctttggcttcagggagtgacagccatcacaaatagccacattctgctctactctccaacataccagattctacactgttgttatttcatgagacgtgaatgttgcagagagtggggggattctggttgttaaggaacttacactggggagctttactcttccgtgtcaacaatgtgactacatgttctccagattagccacacatgcaaacatcagtgtccttctagctttagccgagaaagaaaccagtcccagggaatgaatggtggtctccccactcccggcagcactttaggcagcccataagctatgcgagaatgtgaacgctcaccttgctccgtcacggttctgacctaccacataaacaggaagaagccagtgaccggaacagctctaggaataacaagtcagaatagaagtgtcctttatattaccagaaaatatgggcttggcctaagtcgctgtctcctaacctgccggggtcattccccaccaaacaccccatactaaggagccatgagccacctggacattcaccttttctttgaccatctggagtctggggcaacttaaggaggcaccacacagtggtgcaggcacatttccaagcgtaggtgtccctggcttttgtggccaaagctagtgttatggtcaacaacaggccagggtctgtggggcactgaccttgaaagtggcaaaatggaggtttcacaggctgtgcgggagcaggacggcttgcttcatctaacaatctcagtttcctttaaaaaaagaaagaaaggaaaagatttcataagcaggtgtcagtggacagtttaagtacttaaccatttctctttcttcttatggatgtgaactgtgctgtggataaatcatttgtatttcttgaatgttctctatgactaacagttattaagtcggttgtgtatatgtgtaactaatgtaactgccttttaaaatttcattacaataaaaatgactttgctctg

SEQ ID NO: 2451 - DNA, 5661 bp, Homo sapiens
  source 1..5661: mol_type = unassigned DNA
ggcacgtggactccctttaatccagtgactgtcaggtcgatcatatgccgaggacgatgatcccgccgggggagtgcacgtacgcgggccggaagcggaggaggcccctgcagaaacagaggcccgccgtgggggcagagaagtccaacccctccaagcgacaccgggaccgcctcaacgccgagttggaccacctggccagcctgctgccgttcccgcctgacatcatctccaagctggacaagctttctgtcctgcgcctcagtgtcagttacctccgggtgaagagcttcttccaagtcgtgcaggagcagagctcacggcagcctgcggccggcgccccctcgcccggagacagctgtcctcttgcagggtctgccgtgctggagggaaggctgctgttggagtctcttaatggctttgctctggtcgtgagtgcagaagggacgatattttatgcatcagcaacgatcgtggactatctgggcttccatcagacggatgtaatgcaccagaacatttatgactacatccacgtggacgaccgccaggacttctgccggcagctccactgggccatggaccctccccaggtggtgtttgggcagcccccgcccttggagacaggagatgatgctatcctggggaggctgctcagggcccaggagtggggcacaggcacgcccaccgagtactcggccttcctgacccgctgcttcatctgccgtgtgcgctgcctgctggacagcacctcgggcttcctggcccgggggtcacaggcttggcagctgcggctctgctgtcccgagccactcatgacgatgcagtttcaaggaaaactaaaattcctgtttggacagaagaagaaggcgccgtcaggagccatgctcccgccgcggctgtcgctgttctgcattgcggcacccgttctcctcccctccgcagcggagatgaaaatgaggagcgcgctcctgagggcaaaacccagagcagacaccgcagccaccgcggatgcaaaagtaaaagccaccaccagtctgtgcgaatcggaactgcatggaaaacccaattactcagcaggaaggagcagcagagagagcggcgttttggtgctcagggaacagactgacgctggccgatgggcacaggttcccgccagggccccatgcctgtgcctccggggtggccctgaccttgtccttgaccccaaggggggctcaggggacagggaggaggagcagcacaggatgctgagcagggcctctggagtgacagggcggagggagactccaggacccacaaagcccctgccctggacagcgggaaagcacagtgaggatggtgccaggccgaggctgcagcccagcaagaatgacccgccctccctgcgccccatgccccgcggctcctgcctgccctgcccgtgtgtccagggcactttcaggaactcgcccatctctcacccgccgagcccgtcccccagtgcctactccagccggaccagcagacccatgcgggatgtcggtgaggaccaggtgcaccctcccctctgccactttccccagaggagcctgcagcaccagctccctcagcctggagctcagcgttttgccacgaggggctatcccatggaggacatgaagctgcaaggtgtaccgatgcctccgggggacctgtgtggtccgacgctgctgctagatgtgtccatcaagatggagaaggactctgggtgtgagggtgctgcagacggctgtgtgcccagccaggtgtggctgggggccagtgacaggagccacccagccaccttccctaccaggatgcacctgaaaacagagccagactctcggcaacaggtgtacatctcgcacctggggcacggcgtgcggggggctcagccccatgggagggccactgctgggcgcagcagggagctgacccctttccaccctgcacactgtgcctgcctggagcccacagacggccttccccagtcggagcctccccaccagctctgtgcacggggccgaggtgaacagtcctgcacctgcagagctgctgaggccgcccctgtggtcaagcgggagcccttggactcaccccagtgggctactcacagccagggaatggtgcccgggatgttgcccaaaagtgccttggccacgctggtcccgccccaagcttcggggtgcacattcctgccatagcgcagtgaccaccatccaagctcagatctgtgtgtctacgctcagatgcgtcggtggctgggctgccctgctcctggtcaggccggagcccgtcctaagacacacgctttgcagagctgtgcatgcgcagtctgctagtgtgtgtgtgcagcatacgcaggagcctatcctgaattttgtaaaatatcccaacagttcttaaatgaaaactggccttaagtctattcaagcatgacagcatttctctttgaggaattaaaatctttaggaaagtgatcatggctggacagcttcatgccccagaggcagcgagcacccgtcccatggctgccaagtccacagtcggggatgaagcagtcgggtgatgctcccaagtccgcagtcggggatgaagcggtcgggtgatgctcccaagtccgcagtcggggatgaagcggtcgggtgacacacctagctcagccctcccaggccacctgcagctcccagcctgtgctgtgcaggcagggtcagcccatcgccacagtgcactgtagaggccagcacacggcaaattagaaatacaacacgcggagaaaggggtccgtgagcccactcatagaggaatctagaacgttccaggcagcagaggctggcagcgtgggtcccacactgccccacaccgtgcggcaggtgctccatggcgccatgacagagtctgaggccagacctggactggaattgacagcataacccctgttccttctggacatctcccgagttctcagtgggtctctgcggacggttcttcctaatctgcctcttggtacatcacgtaatacagagttcacagactccgggtttggaagtacagagaaacacacaacgtagagagaagacacaggaaactgcgctgcctgtgggggtttctctctggctggctgtacagttcactcaaatgagggttcccattgccatcctaggagaataattagggacaagacagacaagtattaatagcattaaaacagttgtaaaggcgatattttctgagagtaggaaatttggatacaaaagcataagtcagaaagtgaaggtcaccaatccaccaacccgagaacctacagctgatggtgcatttcaggcttcttccacggtctggcctggaaccccacccggctggtgcaggcatcagatcagggtgtagaagtcaccccaagcaagaggaagccaggcagtgaggccctggggtgtggctgcagctgggcccacctgtgcgggggtgggaaggccccatcctcagggagagggcatcggcgccctgacgtcagctccactgggagtggcaggagctgtgggagcccatgggtgagggacccaccaccccgctgcactgtgcattgtgcctcccgtgtggacgccctctctgttgttggcccgcgggtgagggacccaccacccctagggacccaccaccccgccgcactgtgcattctgcctcctgtgtggacgccctctctgttgtcagtggctttgaggtgtcagtgcttacttagatgctggtttaatgctggacccatttgttaaacgcaccttcactttgtcaaaacccaggtttggttggcaggactgggtcttctgcccaatgccaggtgcctgcgcctctcagtggcctggttcttggacagtttgcccccatgtggcagggatagggataaggatctcctctcagtactggaagagaacagccaaccatctgagcccagagtcacagatccatcgtggccccctatgacccccaagccctaccgagggggcactcactctctgcttagccagggggcgtctttcaaaaggtgacctccatgctgtgctgtcgtgggtgtgagacgtgctcatggccttccactgccatctctcccttatctgatgcctaaagtcacgatggggacagagctacccaggggccagccatggggtgaccagccacctgagggtcagtcacctgtggagagcaggcacctgtgaagaccaggcacctgaggactggcgcctacttcccactttggccctacactggcacagagcccctctttattcatttctcatgctgagcatggcacacttctggcctctgggcatttatggatttaagaccaggatggtatttcagaagcttcccacttccttcctattctaaccgagtgcccagctcctttgctgatcatggaaagacccttaataattaggcctgcaggccaggcgcagtggctcatgcctataatcccagcactttaggaggtcaaggtaggaggatcgcttaagcccaggagttcaagaccagcctgggcaacacaggaagaatgtgtctctacaaaaaataattaaaaatcagatctgctgtatccctgaaaaagtctcaatcaacatgcatgttccactcttggagttccctgttctgagggccagccacgtcctgtgtcctggagcttagccctcagcagctcccttcagcctgggcgccgcctgggtcccaaacgtggcagctgctcttccagtctcggggccgaggagggcagggagctcagtgactgagagtcttgtgtatcacatgtcttgagtgtcctggagccaacggctgtcactgggaaaaacaccaggccccaaagatcgaatcagagacgtggctgcgtgtttgcgattgtagccaggcccttcagtgtcatcaaaggagcactggggcctccttaagcacagacggcagcccctgcccaggaggcttcttcaccacgtcctgccctgcagcctcccagacctttagatgcgcccctgcccaaggccctcctggtgacaggtgccagattgagtggtgggttgctgccaggcaggccacgctgtgttgacgctgcactcagcacgtgggtgttggctctgccggttttgtggtgtggggaccctacaggaggctgcggccctgagagcctgggatcagcgaggtgtccgacatcccttcctcaacggcaacaaaaactccccaagtcagcactttggttattttatagccacaaccctcttggaaaacagtggggaagactatggaacatagaaagtgtggatgtatcacttctctctaaaatgtcattgttagcactaattacaggttcatgtttttctgtgtatgtagcttttccctatatagctgaaaaagtattaaagtcaaatataaggtgggaatgggatggaagggaggagatcaatacaacttatatttttgcagtttctactggaagaaaaaagttttcaatacctagaccaacttgttgaatttttaaaacttatgcactataaatgcaactttctctactgctttctcagtgcctttaggaagctttcaaatttttttgtactgtggtttgtattaaatttgcaatattgatgtaaaatacatgacatgctagtacatgtttaacaaaaatttaaa

SEQ ID NO: 2452 - DNA, 2173 bp, Homo sapiens
  source 1..2173: mol_type = unassigned DNA
ggcacgtggactccctttaatccagtgactgtcaggtcgatcatatgccgaggacgatgatcccgccgggggagtgcacgtacgcgggccggaagcggaggaggcccctgcagaaacagaggcccgccgtgggggcagagaagtccaacccctccaagcgacaccgggaccgcctcaacgccgagttggaccacctggccagcctgctgccgttcccgcctgacatcatctccaagctggacaagctttctgtcctgcgcctcagtgtcagttacctccgggtgaagagcttcttccaagtcgtgcaggagcagagctcacggcagcctgcggccggcgccccctcgcccggagacagctgtcctcttgcagggtctgccgtgctggagggaaggctgctgttggagtctcttaatggctttgctctggtcgtgagtgcagaagggacgatattttatgcatcagcaacgatcgtggactatctgggcttccatcagacggatgtaatgcaccagaacatttatgactacatccacgtggacgaccgccaggacttctgccggcagctccactgggccatggaccctccccaggtggtgtttgggcagcccccgcccttggagacaggagatgatgctatcctggggaggctgctcagggcccaggagtggggcacaggcacgcccaccgagtactcggccttcctgacccgctgcttcatctgccgtgtgcgctgcctgctggacagcacctcgggcttcctgacgatgcagtttcaaggaaaactaaaattcctgtttggacagaagaagaaggcgccgtcaggagccatgctcccgccgcggctgtcgctgttctgcattgcggcacccgttctcctcccctccgcagcggagatgaaaatgaggagcgcgctcctgagggcaaaacccagagcagacaccgcagccaccgcggatgcaaaagtaaaagccaccaccagtctgtgcgaatcggaactgcatggaaaacccaattactcagcaggaaggagcagcagagagagcggcgttttggtgctcagggaacagactgacgctggccgatgggcacaggttcccgccagggccccatgcctgtgcctccggggtggccctgaccttgtccttgaccccaaggggggctcaggggacagggaggaggagcagcacaggatgctgagcagggcctctggagtgacagggcggagggagactccaggacccacaaagcccctgccctggacagcgggaaagcacagtgaggatggtgccaggccgaggctgcagcccagcaagaatgacccgccctccctgcgccccatgccccgcggctcctgcctgccctgcccgtgtgtccagggcactttcaggaactcgcccatctctcacccgccgagcccgtcccccagtgcctactccagccggaccagcagacccatgcgggatgtcggtgaggaccaggtgcaccctcccctctgccactttccccagaggagcctgcagcaccagctccctcagcctggagctcagcgttttgccacgaggggctatcccatggaggacatgaagctgcaaggtgtaccgatgcctccgggggacctgtgtggtccgacgctgctgctagatgtgtccatcaagatggagaaggactctgggtgtgagggtgctgcagacggctgtgtgcccagccaggtgtggctgggggccagtgacaggagccacccagccaccttccctaccaggatgcacctgaaaacagagccagactctcggcaacaggtgtacatctcgcacctggggcacggcgtgcggggggctcagccccatgggagggccactgctgggcgcagcagggagctgacccctttccaccctgcacactgtgcctgcctggagcccacagacggccttccccagtcggagcctccccaccagctctgtgcacggggccgaggtgaacagtcctgcacctgcagagctgctgaggccgcccctgtggtcaagcgggagcccttggactcaccccagtgggctactcacagccagggaatggtgcccgggatgttgcccaaaagtgccttggccacgctggtcccgccccaagcttcggggtgcacattcctgccatagcgcagtgaccaccatccaagctc

SEQ ID NO: 2453 - DNA, 2050 bp, Homo sapiens
  source 1..2050: mol_type = unassigned DNA
acaggtcacggggcggggccgaggcggaagcgcccgcagcccggtaccggctcctcctgggctccctctagcgccttccccccggcccgactccgctggtcagcgccaagtgacttacgcccccgaccctgagcccggaccgctaggcgaggaggatcagatctccgctcgagaatctgaaggtgccctggtcctggaggagttccgtcccagcccgcggtctcccggtactgtcgggccccggccctctggagcttcaggaggcggccgtcagggtcggggagtatttgggtccggggtctcagggaagggcggcgcctgggtctgcggtatcggaaagagcctgctggagccaagtagccctccctctcttgggacagacccctcggtcccatgtccatgggggcaccgcggtccctcctcctggccctggctgctggcctggccgttgcccgtccgcccaacatcgtgctgatctttgccgacgacctcggctatggggacctgggctgctatgggcaccccagctctaccactcccaacctggaccagctggcggcgggagggctgcggttcacagacttctacgtgcctgtgtctctgtgcacaccctctagggccgccctcctgaccggccggctcccggttcggatgggcatgtaccctggcgtcctggtgcccagctcccgggggggcctgcccctggaggaggtgaccgtggccgaagtcctggctgcccgaggctacctcacaggaatggccggcaagtggcaccttggggtggggcctgagggggccttcctgcccccccatcagggcttccatcgatttctaggcatcccgtactcccacgaccagggcccctgccagaacctgacctgcttcccgccggccactccttgcgacggtggctgtgaccagggcctggtccccatcccactgttggccaacctgtccgtggaggcgcagcccccctggctgcccggactagaggcccgctacatggctttcgcccatgacctcatggccgacgcccagcgccaggatcgccccttcttcctgtactatgcctctcaccacacccactaccctcagttcagtgggcagagctttgcagagcgttcaggccgcgggccatttggggactccctgatggagctggatgcagctgtggggaccctgatgacagccataggggacctggggctgcttgaagagacgctggtcatcttcactgcagacaatggacctgagaccatgcgtatgtcccgaggcggctgctccggtctcttgcggtgtggaaagggaacgacctacgagggcggtgtccgagagcctgccttggccttctggccaggtcatatcgctcccggcgtgacccacgagctggccagctccctggacctgctgcctaccctggcagccctggctggggccccactgcccaatgtcaccttggatggctttgacctcagccccctgctgctgggcacaggcaagagccctcggcagtctctcttcttctacccgtcctacccagacgaggtccgtggggtttttgctgtgcggactggaaagtacaaggctcacttcttcacccagggctctgcccacagtgataccactgcagaccctgcctgccacgcctccagctctctgactgctcatgagcccccgctgctctatgacctgtccaaggaccctggtgagaactacaacctgctggggggtgtggccggggccaccccagaggtgctgcaagccctgaaacagcttcagctgctcaaggcccagttagacgcagctgtgaccttcggccccagccaggtggcccggggcgaggaccccgccctgcagatctgctgtcatcctggctgcaccccccgcccagcttgctgccattgcccagatccccatgcctgagggcccctcggctggcctgggcatgtgatggctcctcactgggagcctgtgggggaggctcaggtgtctggagggggtttgtgcctgataacgtaataacaccagtggagacttgcagatgtgacaa

SEQ ID NO: 2454 - DNA, 1895 bp, Homo sapiens
  source 1..1895: mol_type = unassigned DNA
aggtcacggggcggggccgaggcggaagcgcccgcagcccggtaccggctcctcctgggctccctctagcgccttccccccggcccgactccgctggtcagcgccaagtgacttacgcccccgaccctgagcccggaccgctaggcgaggaggatcagatctccgctcgagaatctgaaggtgccctggtcctggaggagttccgtcccagcccgcggtctcccgacccctcggtcccatgtccatgggggcaccgcggtccctcctcctggccctggctgctggcctggccgttgcccgtccgcccaacatcgtgctgatctttgccgacgacctcggctatggggacctgggctgctatgggcaccccagctctaccactcccaacctggaccagctggcggcgggagggctgcggttcacagacttctacgtgcctgtgtctctgtgcacaccctctagggccgccctcctgaccggccggctcccggttcggatgggcatgtaccctggcgtcctggtgcccagctcccgggggggcctgcccctggaggaggtgaccgtggccgaagtcctggctgcccgaggctacctcacaggaatggccggcaagtggcaccttggggtggggcctgagggggccttcctgcccccccatcagggcttccatcgatttctaggcatcccgtactcccacgaccagggcccctgccagaacctgacctgcttcccgccggccactccttgcgacggtggctgtgaccagggcctggtccccatcccactgttggccaacctgtccgtggaggcgcagcccccctggctgcccggactagaggcccgctacatggctttcgcccatgacctcatggccgacgcccagcgccaggatcgccccttcttcctgtactatgcctctcaccacacccactaccctcagttcagtgggcagagctttgcagagcgttcaggccgcgggccatttggggactccctgatggagctggatgcagctgtggggaccctgatgacagccataggggacctggggctgcttgaagagacgctggtcatcttcactgcagacaatggacctgagaccatgcgtatgtcccgaggcggctgctccggtctcttgcggtgtggaaagggaacgacctacgagggcggtgtccgagagcctgccttggccttctggccaggtcatatcgctcccggcgtgacccacgagctggccagctccctggacctgctgcctaccctggcagccctggctggggccccactgcccaatgtcaccttggatggctttgacctcagccccctgctgctgggcacaggcaagagccctcggcagtctctcttcttctacccgtcctacccagacgaggtccgtggggtttttgctgtgcggactggaaagtacaaggctcacttcttcacccagggctctgcccacagtgataccactgcagaccctgcctgccacgcctccagctctctgactgctcatgagcccccgctgctctatgacctgtccaaggaccctggtgagaactacaacctgctggggggtgtggccggggccaccccagaggtgctgcaagccctgaaacagcttcagctgctcaaggcccagttagacgcagctgtgaccttcggccccagccaggtggcccggggcgaggaccccgccctgcagatctgctgtcatcctggctgcaccccccgcccagcttgctgccattgcccagatccccatgcctgagggcccctcggctggcctgggcatgtgatggctcctcactgggagcctgtgggggaggctcaggtgtctggagggggtttgtgcctgataacgtaataacaccagtggagacttgcagatgtgacaa

SEQ ID NO: 2455 - DNA, 1824 bp, Homo sapiens
  source 1..1824: mol_type = unassigned DNA
cggggccgaggcggaagcgcccgcagcccggtaccggctcctcctgggctccctctagcgccttccccccggcccgactccgctggtcagcgccaagtgacttacgcccccgaccctgagcccggaccgctaggcgaggaggatcagatctccgctcgagaatctgaagacccctcggtcccatgtccatgggggcaccgcggtccctcctcctggccctggctgctggcctggccgttgcccgtccgcccaacatcgtgctgatctttgccgacgacctcggctatggggacctgggctgctatgggcaccccagctctaccactcccaacctggaccagctggcggcgggagggctgcggttcacagacttctacgtgcctgtgtctctgtgcacaccctctagggccgccctcctgaccggccggctcccggttcggatgggcatgtaccctggcgtcctggtgcccagctcccgggggggcctgcccctggaggaggtgaccgtggccgaagtcctggctgcccgaggctacctcacaggaatggccggcaagtggcaccttggggtggggcctgagggggccttcctgcccccccatcagggcttccatcgatttctaggcatcccgtactcccacgaccagggcccctgccagaacctgacctgcttcccgccggccactccttgcgacggtggctgtgaccagggcctggtccccatcccactgttggccaacctgtccgtggaggcgcagcccccctggctgcccggactagaggcccgctacatggctttcgcccatgacctcatggccgacgcccagcgccaggatcgccccttcttcctgtactatgcctctcaccacacccactaccctcagttcagtgggcagagctttgcagagcgttcaggccgcgggccatttggggactccctgatggagctggatgcagctgtggggaccctgatgacagccataggggacctggggctgcttgaagagacgctggtcatcttcactgcagacaatggacctgagaccatgcgtatgtcccgaggcggctgctccggtctcttgcggtgtggaaagggaacgacctacgagggcggtgtccgagagcctgccttggccttctggccaggtcatatcgctcccggcgtgacccacgagctggccagctccctggacctgctgcctaccctggcagccctggctggggccccactgcccaatgtcaccttggatggctttgacctcagccccctgctgctgggcacaggcaagagccctcggcagtctctcttcttctacccgtcctacccagacgaggtccgtggggtttttgctgtgcggactggaaagtacaaggctcacttcttcacccagggctctgcccacagtgataccactgcagaccctgcctgccacgcctccagctctctgactgctcatgagcccccgctgctctatgacctgtccaaggaccctggtgagaactacaacctgctggggggtgtggccggggccaccccagaggtgctgcaagccctgaaacagcttcagctgctcaaggcccagttagacgcagctgtgaccttcggccccagccaggtggcccggggcgaggaccccgccctgcagatctgctgtcatcctggctgcaccccccgcccagcttgctgccattgcccagatccccatgcctgagggcccctcggctggcctgggcatgtgatggctcctcactgggagcctgtgggggaggctcaggtgtctggagggggtttgtgcctgataacgtaataacaccagtggagac

SEQ ID NO: 2456 - DNA, 1918 bp, Homo sapiens
  source 1..1918: mol_type = unassigned DNA
gccgaggcggaagcgcccgcagcccggtaccggctcctcctgggctccctctagcgccttccccccggcccgactccgctggtcagcgccaagtgacttacgcccccgaccctgagcccggaccgctaggcgaggaggatcagatctccgctcgagaatctgaaggtgccctggtcctggaggagttccgtcccagcccgcggtctcccggtactgtcgggccccggccctctggagcttcaggaggcggccgtcaggacccctcggtcccatgtccatgggggcaccgcggtccctcctcctggccctggctgctggcctggccgttgcccgtccgcccaacatcgtgctgatctttgccgacgacctcggctatggggacctgggctgctatgggcaccccagctctaccactcccaacctggaccagctggcggcgggagggctgcggttcacagacttctacgtgcctgtgtctctgtgcacaccctctagggccgccctcctgaccggccggctcccggttcggatgggcatgtaccctggcgtcctggtgcccagctcccgggggggcctgcccctggaggaggtgaccgtggccgaagtcctggctgcccgaggctacctcacaggaatggccggcaagtggcaccttggggtggggcctgagggggccttcctgcccccccatcagggcttccatcgatttctaggcatcccgtactcccacgaccagggcccctgccagaacctgacctgcttcccgccggccactccttgcgacggtggctgtgaccagggcctggtccccatcccactgttggccaacctgtccgtggaggcgcagcccccctggctgcccggactagaggcccgctacatggctttcgcccatgacctcatggccgacgcccagcgccaggatcgccccttcttcctgtactatgcctctcaccacacccactaccctcagttcagtgggcagagctttgcagagcgttcaggccgcgggccatttggggactccctgatggagctggatgcagctgtggggaccctgatgacagccataggggacctggggctgcttgaagagacgctggtcatcttcactgcagacaatggacctgagaccatgcgtatgtcccgaggcggctgctccggtctcttgcggtgtggaaagggaacgacctacgagggcggtgtccgagagcctgccttggccttctggccaggtcatatcgctcccggcgtgacccacgagctggccagctccctggacctgctgcctaccctggcagccctggctggggccccactgcccaatgtcaccttggatggctttgacctcagccccctgctgctgggcacaggcaagagccctcggcagtctctcttcttctacccgtcctacccagacgaggtccgtggggtttttgctgtgcggactggaaagtacaaggctcacttcttcacccagggctctgcccacagtgataccactgcagaccctgcctgccacgcctccagctctctgactgctcatgagcccccgctgctctatgacctgtccaaggaccctggtgagaactacaacctgctggggggtgtggccggggccaccccagaggtgctgcaagccctgaaacagcttcagctgctcaaggcccagttagacgcagctgtgaccttcggccccagccaggtggcccggggcgaggaccccgccctgcagatctgctgtcatcctggctgcaccccccgcccagcttgctgccattgcccagatccccatgcctgagggcccctcggctggcctgggcatgtgatggctcctcactgggagcctgtgggggaggctcaggtgtctggagggggtttgtgcctgataacgtaataacaccagtggagacttgca

SEQ ID NO: 2457 - DNA, 1650 bp, Homo sapiens
  source 1..1650: mol_type = unassigned DNA
cacaggtcacggggcggggccgaggcggaagcgcccgcagcccggtaccggctcctcctgggctccctctagcgccttccccccggcccgactccgctggtcagcgccaagtgacttacgcccccgaccctgagcccggaccgctaggcgaggaggatcagatctccgctcgagaatctgaaggtgccctggtcctggaggagttccgtcccagcccgcggtctcccgggccgccctcctgaccggccggctcccggttcggatgggcatgtaccctggcgtcctggtgcccagctcccgggggggcctgcccctggaggaggtgaccgtggccgaagtcctggctgcccgaggctacctcacaggaatggccggcaagtggcaccttggggtggggcctgagggggccttcctgcccccccatcagggcttccatcgatttctaggcatcccgtactcccacgaccagggcccctgccagaacctgacctgcttcccgccggccactccttgcgacggtggctgtgaccagggcctggtccccatcccactgttggccaacctgtccgtggaggcgcagcccccctggctgcccggactagaggcccgctacatggctttcgcccatgacctcatggccgacgcccagcgccaggatcgccccttcttcctgtactatgcctctcaccacacccactaccctcagttcagtgggcagagctttgcagagcgttcaggccgcgggccatttggggactccctgatggagctggatgcagctgtggggaccctgatgacagccataggggacctggggctgcttgaagagacgctggtcatcttcactgcagacaatggacctgagaccatgcgtatgtcccgaggcggctgctccggtctcttgcggtgtggaaagggaacgacctacgagggcggtgtccgagagcctgccttggccttctggccaggtcatatcgctcccggcgtgacccacgagctggccagctccctggacctgctgcctaccctggcagccctggctggggccccactgcccaatgtcaccttggatggctttgacctcagccccctgctgctgggcacaggcaagagccctcggcagtctctcttcttctacccgtcctacccagacgaggtccgtggggtttttgctgtgcggactggaaagtacaaggctcacttcttcacccagggctctgcccacagtgataccactgcagaccctgcctgccacgcctccagctctctgactgctcatgagcccccgctgctctatgacctgtccaaggaccctggtgagaactacaacctgctggggggtgtggccggggccaccccagaggtgctgcaagccctgaaacagcttcagctgctcaaggcccagttagacgcagctgtgaccttcggccccagccaggtggcccggggcgaggaccccgccctgcagatctgctgtcatcctggctgcaccccccgcccagcttgctgccattgcccagatccccatgcctgagggcccctcggctggcctgggcatgtgatggctcctcactgggagcctgtgggggaggctcaggtgtctggagggggtttgtgcctgataacgtaataacaccagtggagacttgc

SEQ ID NO: 2458 - DNA, 2053 bp, Homo sapiens
  source 1..2053: mol_type = unassigned DNA
aagggtcacaggtcacggggcggggccgaggcggaagcgcccgcagcccggtaccggctcctcctgggctccctctagcgccttccccccggcccgactccgctggtcagcgccaagtgacttacgcccccgaccctgagcccggaccgctaggcgaggaggatcagatctccgctcgagaatctgaaggtgccctggtcctggaggagttccgtcccagcccgcggtctcccggtactgtcgggccccggccctctggagcttcaggaggcggccgtcagggtcggggagtatttgggtccggggtctcagggaagggcggcgcctgggtctgcggtatcggaaagagcctgctggagccaagtagccctccctctcttgggacagacccctcggtcccatgtccatgggggcaccgcggtccctcctcctggccctggctgctggcctggccgttgcccgtccgcccaacatcgtgctgatctttgccgacgacctcggctatggggacctgggctgctatgggcaccccagctctaccactcccaacctggaccagctggcggcgggagggctgcggttcacagacttctacgtgcctgtgtctctgtgcacaccctctagggccgccctcctgaccggccggctcccggttcggatgggcatgtaccctggcgtcctggtgcccagctcccgggggggcctgcccctggaggaggtgaccgtggccgaagtcctggctgcccgaggctacctcacaggaatggccggcaagtggcaccttggggtggggcctgagggggccttcctgcccccccatcagggcttccatcgatttctaggcatcccgtactcccacgaccagggcccctgccagaacctgacctgcttcccgccggccactccttgcgacggtggctgtgaccagggcctggtccccatcccactgttggccaacctgtccgtggaggcgcagcccccctggctgcccggactagaggcccgctacatggctttcgcccatgacctcatggccgacgcccagcgccaggatcgccccttcttcctgtactatgcctctcaccacacccactaccctcagttcagtgggcagagctttgcagagcgttcaggccgcgggccatttggggactccctgatggagctggatgcagctgtggggaccctgatgacagccataggggacctggggctgcttgaagagacgctggtcatcttcactgcagacaatggacctgagaccatgcgtatgtcccgaggcggctgctccggtctcttgcggtgtggaaagggaacgacctacgagggcggtgtccgagagcctgccttggccttctggccaggtcatatcgctcccggcgtgacccacgagctggccagctccctggacctgctgcctaccctggcagccctggctggggccccactgcccaatgtcaccttggatggctttgacctcagccccctgctgctgggcacaggcaagagccctcggcagtctctcttcttctacccgtcctacccagacgaggtccgtggggtttttgctgtgcggactggaaagtacaaggctcacttcttcacccagggctctgcccacagtgataccactgcagaccctgcctgccacgcctccagctctctgactgctcatgagcccccgctgctctatgacctgtccaaggaccctggtgagaactacaacctgctggggggtgtggccggggccaccccagaggtgctgcaagccctgaaacagcttcagctgctcaaggcccagttagacgcagctgtgaccttcggccccagccaggtggcccggggcgaggaccccgccctgcagatctgctgtcatcctggctgcaccccccgcccagcttgctgccattgcccagatccccatgcctgagggcccctcggctggcctgggcatgtgatggctcctcactgggagcctgtgggggaggctcaggtgtctggagggggtttgtgcctgataacgtaataacaccagtggagacttgcagatgtg

SEQ ID NO: 2459 - DNA, 1948 bp, Homo sapiens
  source 1..1948: mol_type = unassigned DNA
aagggtcacaggtcacggggcggggccgaggcggaagcgcccgcagcccggtaccggctcctcctgggctccctctagcgccttccccccggcccgactccgctggtcagcgccaagtgacttacgcccccgaccctgagcccggaccgctaggcgaggaggatcagatctccgctcgagaatctgaaggtgccctggtcctggaggagttccgtcccagcccgcggtctcccggtactgtcgggccccggccctctggagcttcaggaggcggccgtcaggacccctcggtcccatgtccatgggggcaccgcggtccctcctcctggccctggctgctggcctggccgttgcccgtccgcccaacatcgtgctgatctttgccgacgacctcggctatggggacctgggctgctatgggcaccccagctctaccactcccaacctggaccagctggcggcgggagggctgcggttcacagacttctacgtgcctgtgtctctgtgcacaccctctagggccgccctcctgaccggccggctcccggttcggatgggcatgtaccctggcgtcctggtgcccagctcccgggggggcctgcccctggaggaggtgaccgtggccgaagtcctggctgcccgaggctacctcacaggaatggccggcaagtggcaccttggggtggggcctgagggggccttcctgcccccccatcagggcttccatcgatttctaggcatcccgtactcccacgaccagggcccctgccagaacctgacctgcttcccgccggccactccttgcgacggtggctgtgaccagggcctggtccccatcccactgttggccaacctgtccgtggaggcgcagcccccctggctgcccggactagaggcccgctacatggctttcgcccatgacctcatggccgacgcccagcgccaggatcgccccttcttcctgtactatgcctctcaccacacccactaccctcagttcagtgggcagagctttgcagagcgttcaggccgcgggccatttggggactccctgatggagctggatgcagctgtggggaccctgatgacagccataggggacctggggctgcttgaagagacgctggtcatcttcactgcagacaatggacctgagaccatgcgtatgtcccgaggcggctgctccggtctcttgcggtgtggaaagggaacgacctacgagggcggtgtccgagagcctgccttggccttctggccaggtcatatcgctcccggcgtgacccacgagctggccagctccctggacctgctgcctaccctggcagccctggctggggccccactgcccaatgtcaccttggatggctttgacctcagccccctgctgctgggcacaggcaagagccctcggcagtctctcttcttctacccgtcctacccagacgaggtccgtggggtttttgctgtgcggactggaaagtacaaggctcacttcttcacccagggctctgcccacagtgataccactgcagaccctgcctgccacgcctccagctctctgactgctcatgagcccccgctgctctatgacctgtccaaggaccctggtgagaactacaacctgctggggggtgtggccggggccaccccagaggtgctgcaagccctgaaacagcttcagctgctcaaggcccagttagacgcagctgtgaccttcggccccagccaggtggcccggggcgaggaccccgccctgcagatctgctgtcatcctggctgcaccccccgcccagcttgctgccattgcccagatccccatgcctgagggcccctcggctggcctgggcatgtgatggctcctcactgggagcctgtgggggaggctcaggtgtctggagggggtttgtgcctgataacgtaataacaccagtggagacttgcagatgtg

SEQ ID NO: 2460 - DNA, 5159 bp, Homo sapiens
  source 1..5159: mol_type = unassigned DNA
ggaagccttggcactagcggcgcccgggcgcggagtgcgcagggcaaggtcctgcgctctgggccagcgctcggccatgcgatccgccgcgcggaggggacgcgccgcgcccgccgccagggactctttgccggtgctactgtttttatgcttgcttctgaagacgtgtgaacctaaaactgcaaatgcctttaaaccaaatatcctactgatcatggcggatgatctaggcactggggatctcggttgctacgggaacaatacactgagaacgccgaatattgaccagcttgcagaggaaggtgtgaggctcactcagcacctggcggccgccccgctctgcaccccaagccgagctgcattcctcacagggagacattccttcagatcaggcatggacgccagcaatggataccgggcccttcagtggaacgcaggctcaggtggactccctgagaacgaaaccacttttgcaagaatcttgcagcagcatggctatgcaaccggcctcataggaaaatggcaccagggtgtgaattgtgcatcccgcggggatcactgccaccaccccctgaaccacggatttgactatttctacggcatgcccttcacgctcacaaacgactgtgacccaggcaggccccccgaagtggacgccgccctgagggcgcagctctggggttacacccagttcctggcgctggggattctcaccctggctgccggccagacctgcggtttcttctctgtctccgcgagagcagtcaccggcatggccggcgtgggctgcctgtttttcatctcttggtactcctccttcgggtttgtgcgacgctggaactgtatcctgatgagaaaccatgacgtcacggagcaacccatggttctggagaaaacagcgagtcttatgctaaaggaagctgtttcctatattgaaagacacaagcatgggccatttctcctcttcctttctttgctgcatgtgcacattccccttgtgaccacgagtgcattcctggggaaaagtcagcatggcttatatggtgataatgtggaggagatggactggctcataggtaaggttcttaatgccatcgaagacaatggtttaaagaactcaacattcacgtatttcacctctgaccatggaggacatttagaggcaagagatggacacagccagttagggggatggaacggaatttacaaaggtgggaagggcatgggaggatgggaaggtgggatccgcgtgcccgggatcttccactggccgggggtgctcccggccggccgagtgattggagagcccacgagcctgatggacgtgttccctactgtggtccagctggtgggtggcgaggtgccccaggacagggtgattgatggccacagcctggtacccttgctgcagggagctgaggcacgctcggcacatgagttcctgtttcattactgtgggcagcatcttcacgcagcacgctggcaccagaaggacagtggaagcgtctggaaggttcattacacgaccccgcagttccaccccgagggagcgggggcctgctacggccgaggcgtctgcccatgctccggggagggcgtgacccatcacagaccccctttgctctttgacctctccagggacccctccgaggcacggcccctgacccccgactccgagcccctgtaccacgccgtgatagcaagggtaggtgccgcggtgtcggagcatcggcagaccctgagtcctgtgccccagcagttttccatgagcaacatcctgtggaagccgtggctgcagccgtgctgcggacatttcccgttctgttcatgccacgaggatggggatggcaccccctgaatgccaggactgtgagagaggatccaggagagcctgactgcgttgcaaacaaaattctccaagcttggttctatcttcagcttccctttttgcaaggaacatgccctggactgagagtgggtccccactttctttctttctttctttcttttttgagacagagtgtcgctctgtccctcaggctggaatgcaatggcacgatctctgctcactgcaacctccgcctcccgggttcaagcgattttcctgcctcagcctcctgagtacccaggattacaggcaccaggcacctgccaccatgcctagctaatttttgtagttttagtagagacagggtttcaccatgttgcccaggctggtctcgcactcctgacctcaagtcatccacctgcctcagcctcccaaagtgctgggattacaggcacgagccactgcgcccatgtagggtttccctttcctgatttgtgaaataagactgtcccagtaggcacccactgatgcctcctcttcctcttctaaatctcagggttcgtcattgtgccaatgcccgatgttttcacccctccgtcttaaagcattgttgcaatttcatcacctagatgacataacagccttacaaaaggacagggaggagtgtctgttcctactctcacatagcggaggaaagttagagcctctcagtctctgtttatgaggactcattaatctcaaataattgatgcatttttcatacattagggtctctgtccatgtgtcttcctgatattgttatagaaatggcttcaggctgctggtaacagatgctgcggaaaaagaatgccttaaacaaagccaggcacggtgactcacacctgtaatcccagcactttgggaggctaaggtgggaggatcacttgagcctaggagttagacacctacccagcctgagcaacacagtgagacctcatctctacaaaaaacaaataattagctagatgtcgtggcgcacagctgtagtctcagctacttaggaggctgaggcgggaggattatttgagcctgggaggtcaaaactgcaatgagctaagattgcactactgcactccgggctgggagacagagtaagaccctgccttaaaaaaaaaaaaaaaaaaatgccttaaagaaaataataagagaagggtgtgttctcttccaagtaatgagccgatcaaggggaagcaacccaaggctagcaggctcttttcaattcccagctctgccactcttagcatggcagagagttggcctcattatgccagtatggctgccacagtgtcagacatcacattccaggcagtggaaaggagaaagaaccaaagggcatccctttctcttgaagcagtccctgtgaggggggattatctggaagccccaacccaatttctgcttccaaccattatccatagaaacaactggaagttgagaagtgcagtcttttaggtgggcacctggctgccctgtatgaaaccagaattaggttggtcagcaggaaaacaagaaaacacttactgtgttgactgaggtttttgacgcatcgctttattgtcaaattaaacaactctatctcattctgcactgaaacacgtactaccattgcctataattggaaaatgatcctcagaggcacagaagatgccctgatggaaagtttgccccttgggcaaagagacagccatgggaaccttcagacatagagagagaaggtggcttttctccctacattcctcaaatagctaagatttggccagtgtgttttctaagtcaattctagtgtgtttcatcctcacctcttccctctgtggctttgatgatggaagtgtagtcctaacctactgcacagctgggaccccctgcccctagatcccaatactggggatgggaggaccttgcactattcccctcagtccatctatcgaggtctttgcaggaagcatactgggaattgaaacgagagcctaaatgacatctaagaaaggcagtgttcaataccaggtattaggtgaggatgggattctaaggacatcagtgggaggcagggagccaccttcagacctcagcatggaagcttccaagatccagaggaagaggcaacagcactgagagtcataggtagaagaatcatcacagccctgctaaccaggcagctgatgcccctctcccctggctccctgtgtccaaatcctacaggggcatctgttggctgaactcaacctgaagccaaagagaagatgagtggagagaggcaacatttatagagctcaggtttctagggctggagagggatctggagggacacacaggagacacctggcataaccaaaaaatgattaaaaaaaaaaaaaaaaagaaacatctatggagcatgggacacggggagtggaggcagctaaaagccatctcatctttcaccgtattcaacaagcccattataacaagtctttcacgctcaaccattcaaacaatcccaacaatcccagcctaagaatttcctggcatttgatgaaaatggctgtgggttttgctatctttaagctccctgggaagcaggatataagcccagggctggcaggctctttctagctacctgctcttgcacatagagtttgcctcatggttgcaagaaggctgccatagctccagatggcacatagacattccaggcagcaggaaaaaggaaggagcacttaaccgaaggaggtcagggagttggttagtctccacctgaagaagagagccatgaaccagcttcagttgactaacgggctcctgtgagtgcatctttggacttttctggaggttgaaatctagatgtggtatgtgtcttaaagcagccaccaactcctcccattaccttccaagtgagcccaactacacgatggagcctcttccctgcccttggatctgggctgagcctctgacttgcgttgaccaacagaatgcagtgaaagtgatgccgatactaccctccctgccctagacttgggatacctggcagctatattcttccattcctcaggacttgcaaaaacgggtctcagcatgccttcccagagccatgaggtgtttctttgcccattcattgatctgagaagtgagtgtaaggagtttaaatcaacctctgttctgtgctagttaaggtaataaagttgctgcagtccagggggtaggtacctgtggacggctctgcgaataggacagttgcatttcttgggaatcaagtgcatccctaggctggcagtgcagcagaaatactgaataaaatgtgacaaatctccctgga

SEQ ID NO: 2461 - DNA, 1853 bp, Homo sapiens
  source 1..1853: mol_type = unassigned DNA
ccttcctcttcttgatcggggattcaggaaggagcccaggagcagaggaagtagagagagagacaacatgttacatctgcaccattcttgtttgtgtttcaggagctggctgccagcgatgctcgctgtactgctaagtttggcaccatcagcttccagcgacatttccgcctcccgaccgaacatccttcttctgatggcggacgaccttggcattggggacattggctgctatggcaacaacaccatgaggactccgaatattgaccgccttgcagaggacggcgtgaagctgacccaacacatctctgccgcatctttgtgcaccccaagcagagccgccttcctcacgggcagataccctgtgcgatcagggatggtttccagcattggttaccgtgttcttcagtggaccggagcatctggaggtcttccaacaaatgagacaacttttgcaaaaatactgaaagagaaaggctatgccactggactcattggaaaatggcatctgggtctcaactgtgagtcagccagtgatcattgccaccaccctctccatcatggctttgaccatttctacggaatgcctttctccttgatgggtgattgcgcccgctgggaactctcagagaagcgtgtcaacctggaacaaaaactcaacttcctcttccaagtcctggccttggttgccctcacactggtagcagggaagctcacacacctgatacccgtctcgtggatgccggtcatctggtcagccctttcggccgtcctcctcctcgcaagctcctattttgtgggtgctctgattgtccatgccgattgctttctgatgagaaaccacaccatcacggagcagcccatgtgcttccaaagaacgacaccccttattctgcaggaggttgcgtcctttctcaaaaggaataagcatgggcctttcctcctctttgtttcctttctacacgttcacatccctcttatcactatggagaacttcctcgggaagagtctccacgggctgtatggggacaacgtagaggagatggactggatggtaggacggatccttgacactttggacgtggagggtttgagcaacagcaccctcatttattttacgtcggatcacggcggttccctagagaatcaacttggaaacacccagtatggtggctggaatggaatttataaaggtgggaagggcatgggaggatgggaaggtgggatccgcgtgcccgggatcttccgctggcccggggtgctcccggccggccgagtgattggcgagcccacgagtctgatggacgtgttccccaccgtggtccggctggcgggcggcgaggtgccccaggacagagtgattgacggccaagaccttctgcccttgctcctggggacagcccaacactcagaccacgagttcctgatgcattattgtgagaggtttctgcacgcagccaggtggcatcaacgggacagaggaacaatgtggaaagtccactttgtgacgcctgtgttccagccagagggagccggtgcctgctatggaagaaaggtctgcccgtgctttggggaaaaagtagtccaccacgatccacctttgctctttgacctctcaagagacccttctgagacccacatcctcacaccagcctcagagcccgtgttctatcaggtgatggaacgagtccagcaggcggtgtgggaacaccagcggacactcagcccagttcctctgcagctggacaggctgggcaacatctggagaccgtggctgcagccctgctgtggcccgttccccctctgctggtgccttagggaagatgacccacaataaatgtctgcagtgaaaa

SEQ ID NO: 2462 - DNA, 644 bp, Homo sapiens
  source 1..644: mol_type = unassigned DNA
tcttcttgatcggggattcaggaaggagcccaggagcagaggtcaatttctgctgtcaatgtgattgtggacatctttatgtcttacaggaagtagagagagagacaacatgttacatctgcaccattcttgtttgtgtttcaggagctggctgccagcgatgctcgctgtactgctaagtttggcaccatcagcttccagcgacatttccgcctcccgaccgaacatccttcttctgatggcggacgaccttggcattggggacattggctgctatggcaacaacaccatgaggactccgaatattgaccgccttgcagaggacggcgtgaagctgacccaacacatctctgccgcatctttgtgcaccccaagcagagccgccttcctcacgggcagataccctgtgcgatcagggatggtttccagcattggttaccgtgttcttcagtggaccggagcatctggaggtcttccaacaaatgagacaacttttgcaaaaatactgaaagagaaaggctatgccactggactcattggaaaatggcatctgggtctcaactgtgagtcagccagtgatcattgccaccaccctctccatcatggctttgaccatttctacggaatgcctttctccttgatgg

SEQ ID NO: 2463 - DNA, 1899 bp, Homo sapiens
  source 1..1899: mol_type = unassigned DNA
agtgcgtgtctgttttggcaggaagaagacgtttcttccaaggagcagcctccccgctacatccagccagtgtcgcccttacacagctgcatgtcaggaagtagagagagagacaacatgttacatctgcaccattcttggactccgaatattgaccgccttgcagaggacggcgtgaagctgacccaacacatctctgccgcatctttgtgcaccccaagcagagccgccttcctcacgggcagataccctgtgcgatcagggatggtttccagcattggttaccgtgttcttcagtggaccggagcatctggaggtcttccaacaaatgagacaacttttgcaaaaatactgaaagagaaaggctatgccactggactcattggaaaatggcatctgggtctcaactgtgagtcagccagtgatcattgccaccaccctctccatcatggctttgaccatttctacggaatgcctttctccttgatgggtgattgcgcccgctgggaactctcagagaagcgtgtcaacctggaacaaaaactcaacttcctcttccaagtcctggccttggttgccctcacactggtagcagggaagctcacacacctgatacccgtctcgtggatgccggtcatctggtcagccctttcggccgtcctcctcctcgcaagctcctattttgtgggtgctctgattgtccatgccgattgctttctgatgagaaaccacaccatcacggagcagcccatgtgcttccaaagaacgacaccccttattctgcaggaggttgcgtcctttctcaaaaggaataagcatgggcctttcctcctctttgtttcctttctacacgttcacatccctcttatcactatggagaacttcctcgggaagagtctccacgggctgtatggggacaacgtagaggagatggactggatggtaggacggatccttgacactttggacgtggagggtttgagcaacagcaccctcatttattttacgtcggatcacggcggttccctagagaatcaacttggaaacacccagtatggtggctggaatggaatttataaaggtgggaagggcatgggaggatgggaaggtgggatccgcgtgcccgggatcttccgctggcccggggtgctcccggccggccgagtgattggcgagcccacgagtctgatggacgtgttccccaccgtggtccggctggcgggcggcgaggtgccccaggacagagtgattgacggccaagaccttctgcccttgctcctggggacagcccaacactcagaccacgagttcctgatgcattattgtgagaggtttctgcacgcagccaggtggcatcaacgggacagaggaacaatgtggaaagtccactttgtgacgcctgtgttccagccagagggagccggtgcctgctatggaagaaaggtctgcccgtgctttggggaaaaagtagtccaccacgatccacctttgctctttgacctctcaagagacccttctgagacccacatcctcacaccagcctcagagcccgtgttctatcaggtgatggaacgagtccagcaggcggtgtgggaacaccagcggacactcagcccagttcctctgcagctggacaggctgggcaacatctggagaccgtggctgcagccctgctgtggcccgttccccctctgctggtgccttagggaagatgacccacaataaatgtctgcagtgaaaagctggagccccgattcctaaattttgtcactcaaattgaaacaaaccagctggccatggtggttgtcatcccagcactttaggaggccaccacaggaggatcactcccgtgatcaaaaccaacctgggcaacatgatgaaactctagctctacaaaac

SEQ ID NO: 2464 - DNA, 2158 bp, Homo sapiens
  source 1..2158: mol_type = unassigned DNA
cctttgggagagaaccttcctcttcttgatcggggattcaggaaggagcccaggagcagaggaagtagagagagagacaacatgttacatctgcaccattcttgagacagggtctcaccatgttgctcaagctggtcttaaacacctgggctcaggcaatgctcccaccttggcctcccaacgtgctcagataatgggcatgagccaccacgcctgaccgcttctggatctcttgatggtgctttctcagaatgcactgatagtgatttatcctgcatctggagaatgaagcatgagacccgtgattaatagatgtgctccaggctcccttgatttgatgttgccccaggcagcctcagaaggaattgtatttcattctctgcaaatcagtttgtgtttcaggagctggctgccagcgatgctcgctgtactgctaagtttggcaccatcagcttccagcgacatttccgcctcccgaccgaacatccttcttctgatggcggacgaccttggcattggggacattggctgctatggcaacaacaccatgaggactccgaatattgaccgccttgcagaggacggcgtgaagctgacccaacacatctctgccgcatctttgtgcaccccaagcagagccgccttcctcacgggcagataccctgtgcgatcagggatggtttccagcattggttaccgtgttcttcagtggaccggagcatctggaggtcttccaacaaatgagacaacttttgcaaaaatactgaaagagaaaggctatgccactggactcattggaaaatggcatctgggtctcaactgtgagtcagccagtgatcattgccaccaccctctccatcatggctttgaccatttctacggaatgcctttctccttgatgggtgattgcgcccgctgggaactctcagagaagcgtgtcaacctggaacaaaaactcaacttcctcttccaagtcctggccttggttgccctcacactggtagcagggaagctcacacacctgatacccgtctcgtggatgccggtcatctggtcagccctttcggccgtcctcctcctcgcaagctcctattttgtgggtgctctgattgtccatgccgattgctttctgatgagaaaccacaccatcacggagcagcccatgtgcttccaaagaacgacaccccttattctgcaggaggttgcgtcctttctcaaaaggaataagcatgggcctttcctcctctttgtttcctttctacacgttcacatccctcttatcactatggagaacttcctcgggaagagtctccacgggctgtatggggacaacgtagaggagatggactggatggtaggacggatccttgacactttggacgtggagggtttgagcaacagcaccctcatttattttacgtcggatcacggcggttccctagagaatcaacttggaaacacccagtatggtggctggaatggaatttataaaggtgggaagggcatgggaggatgggaaggtgggatccgcgtgcccgggatcttccgctggcccggggtgctcccggccggccgagtgattggcgagcccacgagtctgatggacgtgttccccaccgtggtccggctggcgggcggcgaggtgccccaggacagagtgattgacggccaagaccttctgcccttgctcctggggacagcccaacactcagaccacgagttcctgatgcattattgtgagaggtttctgcacgcagccaggtggcatcaacgggacagaggaacaatgtggaaagtccactttgtgacgcctgtgttccagccagagggagccggtgcctgctatggaagaaaggtctgcccgtgctttggggaaaaagtagtccaccacgatccacctttgctctttgacctctcaagagacccttctgagacccacatcctcacaccagcctcagagcccgtgttctatcaggtgatggaacgagtccagcaggcggtgtgggaacaccagcggacactcagcccagttcctctgcagctggacaggctgggcaacatctggagaccgtggctgcagccctgctgtggcccgttccccctctgctggtgccttagggaagatgacccacaataaatgtctgcagtgaaaagctgg

SEQ ID NO: 2465 - DNA, 1991 bp, Homo sapiens
  source 1..1991: mol_type = unassigned DNA
gttctgctcctagacattagagagataatacggctgatagacaacaagaaggtattccaagctgcacaatgaggcccaggagacccttggtcttcatgtctttggtgtgtgcactcttgaacacatgccaggcacacagggtgcatgacgacaagcctaatattgtcctaatcatggttgatgacctgggtattggagatctgggctgctacggcaatgacaccatgaggacgcctcacatcgaccgccttgccagggaaggcgtgcgactgactcagcacatctctgccgcctccctctgcagcccaagccggtccgcgttcttgacgggaagataccccatccgatcaggtatggtttctagtggtaatagacgtgtcatccaaaatcttgcagtccccgcaggcctccctcttaatgagacaacacttgcagccttgctaaagaagcaaggatacagcacggggcttataggcaaatggcaccaaggcttgaactgcgactcccgaagtgaccagtgccaccatccatataattatgggtttgactactactatggcatgccgttcactctcgttgacagctgctggccggacccctctcgtaacacggaattagcctttgagagtcagctctggctctgtgtgcagctagttgccattgccatcctcaccctaacctttgggaagctgagcggctgggtctctgttccctggctcctgatcttctccatgattctgtttattttcctcttgggctatgcttggttctccagccacacgtcccctttatactgggactgcctcctcatgcgggggcacgagatcacggagcagcccatgaaggctgaacgagctggatccattatggtgaaggaagcgatttcctttttagaaaggcacagtaaggaaactttccttctctttttctcctttcttcacgtgcacacacctctccccaccacggacgatttcactggcaccagcaagcatggcttgtatggggataatgtggaagagatggactccatggtgggcaagattcttgatgctatcgatgattttggcctaaggaacaacacccttgtctactttacatcagatcacggagggcatttggaagctaggcgagggcatgcccaacttggtggatggaatggaatatacaaaggtggaaaaggcatggggggctgggaaggtggaatccgcgtcccaggaattgtccgatggcctggaaaggtaccagctggacggttgattaaggaacctacaagtttaatggatattttaccaactgtcgcatcagtgtcaggaggaagtctccctcaggacagggtcattgacggccgagacctcatgcccttgctgcagggcaacgtcaggcactcggagcatgaatttcttttccactactgtggctcctacctgcacgccgtgcggtggatccccaaggacgacagtgggtcagtttggaaggctcactatgtgaccccggtattccagccaccagcttctggtggctgctatgtcacctcattatgcagatgtttcggagaacaggttacctaccacaacccccctctgctcttcgatctctccagggacccctcagagtccacacccctgacacctgccacagagcccctccatgattttgtgattaaaaaggtggccaacgccctgaaggaacaccaggaaaccatcgtgcctgtgacctaccaactctcagaactgaatcagggcaggacgtggctgaagccttgctgtggggtgttcccattttgtctgtgtgacaaggaagaggaagtctctcagcctcggggtcctaacgagaagagataattacaatcaggctaccagaggaagcctttggtcctaacgagaagagataattacaatcaggctaccaaaggaagcactaactttggtgctttcaagttggcaaggagtgcatttaatagtcaataaattcatctaccattccagattatt

SEQ ID NO: 2466 - DNA, 2164 bp, Homo sapiens
  source 1..2164: mol_type = unassigned DNA
agtggagacaggctctcaccatgttgaccaggctggtctcgaactcccgacctcaagtgatccgccggcctcggcctcccaaagtgctgggattacaggcgtgaaccaccactcctggcccttctgttacttttccactgctgttgagatagaagtcactgttgggatccaacctttttgtttgtataaactgacaacaagaaggtattccaagctgcacaatgaggcccaggagacccttggtcttcatgtctttggtgtgtgcactcttgaacacatgccaggcacacagggtgcatgacgacaagcctaatattgtcctaatcatggttgatgacctgggtattggagatctgggctgctacggcaatgacaccatgaggacgcctcacatcgaccgccttgccagggaaggcgtgcgactgactcagcacatctctgccgcctccctctgcagcccaagccggtccgcgttcttgacgggaagataccccatccgatcaggtatggtttctagtggtaatagacgtgtcatccaaaatcttgcagtccccgcaggcctccctcttaatgagacaacacttgcagccttgctaaagaagcaaggatacagcacggggcttataggcaaatggcaccaaggcttgaactgcgactcccgaagtgaccagtgccaccatccatataattatgggtttgactactactatggcatgccgttcactctcgttgacagctgctggccggacccctctcgtaacacggaattagcctttgagagtcagctctggctctgtgtgcagctagttgccattgccatcctcaccctaacctttgggaagctgagcggctgggtctctgttccctggctcctgatcttctccatgattctgtttattttcctcttgggctatgcttggttctccagccacacgtcccctttatactgggactgcctcctcatgcgggggcacgagatcacggagcagcccatgaaggctgaacgagctggatccattatggtgaaggaagcgatttcctttttagaaaggcacagtaaggaaactttccttctctttttctcctttcttcacgtgcacacacctctccccaccacggacgatttcactggcaccagcaagcatggcttgtatggggataatgtggaagagatggactccatggtgggcaagattcttgatgctatcgatgattttggcctaaggaacaacacccttgtctactttacatcagatcacggagggcatttggaagctaggcgagggcatgcccaacttggtggatggaatggaatatacaaaggtggaaaaggcatggggggctgggaaggtggaatccgcgtcccaggaattgtccgatggcctggaaaggtaccagctggacggttgattaaggaacctacaagtttaatggatattttaccaactgtcgcatcagtgtcaggaggaagtctccctcaggacagggtcattgacggccgagacctcatgcccttgctgcagggcaacgtcaggcactcggagcatgaatttcttttccactactgtggctcctacctgcacgccgtgcggtggatccccaaggacgacagtgggtcagtttggaaggctcactatgtgaccccggtattccagccaccagcttctggtggctgctatgtcacctcattatgcagatgtttcggagaacaggttacctaccacaacccccctctgctcttcgatctctccagggacccctcagagtccacacccctgacacctgccacagagcccctccatgattttgtgattaaaaaggtggccaacgccctgaaggaacaccaggaaaccatcgtgcctgtgacctaccaactctcagaactgaatcagggcaggacgtggctgaagccttgctgtggggtgttcccattttgtctgtgtgacaaggaagaggaagtctctcagcctcggggtcctaacgagaagagataattacaatcaggctaccagaggaagcctttggtcctaacgagaagagataattacaatcaggctaccaaaggaagcactaactttggtgctttcaagttggcaaggagtgcatttaatagtcaataaattcatctaccattccagattattaaaggcccactggttgttcc

SEQ ID NO: 2467 - DNA, 1923 bp, Homo sapiens
  source 1..1923: mol_type = unassigned DNA
atgaggccaaggagacccttggtcttcatgtctttggtgtgtgcactcttgaacacatgccaggcacacagggtgcatgacgacaagcctaatattgtcctaatcatggttgatgacctgggtattggagatctgggctgctacggcaatgacaccatgaggacgcctcacatcgaccgccttgccagggaaggcgtgcgactgactcagcacatctctgccgcctccctctgcagcccaagccggtccgcgttcttgacgggaagataccccatccgatcaggtatggtttctagtggtaatagacgtgtcatccaaaatcttgcagtccccgcaggcctccctcttaatgagacaacacttgcagccttgctaaagaagcaaggatacagcacggggcttataggcaaatggcaccaaggcttgaactgcgactcccgaagtgaccagtgccaccatccatataattatgggtttgactactactatggcatgccgttcactctcgttgacagctgctggccggacccctctcgtaacacggaattagcctttgagagtcagctctggctctgtgtgcagctagttgccattgccatcctcaccctaacctttgggaagctgagcggctgggtctctgttccctggctcctgatcttctccatgattctgtttattttcctcttgggctatgcttggttctccagccacacgtcccctttatactgggactgcctcctcatgcgggggcacgagatcacggagcagcccatgaaggctgaacgagctggatccattatggtgaaggaagcgatttcctttttagaaaggcacagtaaggaaactttccttctctttttctcctttcttcacgtgcacacacctctccccaccacggacgatttcactggcaccagcaagcatggcttgtatggggataatgtggaagagatggactccatggtgggcaagattcttgatgctatcgatgattttggcctaaggaacaacacccttgtctactttacatcagatcacggagggcatttggaagctaggcgagggcatgcccaacttggtggatggaatggaatatacaaaggtggaaaaggcatggggggctgggaaggtggaatccgcgtcccaggaattgtccgatggcctggaaaggtaccagctggacggttgattaaggaacctacaagtttaatggatattttaccaactgtcgcatcagtgtcaggaggaagtctccctcaggacagggtcattgacggccgagacctcatgcccttgctgcagggcaacgtcaggcactcggagcatgaatttcttttccactactgtggctcctacctgcacgccgtgcggtggatccccaaggacgacagtgggtcagtttggaaggctcactatgtgaccccggtattccagccaccagcttctggtggctgctatgtcacctcattatgcagatgtttcggagaacaggttacctaccacaacccccctctgctcttcgatctctccagggacccctcagagtccacacccctgacacctgccacagagcccctccatgattttgtgattaaaaaggtggccaacgccctgaaggaacaccaggaaaccatcgtgcctgtgacctaccaactctcagaactgaatcagggcaggacgtggctgaagccttgctgtggggtgttcccattttgtctgtgtgacaaggaagaggaagtctctcagcctcggggtcctaacgagaagagataattacaatcaggctaccagaggaagcctttggtcctaacgagaagagataattacaatcaggctaccaaaggaagcactaactttggtgctttcaagttggcaaggagtgcatttaatagtcaataaattcatctaccattccagattatt

SEQ ID NO: 2468 - DNA, 1875 bp, Homo sapiens
  source 1..1875: mol_type = unassigned DNA
atgacaagaaacgccagacccaacattgtcctgctgatggcagatgaccttggagtgggggatttgtgctgctacggtaataactcagtgagcacacctaatattgaccgcctggcaagtgaaggagtgaggcttacccagcatctcgcagctgcttccatgtgcaccccaagtcgggctgccttcctgaccggccggtaccccatcagatcagggatggtgtctgcctacaacctgaaccgtgccttcacgtggcttggtgggtcaggtggtcttcccaccaatgaaacgacttttgccaagctgctgcagcaccgtggctaccgcacgggactcataggcaaatggcacctgggtttgagctgcgcctctcggaatgatcactgttaccacccgctcaaccatggttttcactacttttacggggtgccttttggacttttaagcgactgccaggcatccaagacaccagaactgcaccgctggctcaggatcaaactgtggatctccacggtagcccttgccctggttccttttctgcttctcattcccaagttcgcccgctggttctcagtgccatggaaggtcatctttgtctttgctctcctcgcctttctgtttttcacttcctggtactctagttatggatttactcgacgttggaattgcatccttatgaggaaccatgaaattatccagcagccaatgaaagaggagaaagtagcttccctcatgctgaaggaggcacttgctttcattgaaaggtacaaaagggaaccttttctcctctttttttccttcctgcacgtacatactccactcatctccaaaaagaagtttgttgggcgcagtaaatatggcaggtatggggacaatgtagaagaaatggattggatggtgggtaaaatcctggatgccctggaccaggagcgcctggccaaccacaccttggtgtacttcacctctgacaacgggggccacctggagcccctggacggggctgttcagctgggtggctggaacgggatctacaaaggtggcaaaggaatgggaggatgggaaggaggtatccgtgtgccagggatattccggtggccgtcagtcttggaggctgggagagtgatcaatgagcccaccagcttaatggacatctatccgacgctgtcttatataggcggagggatcttgtcccaggacagagtgattgacggccagaacctaatgcccctgctggaaggaagggcgtcccactccgaccacgagttcctcttccactactgtggggtctatctgcacacggtcaggtggcatcagaaggactgtgcaactgtgtggaaagctcattatgtgactcctaaattctaccctgaaggaacaggtgcctgctatgggagtggaatatgttcatgttcgggggatgtaacctaccacgacccaccactcctctttgacatctcaagagacccttcagaagcccttccactgaaccctgacaatgagccattatttgactccgtgatcaaaaagatggaggcagccataagagagcatcgtaggacactaacacctgtcccacagcagttctctgtgttcaacacaatttggaaaccatggctgcagccttgctgtgggaccttccccttctgtgggtgtgacaaggaagatgacatccttcccatggctccctgagaccatgcggaccacgtgttacccaccacaaacttactgttacaatggtcataggagcagagctcacctgactgattcattccatttgggataaaaactgatggcccaacccattgttttatcctcagaaatcagttctttcaagagctcggtgaaattaaagtgggcccatataacagtgaacct

SEQ ID NO: 2469 - DNA, 3161 bp, Homo sapiens
  source 1..3161: mol_type = unassigned DNA
ccctccacctggggctcggcccggcccggcagatgttacaactttttcgaattctctcccgccgtgtcccctcgacccgcccaacttgtgcctccctccccttcccctctggggtcctgcccacctccctgcagggagctgggctgttttaaggactccgggtggggcgagaggccgggaaagcagaggagagagaaattaggaggcgggagaaatccagggcaagaaggaagaggggagtcagaggatggtagagagcactttttggaagctgccacgccgcgtctcaggctggccgggctgagctggggaagagggagcaaaggcggcgcagggcctgcgcttaggcagcgggaggcagctcggcgcgggcctgacctccccagagcgccccgctgcggccgagcagatccggcccagccgtccggcagccagtcccggaccagacactggaccgtccccggggggcgctgaactccctcgcagcatccgagccggcgggccggtggtgcgccctgggcgcgcgaggtggtgaggccccaggagcccggcgcgccgggacgcgcgggccggcttggcgatgcacaccctcactggcttctccctggtcagcctgctcagcttcggctacctgtcctgggactgggccaagccgagcttcgtggccgacgggcccggggaggctggcgagcagccctcggccgctccgccccagcctccccacatcatcttcatcctcacggacgaccaaggctaccacgacgtgggctaccatggttcagatatcgagacccctacgctggacaggctggcggccaagggggtcaagttggagaattattacatccagcccatctgcacgccttcgcggagccagctcctcactggcaggtaccagatccacacaggactccagcattccatcatccgcccacagcagcccaactgcctgcccctggaccaggtgacactgccacagaagctgcaggaggcaggttattccacccatatggtgggcaagtggcacctgggcttctaccggaaggagtgtctgcccacccgtcggggcttcgacaccttcctgggctcgctcacgggcaatgtggactattacacctatgacaactgtgatggcccaggcgtgtgcggcttcgacctgcacgagggtgagaatgtggcctgggggctcagcggccagtactccactatgctttatgcccagcgcgccagccatatcctggccagccacagccctcagcgtcccctcttcctctatgtggccttccaggcagtacacacacccctgcagtcccctcgtgagtacctgtaccgctaccgcaccatgggcaatgtggcccggcggaagtacgcggccatggtgacctgcatggatgaggctgtgcgcaacatcacctgggccctcaagcgctacggtttctacaacaacagtgtcatcatcttctccagtgacaatggtggccagactttctcggggggcagcaactggccgctccgaggacgcaagggcacttattgggaaggtggcgtgcggggcctaggctttgtccacagtcccctgctcaagcgaaagcaacggacaagccgggcactgatgcacatcactgactggtacccgaccctggtgggtctggcaggtggtaccacctcagcagccgatgggctagatggctacgacgtgtggccggccatcagcgagggccgggcctcaccacgcacggagatcctgcacaacattgacccactctacaaccatgcccagcatggctccctggagggcggctttggcatctggaacaccgccgtgcaggctgccatccgcgtgggtgagtggaagctgctgacaggagaccccggctatggcgattggatcccaccgcagacactggccaccttcccgggtagctggtggaacctggaacgaatggccagtgtccgccaggccgtgtggctcttcaacatcagtgctgacccttatgaacgggaggacctggctggccagcggcctgatgtggtccgcaccctgctggctcgcctggccgaatataaccgcacagccatcccggtacgctacccagctgagaacccccgggctcatcctgactttaatgggggtgcttgggggccctgggccagtgatgaggaagaggaggaagaggaagggagggctcgaagcttctcccggggtcgtcgcaagaaaaaatgcaagatttgcaagcttcgatcctttttccgtaaactcaacaccaggctaatgtcccaacggatctgatggtggggagggagaaaactgtcctttagaggatcttccccactccggcttggccctgctgtttctcagggagaagcctgtcacatctccatctacagggagttggagggtgtagagtcccttggttgaacagggtagggagcctggataggagtgggtgggaataaaccagactgggatgcctgtgtctcagtcctgcctcctcacggacttgctctgtgacctcaggtgacccacatgagcttttagcctcagtttcctcatctgtaaaatgagctctaatgactttgtgactctttggtgtggccctggagcctggggccacggtggagttcctggccggccttgccacttgacaactcctttaaggcttcccccttaacacgggatccctgtggtggtgtttgggagttgcctggaggcaactccaagcctggcccccagctgaagcatggcaatctggctgctctctacagggacccccaagcgctgtgggtggagggcaggggtcgggggggttgaccttcttgggtcttcacatggcctaggccagtcctccggtcagactggtgtcaggcaccgtggtgcaaaattcctcttctggcccctccagtacccagagaaactggctgggccattaactgctgcagcaccaagggtggtagaaagagctgtgaagagcccccaaaccagtaccaggacacctgggttctcctgtgacctggggcacagttcttgccctctaggccttgatttccccacctgcaagtggggatgccagccctggctctgcctccttcatgaggctctggaagactggccaaggttgtggaggagcttgtgaacttgattaaagtgtcgtaacatggaa

SEQ ID NO: 2470 - DNA, 472 bp, Homo sapiens
  source 1..472: mol_type = unassigned DNA
atgcagttctggaaaggtgaatcggttccttctgcctgtctgggttttgcaaccccgtggtgggacaattggccaggtgcatattcctcagaaggtaccagatccacacaggactccagcattccatcatccgcccacagcagcccaactgcctgcccctggaccaggtgacactgccacagaagctgcaggaggcaggttattccacccatatggtgggcaagtggcacctgggcttctaccggaaggagtgtctgcccacccgtcggggcttcgacaccttcctgggctcgctcacgggcaatgtggactattacacctatgacaactgtgatggcccaggcgtgtgcggcttcgacctgcacgagggtgagaatgtggcctgggggctcagcggccagtactccactatgctttatgcccagcgcgccagccatatcctggccagccacagccctcagcgtcccctctt

SEQ ID NO: 2471 - DNA, 1429 bp, Homo sapiens
  source 1..1429: mol_type = unassigned DNA
gggagggcctcctcatgcagttctggaaaggtaccagatccacacaggactccagcattccatcatccgcccacagcagcccaactgcctgcccctggaccaggtgacactgccacagaagctgcaggaggcaggttattccacccatatggtgggcaagtggcacctgggcttctaccggaaggagtgtctgcccacccgtcggggcttcgacaccttcctgggctcgctcacgggcaatgtggactattacacctatgacaactgtgatggcccaggcgtgtgcggcttcgacctgcacgagggtgagaatgtggcctgggggctcagcggccagtactccactatgctttatgcccagcgcgccagccatatcctggccagccacagccctcagcgtcccctcttcctctatgtggccttccaggcagtacacacacccctgcagtcccctcgtgagtacctgtaccgctaccgcaccatgggcaatgtggcccggcggaagtacgcggccatggtgacctgcatggatgaggctgtgcgcaacatcacctgggccctcaagcgctacggtttctacaacaacagtgtcatcatcttctccagtgacaatggtggccagactttctcggggggcagcaactggccgctccgaggacgcaagggcacttattgggaaggtggcgtgcggggcctaggctttgtccacagtcccctgctcaagcgaaagcaacggacaagccgggcactgatgcacatcactgactggtacccgaccctggtgggtctggcaggtggtaccacctcagcagccgatgggctagatggctacgacgtgtggccggccatcagcgagggccgggcctcaccacgcacggagatcctgcacaacattgacccactctacaaccatgcccagcatggctccctggagggcggctttggcatctggaacaccgccgtgcaggctgccatccgcgtgggtgagtggaagctgctgacaggagaccccggctatggcgattggatcccaccgcagacactggccaccttcccgggtagctggtggaacctggaacgaatggccagtgtccgccaggccgtgtggctcttcaacatcagtgctgacccttatgaacgggaggacctggctggccagcggcctgatgtggtccgcaccctgctggctcgcctggccgaatataaccgcacagccatcccggtacgctacccagctgagaacccccgggctcatcctgactttaatgggggtgcttgggggccctgggccagtgatgaggaagaggaggaagaggaagggagggctcgaagcttctcccggggtcgtcgcaagaaaaaatgcaagatttgcaagcttcgatcctttttccgtaaactcaacaccaggctaatgtcccaacggatctga

SEQ ID NO: 2472 - DNA, 4657 bp, Homo sapiens
  source 1..4657: mol_type = unassigned DNA
ggcaaaagaactcggagtgccaaagctaaataagttagctgagaaaacgcacgcagtttgcagcgcctgcgccgggtgcgccaactacgcaaagaccaagcgggctccgcgcggaccggccgcggggctagggacccggctttggccttcaggctccctagcagcggggaaaaggaattgctgcccggagtttctgcggaggtggagggagatcaggaaacggcttcttcctcacttcgccgcctggtgagtgtcggggagattggcaaacgcctaggaaaggactggggaaaatagccctgggaaagtggagaaggtgatcaggaggccggtccactacggcagtttatctgtctgatcagagccagacgcgacgcgtccacttcgcagttctttccaggtgtggggaccgcaggacagacggccgatcccgccgccctccgtaccagcactcccaggagagtcagcctcgctccccaacgtcgagggcgctctggccacgaaaagttcctgtccactgtgattctcaattccttgcttggtttttttctccagagaacttttgggtggagatattaacttttttcttttttttttccttggtggaagctgctctagggaggggggaggaggaggagaaagtgaaatgtgctggagaagagcgagccctccttgttcttccggagtcccatccattaagccatcacttctggaagattaaagttgtcggacatggtgacagctgagaggagaggaggatttcttgccaggtggagagtcttcaccgtctgttgggtgcatgtgtgcgcccgcagcggcgcggggcgcgtggttctccgcgtggagtctcacctgggacctgagtgaatggctcccaggggctgtgcggggcatccgcctccgccttctccacaggcctgtgtctgtcctggaaagatgctagcaatgggggcgctggcaggattctggatcctctgcctcctcacttatggttacctgtcctggggccaggccttagaagaggaggaagaaggggccttactagctcaagctggagagaaactagagcccagcacaacttccacctcccagccccatctcattttcatcctagcggatgatcagggatttagagatgtgggttaccacggatctgagattaaaacacctactcttgacaagctcgctgccgaaggagttaaactggagaactactatgtccagcctatttgcacaccatccaggagtcagtttattactggaaagtatcagatacacaccggacttcaacattctatcataagacctacccaacccaactgtttacctctggacaatgccaccctacctcagaaactgaaggaggttggatattcaacgcatatggtcggaaaatggcacttgggtttttacagaaaagaatgcatgcccaccagaagaggatttgataccttttttggttcccttttgggaagtggggattactatacacactacaaatgtgacagtcctgggatgtgtggctatgacttgtatgaaaacgacaatgctgcctgggactatgacaatggcatatactccacacagatgtacactcagagagtacagcaaatcttagcttcccataaccccacaaagcctatatttttatatattgcctatcaagctgttcattcaccactgcaagctcctggcaggtatttcgaacactaccgatccattatcaacataaacaggaggagatatgctgccatgctttcctgcttagatgaagcaatcaacaacgtgacattggctctaaagacttatggtttctataacaacagcattatcatttactcttcagataatggtggccagcctacggcaggagggagtaactggcctctcagaggtagcaaaggaacatattgggaaggagggatccgggctgtaggctttgtgcatagcccacttctgaaaaacaagggaacagtgtgtaaggaacttgtgcacatcactgactggtaccccactctcatttcactggctgaaggacagattgatgaggacattcaactagatggctatgatatctgggagaccataagtgagggtcttcgctcaccccgagtagatattttgcataacattgaccccatatacaccaaggcaaaaaatggctcctgggcagcaggctatgggatctggaacactgcaatccagtcagccatcagagtgcagcactggaaattgcttacaggaaatcctggctacagcgactgggtcccccctcagtctttcagcaacctgggaccgaaccggtggcacaatgaacggatcaccttgtcaactggcaaaagtgtatggcttttcaacatcacagccgacccatatgagagggtggacctatctaacaggtatccaggaatcgtgaagaagctcctacggaggctctcacagttcaacaaaactgcagtgccggtcaggtatccccccaaagaccccagaagtaaccctaggctcaatggaggggtctggggaccatggtataaagaggaaaccaagaaaaagaagccaagcaaaaatcaggctgagaaaaagcaaaagaaaagcaaaaaaaagaagaagaaacagcagaaagcagtctcaggttcaacttgccattcaggtgttacttgtggataagcacaaatatttcctgtttggttaaactttaatcagttcttatctttcatctgtttcctaggtaaaccagcaaatttggctcgataatatcgctggcctaagcgtcaggcttgttttcatgctgtgccactccagagacttctgccacctggccgccacactgaaaactgtcctgctcagtgccaaggtgctactcttgcaagccacacttagagagagtggagatgtttatttctcttgctcctttagaaaacgtggtgagtcctgagttccactgctgtgcttcagtcaactgaccaaacactgctttgaattataggaggagaacaataacctaccatccgcaagcatgctaatttgatggaagttacagggtataccatccgcaagcatgctaatttgatggaagttacagggtagcatgattaaaactacctttgataaattacagtcaaagattgtgtcacctcaaaggccttgaagaatatattttcttggtgaatttttgtatgtctgtcatatgacacttgggttttttaattaattctattttatatatatatatatgtttcttttcctgtgaaaagctgtttttctcacatgtgaacagcttgcacctcattttaccatgcgtgagggaatggcaaataagaatgtttgagcacactgcccacaatgaatgtaactattttctaaacactttactagaagaacatttcagtataaaaaacctaatttatttttacagaaaaatattttgttgtttttataaaaagttatgcaaatgactttattttatttttatttcctgcataccattagaataattttatttcatttcttcaaattaccaagcactgtaatactataaattaatgtaatactgtgtgaattcagactataaaaaacatcattcagaaaactttataatcgtcattgttcaaccaagattttgaatgtaataagatgaatatattccttacaaattacttggaaattcaatgtttgtgcagagttgagacaactttattgtttctatcataaactatttatgtatcttaattattaaaatgatttactttatggcactagaaaatttactgtggcttttctgatctaacttctagctaaaattgtatcattggtcctaaaaaataaaaatctttactaataggcaattgaaggaatggtttgctaacaaccacagtaatataatatgattttacagatagatgcttccccttggctatgacatggagaaagattttcccataataataactaacatttatattaggttggtgcaaaactagttgcggtttttcccattaaaagtaataaacttactcttatacaaagtggacactgtggggagatacagagaaatggaagatacggatcctgcctggagtaggtaaccttgcttggaaaccccacatgcaaacgtcatgaggagaattaaaggagtattatcagtaatgaagtttatcatgggtcatcaatgagcatagattggtgtggatcctgtagaccctggtgttttctttgaagtgccctctcctaatgcagaggccttgaagcttacagtatacacttgaaaagtcacagatagctagaattatgatctttgaagttataactgtgatctgaaaatgtgtgtggtggtatgacagcataccattaaatacatttacatcacagctcaaaggactgtgatataatccatttatatcacaactcaaaggactgtgatataatccatttatatcacagctcacagtttctgaaaatgtataaaagaatctataatctagtactgaaattactaaattgggtaagatgatttaaatgattttaattttaacattttatttctagaatatatggctccattttattttatagtgtaaagttgtatttcctaaagtttgtgttttgtcgacagtatcttttaaatgagtcttaaaaataaaggcatattgttcatgtt

SEQ ID NO: 2473 - DNA, 2114 bp, Homo sapiens
  source 1..2114: mol_type = unassigned DNA
acttctggaagattaaagttgtcggacatggtgacagctgagaggagaggaggatttcttgccaggtggagagtcttcaccgtctgttgggtgcatgtgtgcgcccgcagcggcgcggggcgcgtggttctccgcgtggagtctcacctgggacctgagtgaatggctcccaggggctgtgcggggcatccgcctccgccttctccacaggcctgtgtctgtcctggaaagatgctagcaatgggggcgctggcaggattctggatcctctgcctcctcacttatggttacctgtcctggggccaggccttagaagaggaggaagaaggggccttactagctcaagctggagagaaactagagcccagcacaacttccacctcccagccccatctcattttcatcctagcggatgatcagggatttagagatgtgggttaccacggatctgagattaaaacacctactcttgacaagctcgctgccgaaggagttaaactggagaactactatgtccagcctatttgcacaccatccaggagtcagtttattactggaaagtatcagatacacaccggacttcaacattctatcataagacctacccaacccaactgtttacctctggacaatgccaccctacctcagaaactgaaggaggttggatattcaacgcatatggtcggaaaatggcacttgggtttttacagaaaagaatgcatgcccaccagaagaggatttgataccttttttggttcccttttgggaagtggggattactatacacactacaaatgtgacagtcctgggatgtgtggctatgacttgtatgaaaacgacaatgctgcctgggactatgacaatggcatatactccacacagatgtacactcagagagtacagcaaatcttagcttcccataaccccacaaagcctatatttttatatattgcctatcaagctgttcattcaccactgcaagctcctggcaggtatttcgaacactaccgatccattatcaacataaacaggaggagatatgctgccatgctttcctgcttagatgaagcaatcaacaacgtgacattggctctaaagacttatggtttctataacaacagcattatcatttactcttcagataatggtggccagcctacggcaggagggagtaactggcctctcagaggtagcaaaggaacatattgggaaggagggatccgggctgtaggctttgtgcatagcccacttctgaaaaacaagggaacagtgtgtaaggaacttgtgcacatcactgactggtaccccactctcatttcactggctgaaggacagattgatgaggacattcaactagatggctatgatatctgggagaccataagtgagggtcttcgctcaccccgagtagatattttgcataacattgaccccatatacaccaaggcaaaaaatggctcctgggcagcaggctatgggatctggaacactgcaatccagtcagccatcagagtgcagcactggaaattgcttacaggaaatcctggctacagcgactgggtcccccctcagtctttcagcaacctgggaccgaaccggtggcacaatgaacggatcaccttgtcaactggcaaaagtgtatggcttttcaacatcacagccgacccatatgagagggtggacctatctaacaggtatccaggaatcgtgaagaagctcctacggaggctctcacagttcaacaaaactgcagtgccggtcaggtatccccccaaagaccccagaagtaaccctaggctcaatggaggggtctggggaccatggtataaagaggaaaccaagaaaaagaagccaagcaaaaatcaggctgagaaaaagcaaaagaaaagcaaaaaaaagaagaagaaacagcagaaagcagtctcaggtaaaccagcaaatttggctcgataatatcgctggcctaagcgtcaggcttgttttcatgctgtgccactccagagacttctgccacctggccgccacactgaaaactgtcctgctcagtgccaaggtgctactcttgcaagccacacttagagagagtggagatgtttatttctcttgctccttta

SEQ ID NO: 2474 - DNA, 507 bp, Homo sapiens
  source 1..507: mol_type = unassigned DNA
atggctcctgggcagcaggctatgggatctggaacactgcaatccagtcagccatcagagtgcagcactggattgcttacaggaaatcctggctacagcgactgggtcccccctcagtctttcagcaacctgggaccgaaccggtggcacaatgaacggatcaccttgtcaactggcaaaagtgtatggcttttcaacatcacagccgacccatatgagagggtggacctatctaacaggtatccaggaatcgtgaagaagctcctacggaggctctcacagttcaacaaaactgcagtgccggtcaggtatccccccaaagaccccagaagtaaccctaggctcaatggaggggtctggggaccatggtataaagaggaaaccaagaaaaagaagccaagcaaaaatcaggctgagaaaaagcaaaagaaaagcaaaaaaaagaagaagaaacagcagaaagcagtctcaggttcaacttgccattcaggtgttacttgtggataa

SEQ ID NO: 2475 - DNA, 3354 bp, Homo sapiens
  source 1..3354: mol_type = unassigned DNA
aaaagcgggaatttctctgttgcgcatgtgcgcgctctccgcctgataggagttgtagttctgcgggtgaagctcggcgttactatcaagcaaccaaactgcaagctttgggagttgttcgctgtccctgccctgctctgctagggagagaacgccagagggaggcggctggcccggcggcaggctctcagaaccgctaccggcgatgctactgctgtgggtgtcggtggtcgcagccttggcgctggcggtactggcccccggagcaggggagcagaggcggagagcagccaaagcgcccaatgtggtgctggtcgtgagcgactccttcgatggaaggttaacatttcatccaggaagtcaggtagtgaaacttccttttatcaactttatgaagacacgtgggacttcctttctgaatgcctacacaaactctccaatttgttgcccatcacgcgcagcaatgtggagtggcctcttcactcacttaacagaatcttggaataattttaagggtctagatccaaattatacaacatggatggatgtcatggagaggcatggctaccgaacacagaaatttgggaaactggactatacttcaggacatcactccattagtaatcgtgtggaagcgtggacaagagatgttgctttcttactcagacaagaaggcaggcccatggttaatcttatccgtaacaggactaaagtcagagtgatggaaagggattggcagaatacagacaaagcagtaaactggttaagaaaggaagcaattaattacactgaaccatttgttatttacttgggattaaatttaccacacccttacccttcaccatcttctggagaaaattttggatcttcaacatttcacacatctctttattggcttgaaaaagtgtctcatgatgccatcaaaatcccaaagtggtcacctttgtcagaaatgcaccctgtagattattactcttcttatacaaaaaactgcactggaagatttacaaaaaaagaaattaagaatattagagcattttattatgctatgtgtgctgagacagatgccatgcttggtgaaattattttggcccttcatcaattagatcttcttcagaaaactattgtcatatactcctcagaccatggagagctggccatggaacatcgacagttttataaaatgagcatgtacgaggctagtgcacatgttccgcttttgatgatgggaccaggaattaaagccggcctacaagtatcaaatgtggtttctcttgtggatatttaccctaccatgcttgatattgctggaattcctctgcctcagaacctgagtggatactctttgttgccgttatcatcagaaacatttaagaatgaacataaagtcaaaaacctgcatccaccctggattctgagtgaattccatggatgtaatgtgaatgcctccacctacatgcttcgaactaaccactggaaatatatagcctattcggatggtgcatcaatattgcctcaactctttgatctttcctcggatccagatgaattaacaaatgttgctgtaaaatttccagaaattacttattctttggatcagaagcttcattccattataaactaccctaaagtttctgcttctgtccaccagtataataaagagcagtttatcaagtggaaacaaagtataggacagaattattcaaacgttatagcaaatcttaggtggcaccaagactggcagaaggaaccaaggaagtatgaaaatgcaattgatcagtggcttaaaacccatatgaatccaagagcagtttgaacaaaaagtttaaaaatagtgttctagagatacatataaatatattacaagatcataattatgtattttaaatgaaacagttttaataattaccaagttttggccgggcacagtggctcacacctgtaatcccaggactttgggaggctgaggaaagcagatcacaaggtcaagagattgagaccatcctggccaacatggtgaaaccctgtctctactaaaaatacaaaaattagctgggcgcggtggtgcacacctatagtctcagctactcagaggctgaggcaggaggatcgcttgaacccgggaggcagcagttgcagtgagctgagattgcgccactgtactccagcctggcaacagagtgagactgtgtcgcaaaaaaataaaaataaaataataataattaccaatttttcattattttgtaagaatgtagtgtattttaagataaaatgccaatgattataaaatcacatattttcaaaaatggttattatttaggcctttgtacaatttctaacaatttagtggaagtatcaaaagaattgaagcaaatactgtaacagttatgttcctttaaataatagagaatataaaatattgtaataatatgtatcataaaatagttgtatgtgagcatttgatggtgctcgatgagttacttgtatttgatgggattgtttggatgtatttaatgggagtatttggagtatttaacgggatgtaaaccctggatgtacctgattttgttactgttttattttaataggtaatatatatacagggtaaaagcttcaaatggtacaaaagggttaacagtgatcgtgaagtctctgtcctttccctcttccctgccatccagttccccctccaagaagcaagtaccgaaaccacctgcttacgcatttttagagattggccacaaatttataaacaaatgtatatattcctttccccctacacaaacggtaacatactgcacacattgttctgcatgttgcttctttttccttttttttttcacttaacagtagatatctagaggtgaaattactgagtcaagactatatttagcaaaattacactagatactacaaattacctctaaagaaggtatactaactgataatctcaccatcaatgcatgtcttcttatcctttgccaacctaacagataaaaatgttctatttttatttttctttttatgagtaacgtagagcatattttcatgtatttaacagccactggaatctgctttaccatggcctttcctatttctattctttgcctatttttctgttggttgttggtctttgttttgtattacaggtgtgctttagatattagctttttgtaagagatcctgcaaatatcttctttccagtttgtcattgtcatttgtcttttgactttgttctggtattttttgatatgtagaaatttttattttcatgtaagcaaatttatgaatctttgtacaccataagtatatacaattatgatttgtcaattaaaaatattagtacaaaattta

SEQ ID NO: 2476 - DNA, 1115 bp, Homo sapiens
  source 1..1115: mol_type = unassigned DNA
gtgcgcgctctccgcctgataggagttgtagttctgcgggtgaagctcggcgttactatcaagcaaccaaactgcaagctttgggagttgttcgctgtccctgccctgctctgctagggagagaacgccagagggaggcggctggcccggcggcaggctctcagaaccgctaccggcgatgctactgctgtgggtgtcggtggtcgcagccttggcgctggcggtactggcccccggagcaggggagcagaggcggagagcagccaaagcgcccaatgtggtgctggtcgtgagcgactccttcgatggaaggttaacatttcatccaggaagtcaggtagtgaaacttccttttatcaactttatgaagacacgtgggacttcctttctgaatgcctacacaaactctccaatttgttgcccatcacgcgcagcaatgtggagtggcctcttcactcacttaacagaatcttggaataattttaagggtctagatccaaattatacaacatggatggatgtcatggagaggcatggctaccgaacacagaaatttgggaaactggactatacttcaggacatcactccattagtaatcgtgtggaagcgtggacaagagatgttgctttcttactcagacaagaaggcaggcccatggttaatcttatccgtaacaggactaaagtcagagtgatggaaagggattggcagaatacagacaaagcagtaactggttaagaaaggaagcaattaattacactgaaccatttgttatttacttgggattaaatttaccacacccttacccttcaccatcttctggagaaaattttggatcttcaacatttcacacatctctttattggcttgaaaaagtgtctcatgatgccatcaaaatcccaaagtggtcacctttgtcagaaatgcaccctgtagattattactcttcttatacaaaaaactgcactggaagatttacaaaaaaagaaattaagaatattagagcattttattatgctatgtgtgctgagacagatgccatgcttggtgaaattattttggcccttcatcaattagatcttcttcagaaaactattgtcatatactcctcaga

SEQ ID NO: 2477 - DNA, 3543 bp, Homo sapiens
  source 1..3543: mol_type = unassigned DNA
atgtggggttgctgtgtctgtggagccctctttgaggggcagaggctcaggcttctccgggctcctggtgatgggctgtcttcccctttcactgtggtttcccgcaaatggcatcttggacaccacggctcttatcaccccaacttccgtggttttgattactactttggaatcccatatagccatgatatgggctgtactgatactccaggctacaaccaccctccttgtccagcgtgtccacagggtgatggaccatcaaggaaccttcaaagagactgttacactgacgtggccctccctctttatgaaaacctcaacattgtggagcagccggtgaacttgagcagccttgcccagaagtatgctgagaaagcaacccagttcatccagcgtgcaagcaccagcgggaggcccttcctgctctatgtggctctggcccacatgcacgtgcccttacctgtgactcagctaccagcagcgccacggggcagaagcctgtatggtgcagggctctgggagatggacagtctggtgggccagatcaaggacaaagttgaccacacagtgaaggaaaacacattcctctggtttacaggagacaatggcccgtgggctcagaagtgtgagctagcgggcagtgtgggtcccttcactggattttggcaaactcgtcaagggggaagtccagccaagcagacgacctgggaaggagggcaccgggtcccagcactggcttactggcctggcagagttccagttaatgtcaccagcactgccttgttaagcgtgctggacatttttccaactgtggtagccctggcccaggccagcttacctcaaggacggcgctttgatggtgtggacgtctccgaggtgctctttggccggtcacagcctgggcacagggtgctgttccaccccaacagcggggcagctggagagtttggagccctgcagactgtccgcctggagcgttacaaggccttctacattaccggtggagccagggcgtgtgatgggagcacggggcctgagctgcagcataagtttcctctgattttcaacctggaagacgataccgcagaagctgtgcccctagaaagaggtggtgcggagtaccaggctgtgctgcccgaggtcagaaaggttcttgcagacgtcctccaagacattgccaacgacaacatctccagcgcagattacactcaggacccttcagtaactccctgctgtaatccctaccaaattgcctgccgctgtcaagccgcataacagaccaatttttattccacgaggaggagtacctggaaattaggcaagtttgcttccaaatttcatttttaccctctttacaaacacacgctttagtttagtcttggagtttagttttggagttagccttgcatatcccttctgtatcctgtccctcctccacgccgacccgagagcagctgagctgcgctggctctgggcagggagtgtgccttaatgggaagcacacgggctttggagtcaggcacaggtgccagctccagcttttgaacttgggcaattgtttaacctaacctgcaagttgattttgagggttaaataaaggcatacatgaaaatgcctggcaaattacctgacacagagcagacattcaatacattttagtttccttgtttctctggttcccagtttctctggtcattttggtgtaaatccattctaattagtatttagggcagagcttctctctcttttctctttttttccttccacaaaccagtgtactcactggtctccatctttaatatgcaaacaaatcacctgggatcttgtgagaatccggattccgtctcagtagggctcgagtagatcctgaaatcctacatttctatcaaacaatgccttgaggagcacagatttagaccaaagttaggtcgttttccagatctcagagcagacgagtccatggataagtctgtggcccaatccccttcctctccttttaagggtgaaatgactgcatttaaaagaagttaaagagttcctcctgtcccctataaccacaaggaaacaaaaaaatatataaaaacctcaaaaatgcattgccatgattttattattagtgtccaaaatgggactcccaagtaataaatgatttattccagccacagccaaaaaagactttgcctggctaaaagagtctctctctaagtatgtaatatacaagaaatacaattcaaagagatgttcctataagtacattttttacacggcatatatttaaaaaggaggccccttttaatataaaattccggttatataccaatatggttaattagcatttacactatagtttgaacgtattttaaatagcatgatgtgtatacaatgtctcccgcgcccattggcaaccagggtcgtgggaagcttggtgaggagttaaccaggtcctgtggtttaagcagtggagcacccgggattcctgcccccctttctgctcacacaattgcactccattcttccgccttccttgttttctccaaaaccacctgataggggggatgtcctgatttctgaggtgtgcttctcatcatgactgcttcgttttgcccttctgatttccacggcacaagattatctaccaaaatcaaaacagaatggccttactcttctcaggaagaggctggtaggcaggtgcattatcaacaggtctgtgcccatgcagagtgagcagggagaggctgggcactgtggaatttttctgtctgaactcgctcatggccacagaatggtcacccagcttatttaggtgtagacaagtatgacacagttctagaaaatactgactataaaaatgtctctgtgtgtgtgtgtatgtatttatatgtatatgtatatatttttaaaaggctcatcttacttgtaaacatggactgctcaatcactattaaaaagtcagtttaggctgggcgcggtggctcacgcctgtaatcccagaactttgggaggctgaggtgggtggatcactaggtcaggagtttgagaccagcctggccaacatggtgaaaccccatcgctactaaaaaatacaaaaattagccgggcatggtggcgctcacctgtaatcccagctactcgggaggctgaggcaggagagaatcgcttgaaccggggaggtggaggctgcagtgagccgagatcgcaccactgcactccagcctgggcgatggagcaagactccatctcaaaaaaaaaaaagtcagtttaggctgggcgcagtggctcacacctgtaatcccagcactttaggaggctgaggggggtgatcacctgaggtcaggagtttgagaccagcctggccaacatggtgaaatcctgtctctactaaaaatacaaaatttagctgggcatggtagcatgcctgaaaccccagctacttgggaggctgaggcactagaatcacttgaacctaggaggtggaggttgcagtgagtggagatcacgccaacacattctagcctgagggacagagtgagactctatcatctc

SEQ ID NO: 2478 - DNA, 2770 bp, Homo sapiens
  source 1..2770: mol_type = unassigned DNA
ggctgcgcccaggccggcgggcccagcagctgcgaaccgccggcgcaccacctgtttccgcgcccggggacttccccggcggggctcagaagtgtgggatcggtcgcttggcttcccctggcgtcagcgacccagggtaacctcctccactgctgcgtgccgtgcaggcctgcctgtgtgagagccacgtgtgccgcgctctgggcacagccttggaaagtcaggaccgcgacggcagcagagcagaaaccttacagaaacatgaagccctcaaccatctgctactcagttattcggggctgacggcggcttctagaacatccaggtgttctgcagatgcgagaactcatcctgtagtcaccagatggagtcccaaacagccaagcagatgtaaggcctgtgctgtggctctgaggccctgaatacagaagggtcactttcttagtggccaaagagcagttgttgacattgatgtctaattattgaacacgaccagtcattttactgagctgcggtgaggaaacactgaccatagaagatcaagccaaatgagggattgcaaatttcctgattcttttgaattaggattccagatgggggcctcatttctacagcccccaacattcctatagccgttatcactgccatcaccactgccaccagcatcttcttgcagattccacccctgctccccagagacttcctgctttgaaagtgagcagaaaggaagctctcagaaaaatctctagtggtggctgccgtcgctccagacaatcggaatcctgccttcaccaccatgggctggctttttctaaaggttttgttggcgggagtgagtttctcaggatttctttatcctcttgtggatttttgcatcagtgggaaaacaagaggacagaagccaaactttgtgattattttggccgatgacatggggtggggtgacctgggagcaaactgggcagaaacaaaggacactgccaaccttgataagatggcttcggagggaatgaggtttgtggatttccatgcagctgcctccacctgctcaccctcccgggcttccttgctcaccggccggcttggccttcgcaatggagtcacacgcaactttgcagtcacttctgtgggaggccttccgctcaacgagaccaccttggcagaggtgctgcagcaggcgggttacgtcactgggataataggcaaatggcatcttggacaccacggctcttatcaccccaacttccgtggttttgattactactttggaatcccatatagccatgatatgggctgtactgatactccaggctacaaccaccctccttgtccagcgtgtccacagggtgatggaccatcaaggaaccttcaaagagactgttacactgacgtggccctccctctttatgaaaacctcaacattgtggagcagccggtgaacttgagcagccttgcccagaagtatgctgagaaagcaacccagttcatccagcgtgcaagcaccagcgggaggcccttcctgctctatgtggctctggcccacatgcacgtgcccttacctgtgactcagctaccagcagcgccacggggcagaagcctgtatggtgcagggctctgggagatggacagtctggtgggccagatcaaggacaaagttgaccacacagtgaaggaaaacacattcctctggtttacaggagacaatggcccgtgggctcagaagtgtgagctagcgggcagtgtgggtcccttcactggattttggcaaactcgtcaagggggaagtccagccaagcagacgacctgggaaggagggcaccgggtcccagcactggcttactggcctggcagagttccagttaatgtcaccagcactgccttgttaagcgtgctggacatttttccaactgtggtagccctggcccaggccagcttacctcaaggacggcgctttgatggtgtggacgtctccgaggtgctctttggccggtcacagcctgggcacagggtgctgttccaccccaacagcggggcagctggagagtttggagccctgcagactgtccgcctggagcgttacaaggccttctacattaccggtggagccagggcgtgtgatgggagcacggggcctgagctgcagcataagtttcctctgattttcaacctggaagacgataccgcagaagctgtgcccctagaaagaggtggtgcggagtaccaggctgtgctgcccgaggtcagaaaggttcttgcagacgtcctccaagacattgccaacgacaacatctccagcgcagattacactcaggacccttcagtaactccctgctgtaatccctaccaaattgcctgccgctgtcaagccgcataacagaccaatttttattccacgaggaggagtacctggaaattaggcaagtttgcttccaaatttcatttttaccctctttacaaacacacgctttagtttagtcttggagtttagttttggagttagccttgcatatcccttctgtatcctgtccctcctccacgccgacccgagagcagctgagctgcgctggctctgggcagggagtgtgccttaatgggaagcacacgggctttggagtcaggcacaggtgccagctccagcttttgaacttgggcaattgtttaacctaacctgcaagttgattttgagggttaaataaaggcatacatgaaaatgcctggcaaattacctgacacagagcagacattcaatacattttagtttccttgtttc

SEQ ID NO: 2479 - DNA, 2362 bp, Homo sapiens
  source 1..2362: mol_type = unassigned DNA
gaaataggaaagctgcaaaacactgtggagtgctcccgtgtaaataaaaagaggaaaaaagtttctcaagtcgccgctgcacgacgtctggccggcgctggagcgggggtctgcgctctcccgagcggccgcgcgctggactttattgtgccgcaaccagccccagttcccattgtttgtgtttttttcaaaatatggcaaaggttcaggtgaacaatgtagtggtgctggataacccttctcctttctacaacccgttccagttcgagatcaccttcgagtgcatcgaggacctgtctgaagacttggaatggaaaattatctatgtgggctctgcagaaagtgaagaatacgatcaagttttagactctgttttagtgggtcctgttcccgcaggaaggcatatgtttgtatttcaggctgatgcacctaatccaggactcattccagatgcagatgcagtaggcgtaactgttgtgctaattacttgtacctatcgaggacaagaatttattagagttggctattatgtaaataatgaatatactgagacagaattaagggaaaatccaccagtaaaaccagacttttctaagcttcaaaggaatattttggcatctaatcccagggtcacaagattccacattaattgggaagataacacagaaaaactggaagatgcagagagcagtaatccaaatctacagtcacttctttcaacagatgcattaccttcagcatcaaagggatggtccacatcagaaaactcactaaatgtcatgttagaatcccacatggactgcatgtgaccacctaccatccctttagtacaaattaagctattaaaaatacacagaactatttccctgaaattccgtaagtacatagtcaaaacacaatgtgaagaatttgtttaaaaacatcctgtagaaagtttataagaaaaccagtatttgaacaaattgtggaatataaatacaactatttttaagtaatttttttctctaatgtgttattttatttgttctgaaactaatctgattaaagcatatatattattttcttctcctttatatgtaatgaaagcacttataaagaaacaggaatcattagaccaggttgtaaagatgtcttggcctcccagacagtctttggaccactattttactggcctttgaaagaacaaagtttacttcaactaaaatgtttcttcctgtgaagacatatggtatcattttaatttaaggggcagatttccattcttttttggcatgtccttaaaaagaggatttgaaatcaactatatgctaccaagaactttaggatccaattttccaagccaccgtgaagcctcttatggctactattatagttcatgagatgttggacagcatttggtttgtttggtaagagaagaacaaatatggctaattgttaataaggtcccctggctatggtttttgttcttataacagagtttagaatatcagagcatttcttgaatcatacatcattattgtccagtgaattcaagaccaaatacaatatcgggagaaaatacaaactccctgtgtttaagaataggggattacaatggctcaaattggttcatttgatttctaaaaataccatgacctttaaaaattcttttaatagatcatgttattggcagtatttatataaaaaccatggatttagaaaggtatatttagctttattataatagatacgttactattttggaaatatatatattttcacacctgtagtactcttccccatttcctctgacactcatgcagaatgagatcaggcatatttgtggttgacatactctagatagcttttccaacaaatctttgaaaagcaatcttggaaaggaattcattaactaaatggggtaaaaggtttctttttctttgagagttaagtccttcctcaaaaaattttcttatgctccataaaattgaggtagaatattttcattattcttgcagctaagcaagacagccatatgatgcaggttatgcagtgccttcatatctaaaacttttatactgcactttttaaagcttttatgttgaggaaaggaaaagggcatttgtctaaacatggattctgagttgtatatatttcctatcattctaaaaaagtgaatttgtgaagcaaagttttgccagatgttaaactttgaatttaatataccagattattaaaatattgtccattaactagttcatagattttaaaagtaaaatacttctgactgttaaaactatataaagaaaatctcatttgtctaattgcaattaaaagaaaaatgttaaaatattaaaatgaaaataaaagcattactttccaa

SEQ ID NO: 2480 - DNA, 2059 bp, Homo sapiens
  source 1..2059: mol_type = unassigned DNA
cgctgcgcgctgcgggatgcatctcccggaaaagcgaggcgaggggcgggccacgccggtgcgggaaccctcaggattggccagaaggaggccggcgctgtgactccgtccattcccgccgttgacatccaagtcggagacgctggggattggtttccagcggacacgctaagaagcttggagatagtttcgccctcctcacacgctgcggagagggagctccgctgattggtccgaggagtctgggcgcgcgccgatcggcgctccaggactggctgagggggtgcgcgcgccgccagggagcgttggcggtgattggccagagggcggaggccggctatttgaaggcggcgcgcggactaggtgcgcacttcagttctcggagagaagaggcgggagtggacctggtcagccctaccccactgaccccaccggacccaggcgcggcctccgccacagccacagcccctgcccctgctgcggcgcggcgaggcgaggcgatggccaaggtgtcggtgctgaacgtggcggtcctggagaacccgagccctttccacagccccttccggttcgagatcagcttcgagtgcagtgaagccctggcggacgacctggagtggaagatcatttatgttggctcggctgagagtgaggaatttgatcagatcctagactcggtgctggtgggccctgtgccagcagggagacacatgtttgtctttcaggccgacgcccccaacccatccctcatcccagagactgatgccgtgggtgtgactgtggtcctcatcacctgcacctaccatggacaggagttcatccgagtgggctactacgtcaacaacgagtacctcaaccctgagctgcgtgagaacccgcccatgaagccagatttctcccagctccagcggaacatcttggcctcgaacccccgggtgacccgcttccatatcaactgggacaacaacatggacaggctggaggccatagagacccaggacccctccctgggctgcggcctcccactcaactgcactcctatcaagggcttggggctccctggctgcatccctggcctcctccctgagaactccatggactgcatctaactgcaggaacccagagtgtcccagcacgccgggaggggcaaccaggcctcccagcgagtcctgcagggcccatctagaggactttgggggccatcagctgcaatccaggtctgtcaaactcagcccctaggaaagaacaggccttgggtctcccctagtcctggccagaaggatgatctcgcttttcctctacaggcctataagaagcaggtacttcagttctaaattctgacttgtgttcttttcgtcttcataaattctaactaaggccactgtgccactgtgcacccttgagtaccattgatccaaagctttcccacagacctccctggcccacctagaggctttcttggtcagtgcctgtcaaggctccagtcctgctgagccaaaggctttgtcattcctttctcttcctgtacatctgagcagacccactccagctttctggtgtcacaggcgggaatgttagttagtaggtagacttagatcccatttctgtcctgctcccaggaagattcttaggtcctcttcaatccagcagcccctcccagaggtgtgatcagcaggatgctgaggaaccatgttgcctttcctgtcaatcacagccaccttcctgttatctcctaaatggatctggcttttcctggaggctgccatggttggaagatggtatcagagggcctgcctgggcagtctgtctccgggccagggtcagggaccctctgcctctggcagccttaacctgtcctctgctaggaccagggtgatttcaagccagggaagcaactgggaccctgaaaactgtccctccccagcccgctccccctctctgtgccctggtccccttgctgccatgtggatgctgttgtgattgctgtttgtatattatcaaaatgtttttatattaaaaatgtttggtctgaaaattaaaagcacttcatttagaatga

SEQ ID NO: 2481 - DNA, 2482 bp, Homo sapiens
  source 1..2482: mol_type = unassigned DNA
cacagcaacgcgcgcgagagaagagagtattctcgcgagaagtccaggggtggccgtgatggcggcggcaggagcaggacctggccaggaagcgggtgccgggcctggcccaggagcggtcgcaaatgcaacaggggcagaagagggggagatgaagccggtggcagcgggagcagccgctcctcctggagaggggatctctgctgctccgacagttgagcccagttccggggaggctgaaggcggggaggcaaacttggtcgatgtaagcggtggcttggagacagaatcatctaatggaaaagatacactagaaggtgctggggatacatcagaggtgatggatactcaggcgggctccgtggatgaagagaatggccgacagttgggtgaggtagagctgcaatgtgggatttgtacaaaatggttcacggctgacacatttggcatagatacctcatcctgtctacctttcatgaccaactacagttttcattgcaacgtctgccatcacagtgggaatacctatttcctccggaagcaagcaaacttgaaggaaatgtgccttagtgctttggccaacctgacatggcagtcccgaacacaggatgaacatccgaagacaatgttctccaaagataaggatattataccatttattgataaatactgggagtgcatgacaaccagacagagacctgggaaaatgacttggccaaataacattgttaaaacaatgagtaaagaaagagatgtattcttggtaaaggaacacccagatccaggcagtaaagatccagaagaagattaccccaaatttggacttttggatcaggaccttagtaacattggtcctgcttatgacaaccaaaaacagagcagtgctgtgtctactagtgggaatttaaatgggggaattgcagcaggaagcagcggaaaaggacgaggagccaagcgcaaacagcaggatggagggaccacagggaccaccaagaaggcccggagtgaccctttgttttctgctcagcgccttccccctcatggctacccattggaacacccgtttaacaaagatggctatcggtatattctagctgagcctgatccgcacgcccctgaccccgagaagctggaacttgactgctgggcaggaaaacctattcctggagacctctacagagcctgcttgtatgaacgggttttgttagccctacatgatcgagctccccagttaaagatctcagatgaccggctgactgtggttggagagaagggctactctatggtgagggcctctcatggagtacggaaaggtgcctggtattttgaaatcactgtggatgagatgccaccagataccgctgccagactgggttggtcccagcccctaggaaaccttcaagctcctttaggttatgataaatttagctattcttggcggagcaaaaagggaaccaagttccaccagtccattggcaaacactactcttctggctatggacagggagacgtcctgggattttatattaatcttcctgaagacacagagacagccaagtcattgccagacacatacaaagataaggctttgataaaattcaagagttatttgtattttgaggaaaaagactttgtggataaagcagagaagagcctgaagcagactccccatagtgaggtttccattaactttggaccatgcttcaagtatcctccgaaggatctcacttaccgccctatgagtgacatgggctggggcgccgtggtagagcacaccctggctgacgtcttgtatcacgtggagacagaagtggatgggaggcgcagtcccccatgggaaccctgaccaggtccctcttttctgtcaaggactttctgggaataatactgggggttttgtttttgtttttgaactgtctcaaatgttctcccaaagatgctaaaaacacagcctctccttttagcaagttaaaaggctgggtaggactgcgggagactgcctgcctttcaccattttctccccacttccagtgactgctcttattttgtgtaccataagccaacaaccgctgactccaggattgcataagccccctgtgaaatcggtgctgtactgcataccctgccagctgtgacttgttatcctactatattttctaaggagtgaataatattgtccgagtaactaacttatttaaaagacatttccttctgtgggcattgactgtatcccacctgttttccaaggaaatggtaacctgtttctgagaacacctgaaatcaatggctatacattccaaaccaatctaaacgctatttccttttggtgtgggtttggttttgttcattttgaaatacacttttgaacactgagatccgtaaaactactagatctctggaagtgtaattgtgaaagaaacttgcttgcagctttaacaaaatgagaaacttcccaaataaaacttgttttgaagtttatgtg

SEQ ID NO: 2482 - DNA, 2835 bp, Homo sapiens
  source 1..2835: mol_type = unassigned DNA
gcagaatatccagtcgtagccacgaaaatacgccgcgtcagtccctgactcgaaaggaagtcctccagagagccgcactaaccatctagcttcctccaccttcagcctgccaggcccgcggccaccgccggcgcgggaggccggcccacctctgcccgcgcgcctggccttaaagcggtcgtggaattatgcttcctcaggcaggcggtggacgcaccgcgggctttttctgtttgaagactacagcgtcacacagcaacgcgcgcgagagaagagagtattctcgcgagaagtccaggggtggccgtgatggcggcggcaggagcaggacctggccaggaagcgggtgccgggcctggcccaggagcggtcgcaaatgcaacaggggcagaagagggggagatgaagccggtggcagcgggagcagccgctcctcctggagaggggatctctgctgctccgacagttgagcccagttccggggaggctgaaggcggggaggcaaacttggtcgatgtaagcggtggcttggagacagaatcatctaatggaaaagatacactagaaggtgctggggatacatcagaggtgatggatactcaggcgggctccgtggatgaagagaatggccgacagttgggtgaggtagagctgcaatgtgggatttgtacaaaatggttcacggctgacacatttggcatagatacctcatcctgtctacctttcatgaccaactacagttttcattgcaacgtctgccatcacagtgggaatacctatttcctccggaagcaagcaaacttgaaggaaatgtgccttagtgctttggccaacctgacatggcagtcccgaacacaggatgaacatccgaagacaatgttctccaaagataaggatattataccatttattgataaatactgggagtgcatgacaaccagacagagacctgggaaaatgacttggccaaataacattgttaaaacaatgagtaaagaaagagatgtattcttggtaaaggaacacccagatccaggcagtaaagatccagaagaagattaccccaaatttggacttttggatcaggaccttagtaacattggtcctgcttatgacaaccaaaaacagagcagtgctgtgtctactagtgggaatttaaatgggggaattgcagcaggaagcagcggaaaaggacgaggagccaagcgcaaacagcaggatggagggaccacagggaccaccaagaaggcccggagtgaccctttgttttctgctcagcgccttccccctcatggctacccattggaacacccgtttaacaaagatggctatcggtatattctagctgagcctgatccgcacgcccctgaccccgagaagctggaacttgactgctgggcaggaaaacctattcctggagacctctacagagcctgcttgtatgaacgggttttgttagccctacatgatcgagctccccagttaaagatctcagatgaccggctgactgtggttggagagaagggctactctatggtgagggcctctcatggagtacggaaaggtgcctggtattttgaaatcactgtggatgagatgccaccagataccgctgccagactgggttggtcccagcccctaggaaaccttcaagctcctttaggttatgataaatttagctattcttggcggagcaaaaagggaaccaagttccaccagtccattggcaaacactactcttctggctatggacagggagacgtcctgggattttatattaatcttcctgaagacacagagacagccaagtcattgccagacacatacaaagataaggctttgataaaattcaagagttatttgtattttgaggaaaaagactttgtggataaagcagagaagagcctgaagcagactccccatagtgagataatattttataaaaatggtgtcaatcaaggtgtggcttacaaagatatttttgagggggtttacttcccagccatctcactgtacaagagctgcacggtttccattaactttggaccatgcttcaagtatcctccgaaggatctcacttaccgccctatgagtgacatgggctggggcgccgtggtagagcacaccctggctgacgtcttgtatcacgtggagacagaagtggatgggaggcgcagtcccccatgggaaccctgaccaggtccctcttttctgtcaaggactttctgggaataatactgggggttttgtttttgtttttgaactgtctcaaatgttctcccaaagatgctaaaaacacagcctctccttttagcaagttaaaaggctgggtaggactgcgggagactgcctgcctttcaccattttctccccacttccagtgactgctcttattttgtgtaccataagccaacaaccgctgactccaggattgcataagccccctgtgaaatcggtgctgtactgcataccctgccagctgtgacttgttatcctactatattttctaaggagtgaataatattgtccgagtaactaacttatttaaaagacatttccttctgtgggcattgactgtatcccacctgttttccaaggaaatggtaacctgtttctgagaacacctgaaatcaatggctatacattccaaaccaatctaaacgctatttccttttggtgtgggtttggttttgttcattttgaaatacacttttgaacactgagatccgtaaaactactagatctctggaagtgtaattgtgaaagaaacttgcttgcagctttaacaaaatgagaaacttcccaaataaaacttgttttgaagtttatgtgaca

SEQ ID NO: 2483 - DNA, 2678 bp, Homo sapiens
  source 1..2678: mol_type = unassigned DNA
atcccgcggctcctggagccctgccgcccgccccctgcgaacccaggccccgccgccaatggctcgccctgcctctgcgccgcttggcccgtcccctctcaagcatatctcggataacgccccttccgcacctttcacgggcggtgggagctgaggctcctgtcgttatctctgatccttgcaccctggcaggaagctggtagctcacactttaacgggaggccttcacatattccagaaaagaaaccactttgcagtgccagactggaagaagtaacggtcactctgaaaacagggtgggagagctgcctctctttgaacctctcccaggaccaactctaacccagggaggcaaacttggtcgatgtaagcggtggcttggagacagaatcatctaatggaaaagatacactagaaggtgctggggatacatcagaggtgatggatactcaggcgggctccgtggatgaagagaatggccgacagttgggtgaggtagagctgcaatgtgggatttgtacaaaatggttcacggctgacacatttggcatagatacctcatcctgtctacctttcatgaccaactacagttttcattgcaacgtctgccatcacagtgggaatacctatttcctccggaagcaagcaaacttgaaggaaatgtgccttagtgctttggccaacctgacatggcagtcccgaacacaggatgaacatccgaagacaatgttctccaaagataaggatattataccatttattgataaatactgggagtgcatgacaaccagacagagacctgggaaaatgacttggccaaataacattgttaaaacaatgagtaaagaaagagatgtattcttggtaaaggaacacccagatccaggcagtaaagatccagaagaagattaccccaaatttggacttttggatcaggaccttagtaacattggtcctgcttatgacaaccaaaaacagagcagtgctgtgtctactagtgggaatttaaatgggggaattgcagcaggaagcagcggaaaaggacgaggagccaagcgcaaacagcaggatggagggaccacagggaccaccaagaaggcccggagtgaccctttgttttctgctcagcgccttccccctcatggctacccattggaacacccgtttaacaaagatggctatcggtatattctagctgagcctgatccgcacgcccctgaccccgagaagctggaacttgactgctgggcaggaaaacctattcctggagacctctacagagcctgcttgtatgaacgggttttgttagccctacatgatcgagctccccagttaaagatctcagatgaccggctgactgtggttggagagaagggctactctatggtgagggcctctcatggagtacggaaaggtgcctggtattttgaaatcactgtggatgagatgccaccagataccgctgccagactgggttggtcccagcccctaggaaaccttcaagctcctttaggttatgataaatttagctattcttggcggagcaaaaagggaaccaagttccaccagtccattggcaaacactactcttctggctatggacagggagacgtcctgggattttatattaatcttcctgaagacacagagacagccaagtcattgccagacacatacaaagataaggctttgataaaattcaagagttatttgtattttgaggaaaaagactttgtggataaagcagagaagagcctgaagcagactccccatagtgagataatattttataaaaatggtgtcaatcaaggtgtggcttacaaagatatttttgagggggtttacttcccagccatctcactgtacaagagctgcacggtttccattaactttggaccatgcttcaagtatcctccgaaggatctcacttaccgccctatgagtgacatgggctggggcgccgtggtagagcacaccctggctgacgtcttgtatcacgtggagacagaagtggatgggaggcgcagtcccccatgggaaccctgaccaggtccctcttttctgtcaaggactttctgggaataatactgggggttttgtttttgtttttgaactgtctcaaatgttctcccaaagatgctaaaaacacagcctctccttttagcaagttaaaaggctgggtaggactgcgggagactgcctgcctttcaccattttctccccacttccagtgactgctcttattttgtgtaccataagccaacaaccgctgactccaggattgcataagccccctgtgaaatcggtgctgtactgcataccctgccagctgtgacttgttatcctactatattttctaaggagtgaataatattgtccgagtaactaacttatttaaaagacatttccttctgtgggcattgactgtatcccacctgttttccaaggaaatggtaacctgtttctgagaacacctgaaatcaatggctatacattccaaaccaatctaaacgctatttccttttggtgtgggtttggttttgttcattttgaaatacacttttgaacactgagatccgtaaaactactagatctctggaagtgtaattgtgaaagaaacttgcttgcagctttaacaaaatgagaaacttcccaaataaaacttgttttgaagttta

SEQ ID NO: 2484 - DNA, 2433 bp, Homo sapiens
  source 1..2433: mol_type = unassigned DNA
ggagctgaggctcctgtcgttatctctgatccttgcaccctggcaggaagctggtagctcacactttaacgggaggccttcacatattccagaaaagaaaccactttgcagtgccagactggaagaagtaacggtcactctgaaaacagggtgggagagctgcctctctttgaacctctcccaggaccaactctaacccagggaggcaaacttggtcgatgtaagcggtggcttggagacagaatcatctaatggaaaagatacactagaaggtgctggggatacatcagaggtgatggatactcaggcgggctccgtggatgaagagaatggccgacagttgggtgaggtagagctgcaatgtgggatttgtacaaaatggttcacggctgacacatttggcatagatacctcatcctgtctacctttcatgaccaactacagttttcattgcaacgtctgccatcacagtgggaatacctatttcctccggaagcaagcaaacttgaaggaaatgtgccttagtgctttggccaacctgacatggcagtcccgaacacaggatgaacatccgaagacaatgttctccaaagataaggatattataccatttattgataaatactgggagtgcatgacaaccagacagagacctgggaaaatgacttggccaaataacattgttaaaacaatgagtaaagaaagagatgtattcttggtaaaggaacacccagatccaggcagtaaagatccagaagaagattaccccaaatttggacttttggatcaggaccttagtaacattggtcctgcttatgacaaccaaaaacagagcagtgctgtgtctactagtgggaatttaaatgggggaattgcagcaggaagcagcggaaaaggacgaggagccaagcgcaaacagcaggatggagggaccacagggaccaccaagaaggcccggagtgaccctttgttttctgctcagcgccttccccctcatggctacccattggaacacccgtttaacaaagatggctatcggtatattctagctgagcctgatccgcacgcccctgaccccgagaagctggaacttgactgctgggcaggaaaacctattcctggagacctctacagagcctgcttgtatgaacgggttttgttagccctacatgatcgagctccccagttaaagatctcagatgaccggctgactgtggttggagagaagggctactctatggtgagggcctctcatggagtacggaaaggtgcctggtattttgaaatcactgtggatgagatgccaccagataccgctgccagactgggttggtcccagcccctaggaaaccttcaagctcctttaggttatgataaatttagctattcttggcggagcaaaaagggaaccaagttccaccagtccattggcaaacactactcttctggctatggacagggagacgtcctgggattttatattaatcttcctgaagacacagagacagccaagtcattgccagacacatacaaagataaggctttgataaaattcaagagttatttgtattttgaggaaaaagactttgtggataaagcagagaagagcctgaagcagactccccatagtgaggtttccattaactttggaccatgcttcaagtatcctccgaaggatctcacttaccgccctatgagtgacatgggctggggcgccgtggtagagcacaccctggctgacgtcttgtatcacgtggagacagaagtggatgggaggcgcagtcccccatgggaaccctgaccaggtccctcttttctgtcaaggactttctgggaataatactgggggttttgtttttgtttttgaactgtctcaaatgttctcccaaagatgctaaaaacacagcctctccttttagcaagttaaaaggctgggtaggactgcgggagactgcctgcctttcaccattttctccccacttccagtgactgctcttattttgtgtaccataagccaacaaccgctgactccaggattgcataagccccctgtgaaatcggtgctgtactgcataccctgccagctgtgacttgttatcctactatattttctaaggagtgaataatattgtccgagtaactaacttatttaaaagacatttccttctgtgggcattgactgtatcccacctgttttccaaggaaatggtaacctgtttctgagaacacctgaaatcaatggctatacattccaaaccaatctaaacgctatttccttttggtgtgggtttggttttgttcattttgaaatacacttttgaacactgagatccgtaaaactactagatctctggaagtgtaattgtgaaagaaacttgcttgcagctttaacaaaatgagaaacttcccaaataaaacttgttttgaagttta

SEQ ID NO: 2485 - DNA, 2194 bp, Homo sapiens
  source 1..2194: mol_type = unassigned DNA
gatggcggcggcaggagcaggacctggccaggaagcgggtgccgggcctggcccaggagcggtcgcaaatgcaacaggggcagaagagggggagatgaagccggtggcagcgggagcagccgctcctcctggagaggggatctctgctgctccgacagttgagcccagttccggggaggctgaaggcggggaggcaaacttggtcgatgtaagcggtggcttggagacagaatcatctaatggaaaagatacactaatcctgtctacctttcatgaccaactacagttttcattgcaacgtctgccatcacagtgggaatacctatttcctccggaagcaagcaaacttgaaggaaatgtgccttagtgctttggccaacctgacatggcagtcccgaacacaggatgaacatccgaagacaatgttctccaaagataaggatattataccatttattgataaatactgggagtgcatgacaaccagacagagacctgggaaaatgacttggccaaataacattgttaaaacaatgagtaaagaaagagatgtattcttggtaaaggaacacccagatccaggcagtaaagatccagaagaagattaccccaaatttggacttttggatcaggaccttagtaacattggtcctgcttatgacaaccaaaaacagagcagtgctgtgtctactagtgggaatttaaatgggggaattgcagcaggaagcagcggaaaaggacgaggagccaagcgcaaacagcaggatggagggaccacagggaccaccaagaaggcccggagtgaccctttgttttctgctcagcgccttccccctcatggctacccattggaacacccgtttaacaaagatggctatcggtatattctagctgagcctgatccgcacgcccctgaccccgagaagctggaacttgactgctgggcaggaaaacctattcctggagacctctacagagcctgcttgtatgaacgggttttgttagccctacatgatcgagctccccagttaaagatctcagatgaccggctgactgtggttggagagaagggctactctatggtgagggcctctcatggagtacggaaaggtgcctggtattttgaaatcactgtggatgagatgccaccagataccgctgccagactgggttggtcccagcccctaggaaaccttcaagctcctttaggttatgataaatttagctattcttggcggagcaaaaagggaaccaagttccaccagtccattggcaaacactactcttctggctatggacagggagacgtcctgggattttatattaatcttcctgaagacacagagacagccaagtcattgccagacacatacaaagataaggctttgataaaattcaagagttatttgtattttgaggaaaaagactttgtggataaagcagagaagagcctgaagcagactccccatagtgagataatattttataaaaatggtgtcaatcaaggtgtggcttacaaagatatttttgagggggtttacttcccagccatctcactgtacaagagctgcacggtttccattaactttggaccatgcttcaagtatcctccgaaggatctcacttaccgccctatgagtgacatgggctggggcgccgtggtagagcacaccctggctgacgtcttgtatcacgtggagacagaagtggatgggaggcgcagtcccccatgggaaccctgaccaggtccctcttttctgtcaaggactttctgggaataatactgggggttttgtttttgtttttgaactgtctcaaatgttctcccaaagatgctaaaaacacagcctctccttttagcaagttaaaaggctgggtaggactgcgggagactgcctgcctttcaccattttctccccacttccagtgactgctcttattttgtgtaccataagccaacaaccgctgactccaggattgcataagccccctgtgaaatcggtgctgtactgcataccctgccagctgtgacttgttatcctactatattttctaaggagtgaataatattgtccgagtaactaacttatttaaaagacatttccttctgtgggcattgactgtatcccacctgttttccaaggaaatggtaacctgtttctgagaacacctgaaatcaatggctatacattcc

SEQ ID NO: 2486 - DNA, 1504 bp, Homo sapiens
  source 1..1504: mol_type = unassigned DNA
cccaaacggtgcacggaagagtgaggtgactggcatgtgtgggggcaacacgattctcctccctggggagcagagcagaggcaacccatcccccactcccacccccacactcccctaagttccaatccatttccacctctgtttactgtccaaagtcccgggcactggagatgccacgtttggcgtgcttggacacacagacacgcagacacagagacaccggggcccagggccctcctatggaccctgcccgctcccctcccattgtccacggctgtccgcccacccccattctccaagcttcagccccctccttagttcggcatctgcacagcactgaagaacctgggaatcagaccctgagaccctgagcaatcccaggtccagcgccagccctatcatgaccaaggagtatcaagaccttcagcatctggacaatgaggagagtgaccaccatcagctcagaaaagggccacctcctccccagcccctcctgcagcgtctctgctccggacctcgcctcctcctgctctccctgggcctcagcctcctgctgcttgtggttgtctgtgtgatcggatcccaaaactcccagctgcaggaggagctgcggggcctgagagagacgttcagcaacttcacagcgagcacggaggcccaggtcaagggcttgagcacccagggaggcaatgtgggaagaaagatgaagtcgctagagtcccagctggagaaacagcagaaggacctgagtgaagatcactccagcctgctgctccacgtgaagcagttcgtgtctgacctgcggagcctgagctgtcagatggcggcgctccagggcaatggctcagaaaggacctgctgcccggtcaactgggtggagcacgagcgcagctgctactggttctctcgctccgggaaggcctgggctgacgccgacaactactgccggctggaggacgcgcacctggtggtggtcacgtcctgggaggagcagaaatttgtccagcaccacataggccctgtgaacacctggatgggcctccacgaccaaaacgggccctggaagtgggtggacgggacggactacgagacgggcttcaagaactggaggccggagcagccggacgactggtacggccacgggctcggaggaggcgaggactgtgcccacttcaccgacgacggccgctggaacgacgacgtctgccagaggccctaccgctgggtctgcgagacagagctggacaaggccagccaggagccacctctcctttaatttatttcttcaatgcctcgacctgccgcaggggtccgggattgggaatccgcccatctgggggcctcttctgctttctcgggaattttcatctaggattttaagggaaggggaaggatagggtgatgttccgaaggtgaggagcttgaaacccgtggcgctttctgcagtttgcaggttatcattgtgaactttttttttttaagagtaaaaagaaatatacctaaa

SEQ ID NO: 2487 - DNA, 759 bp, Homo sapiens
  source 1..759: mol_type = unassigned DNA
atgaccaaggagtatcaagaccttcagcatctggacaatgaggagagtgaccaccatcagctcagaaaagactcccagctgcaggaggagctgcggggcctgagagagacgttcagcaacttcacagcgagcacggaggcccaggtcaagggcttgagcacccagggaggcaatgtgggaagaaagatgaagtcgctagagtcccagctggagaaacagcagaaggacctgagtgaagatcactccagcctgctgctccacgtgaagcagttcgtgtctgacctgcggagcctgagctgtcagatggcggcgctccagggcaatggctcagaaaggacctgctgcccggtcaactgggtggagcacgagcgcagctgctactggttctctcgctccgggaaggcctgggctgacgccgacaactactgccggctggaggacgcgcacctggtggtggtcacgtcctgggaggagcagaaatttgtccagcaccacataggccctgtgaacacctggatgggcctccacgaccaaaacgggccctggaagtgggtggacgggacggactacgagacgggcttcaagaactggaggccggagcagccggacgactggtacggccacgggctcggaggaggcgaggactgtgcccacttcaccgacgacggccgctggaacgacgacgtctgccagaggccctaccgctgggtctgcgagacagagctggacaaggccagccaggagccacctctcctttaa

SEQ ID NO: 2488 - DNA, 1552 bp, Homo sapiens
  source 1..1552: mol_type = unassigned DNA
acacagagacaccggggcccagggccctcctatggaccctgcccgctcccctcccattgtccacggctgtccgcccacccccattctccaagcttcagccccctccttagttcggcatctgcacagcactgaagaacctgggaatcagaccctgagaccctgagcaagtaaaatgggaagagaggtggcgggaggctggctgggggtgcaggggtgcggagggaacccagggtgtgttggggggtgctgggtgggaaacatcagaggatggattctggatgtcaggcctgggaggggatggaggaaagaagaaagctcccggtggggcgcggtggtccacgcctgtaatcccagcacgttgggaggctggggtgggtggattgcctgagctcaggagtttgagacaagcctgggcaacacggtgaaaccccgtctctactaaaatacaaaaaagtagccaggcgtggtggcgtgcacctgttgtcccagctactccagaggctgaggcaggagaaccgcttgaacccgggaggcagaggttgcagtaagctgagatcatgccactgcactccggcctggggacagagcaagactccctctcaaaaaaaaaaaaaaaaagaaaagaaaaaaaagaaaaagaaaagaaagaaagaagaaaggtctccatgatggagccgtcaatcagatgggagtaaagagatgggcccctcattcccactctagtcctggtgagcccccacctcagccccagcctcagtcttgactcagtcccaggtccagcgccagccctatcatgaccaaggagtatcaagaccttcagcatctggacaatgaggagagtgaccaccatcagctcagaaaagactcccagctgcaggaggagctgcggggcctgagagagacgttcagcaacttcacagcgagcacggaggcccaggtcaagggcttgagcacccagggaggcaatgtgggaagaaagatgaagtcgctagagtcccagctggagaaacagcagaaggacctgagtgaagatcactccagcctgctgctccacgtgaagcagttcgtgtctgacctgcggagcctgagctgtcagatggcggcgctccagggcaatggctcagaaaggacctgctgcccggtcaactgggtggagcacgagcgcagctgctactggttctctcgctccgggaaggcctgggctgacgccgacaactactgccggctggaggacgcgcacctggtggtggtcacgtcctgggaggagcagaaatttgtccagcaccacataggccctgtgaacacctggatgggcctccacgaccaaaacgggccctggaagtgggtggacgggacggactacgagacgggcttcaagaactggaggccggagcagccggacgactggtacggccacgggctcggaggaggcgaggactgtgcccacttcaccgacgacggccgctggaacgacgacgtctgccagaggccctaccgctgggtctgcgagacagagctggacaaggccagccaggagccacctctcctttaa

SEQ ID NO: 2489 - DNA, 6132 bp, Homo sapiens
  source 1..6132: mol_type = unassigned DNA
attggtggaggcggcaagtttaaacagagtcaaaacgccatacttgtttggctcctctttttaatttgcgagtttattgggcttgttttctgttttctagggagtaggttagtggaaaagaaaaagggccgaattcactcccacgacctctacagccgcccctgaggggaagcggtcagcgtaagtcccggatccccgctccggagccgcctcgtgggagcggggcaaggagatccaggaggggtctcgaatctgccatggcgaaccggcgagtggggcgaggctgctgggaagtgagcccgaccgagcggaggccgcccgcggggctgcggggccccgcggccgaggaggaggcgtcttccccgccggtcctgtctctcagccacttctgcaggtctcctttcctttgcttcggggacgttctcctgggagcctcacggacgctgtctctggccctagacaaccctaacgaggaggtggcagaagtgaagatctcccacttcccggccgcggacctgggcttcagtgtgtcgcagcgctgtttcgtgttgcagcctaaagagaaaattgttatttctgttaactggacaccactcaaagaaggccgagtaagagagattatgacatttcttgtaaatgatgttctgaaacaccaagctatattactaggaaatgcagaagagcagaaaaagaaaaagaggagtctttgggataccattaaaaagaagaaaatttcagcctctacaagtcacaacagaagggtttcaaatattcagaatgttaataaaacatttagtgtttcccaaaaagttgacagagttaggagcccactacaagcttgtgaaaacttggctatgaatgaaggcggtcccccaacagaaaacaattctttaatacttgaagaaaataaaatacccatatcacctattagccctgctttcaatgaatgccatggtgcaacttgcttgccactctctgtacgtcgatctactacctactcatctcttcatgcatcagaaaatagggaactattaaatgtacacagtgccaacgtttcaaaagtttcttttaatgagaaagctgtaactgaaacttcctttaattccgtaaatgttaatggccaaagaggagagaatagtaaacttagtcttacccccaactgttcttcaactttgaacattacacaaagccaaatacattttctaagtccagattcttttgtaaataatagtcatggagctaataatgaactagaattagtaacatgtctttcatcagatatgtttatgaaagataattcacagcctgtgcatttggaatcaacaattgcacatgaaatttatcagaaaattttaagtccagattctttcataaaagataattatggactaaatcaggatctagaatcagagtcagttaatcctattttatcccctaatcaatttttaaaagataacatggcatatatgtgtacatctcagcaaacatgtaaagtaccattatcaaatgaaaattctcaagtcccacagtctcctgaagattggagaaaaagtgaagtttcgccacgtattcctgaatgtcagggttcaaaatctcccaaagctatttttgaagaactagtagaaatgaagtcaaattactacagttttataaaacaaaataatcctaaattttctgcagttcaggatatttctagtcatagccacaataaacaacctaagagacgtccaatactttctgccactgttactaaaaggaaggccacctgtaccagagaaaaccaaactgagattaataaaccaaaagcaaaaagatgtctcaacagtgcagtgggtgaacatgaaaaagtaataaataatcaaaaggaaaaagaagattttcattcttatcttccaattatagatccaatattaagtaaatctaagagttataaaaacgaggtaacaccctcttcgacaacagcttcagttgctcggaaaagaaagagcgatggaagcatggaagatgcaaatgtgagagttgcaattacagaacatacagaagtgcgagaaatcaaaagaatccatttttctccctcagagcctaaaacatcagctgttaagaaaacaaaaaatgtgacaacacccatctcaaaacgtattagcaacagagagaaattaaacctgaagaagaaaactgatttatcaatattcagaactccaatttctaaaacaaacaaaaggacaaaacccattatcgctgtggcacagtccagtttgaccttcataaaaccattaaaaacagatattcccagacacccgatgccatttgctgcaaaaaacatgttttatgatgaacgctggaaggaaaagcaggaacagggcttcacttggtggttaaattttatattaacccctgatgacttcactgtaaaaacaaatatttctgaagtaaatgctgctactcttcttttgggaatagagaatcaacataaaataagtgttcctagagcacctacaaaagaggaaatgtctctcagagcttatactgctcggtgtaggttaaacagactacgtcgtgcagcatgccgtttgtttacttctgaaaaaatggttaaagctattaaaaagcttgaaattgaaattgaagctaggcggttaattgttcgaaaagatagacacctatggaaagatgtgggagaacgtcagaaagtcctgaattggctgttgtcctacaatcctttgtggcttcgaattggtctagagacaacttatggagaactcatatctttggaagataacagtgatgtcacagggttggctatgtttattctgaatcgcctactttggaatcctgatatagcagctgagtatagacaccccactgttcctcacctgtatagagatggtcatgaagaagctttgtccaagtttacattgaaaaagttattgttgttggtctgttttcttgattatgctaaaatttccagactcattgatcatgatccttgtctcttctgtaaagatgccgaattcaaggctagtaaagaaatccttttggctttttcacgagatttcctaagtggtgaaggtgacctttcccgtcaccttggcttattgggattacctgttaaccatgttcagacaccatttgatgaatttgattttgccgttacaaatcttgccgtagacttgcaatgtggagtgcgccttgtgcgaaccatggaacttctcacacagaactgggacctctcaaagaaactcaggattccggcaataagtcgtcttcaaaagatgcacaatgttgacattgttcttcaagttcttaaatcacgaggaattgaattaagtgatgagcatggaaatacaattctatctaaggatattgtggataggcacagagaaaaaactctcaggttgctttggaaaatagcgtttgcttttcaggtggatatttcccttaacttagatcaattaaaggaagaaattgcctttctaaaacacacaaagagtataaagaaaacaatatctctactatcatgccattctgatgatcttattaataagaaaaaaggcaaaagggatagtggttcctttgaacaatatagtgaaaacataaagttattgatggattgggtaaatgctgtttgtgccttctataataaaaaggtggagaattttacagtgtctttctcagacggccgtgtgttatgttacctgatccaccattaccatccttgctatgtgccatttgacgctatatgtcagcgtactactcaaactgtggaatgtacgcaaactggttcagtggtattaaattcatcatctgaatctgatgacagttctctggatatgtctcttaaagcatttgatcatgaaaatacttcagagctatacaaagagctcctagaaaatgaaaagaaaaattttcacttggttaggtctgcagttagagaccttggtggaatacctgctatgattaatcattcagatatgtcaaatacaattccagatgaaaaggtggttattacctatttgtcatttctttgtgcaaggcttttggatcttcgtaaagaaataagagctgctcgactcatacaaacaacatggagaaaatataaactaaaaacagatctcaaacgccatcaggagagagagaaagctgcaagaattattcaattggctgtaatcaattttctagcaaaacaaagattgagaaaaagagttaatgcagcactcgtcattcagaaatattggcgaagagtcttagcacagagaaaattattaatgttaaaaaaggaaaagctggaaaaagttcaaaataaagcagcatcacttattcaggctatgtggaggagatatagagccaagaaatatttatgtaaagtgaaagctgcctgcaagattcaagcctggtatagatgttggagagcacacaaagaatatctagctatattaaaagctgttaaaattattcaaggttgcttctataccaaactagagagaacacggtttttgaatgtgagagcatcagcaattatcattcagagaaaatggagagctatacttcctgcaaagatagctcatgaacacttcttaatgataaaaagacatcgagctgcttgtttgatccaagcacattatagaggatataaaggaaggcaggtctttcttcggcagaaatctgctgctttgatcatacaaaaatatatacgagccagggaggctggaaagcatgaaaggataaaatatattgaatttaaaaaatctacagttatcctacaagcactggtgcgtggttggctagtacgaaaaagatttttagaacagagagccaaaattcgacttcttcacttcactgcagctgcatattatcacctgaatgctgttagaattcaaagagcctataaactttacctggctgtgaagaatgctaacaagcaggttaattcagtcatctgtattcagagatggtttcgagcaagattacaagaaaagagatttattcagaaatatcatagcatcaaaaagattgagcatgaaggtcaagaatgtctgagccagcgaaatagggctgcatcagtaatacagaaagcagtgcgccattttctcctccgtaaaaagcaggaaaaattcactagtggaatcattaaaattcaggcattatggagaggctattcttggaggaagaaaaatgattgtacaaaaattaaagctatacgactaagtcttcaagttgttaatagggagattcgagaagaaaacaaactctacaaaagaactgcacttgcacttcattaccttttgacatataagcacctttctgccattcttgaggccttaaaacacctagaggtagttactagattgtctccactttgttgtgagaacatggcccagagtggagcaatttctaaaatatttgttttgatccgaagttgtaatcgcagtattccttgtatggaagtcatcagatatgctgtgcaagtcttgcttaatgtatctaagtatgagaaaactacttcagcagtttatgatgtagaaaattgtatagatatactattggagcttttgcagatataccgagaaaagcctggtaataaagttgcagacaaaggcggaagcatttttacaaaaacttgttgtttgttggctattttactgaagacaacaaatagagcctctgatgtacgaagtaggtccaaagttgttgaccgtatttacagtctctacaaacttacagctcataaacataaaatgaatactgaaagaatactttacaagcaaaagaagaattcttctataagcattccttttatcccagaaacacctgtaaggaccagaatagtttcaagacttaagccagattgggttttgagaagagataacatggaagaaatcacaaatcccctgcaagctattcaaatggtgatggatacgcttggcattccttattagtaaatgtaaacattttcagtatgtatagtgtaaagaaatattaaagccaatcatgagtacgtaaagtgatttttgctctccgtgtacaacttttaaaatctgactttgttttaaaaaaacataaactgttcattacattcttcatttttatcatttatagttttatgcatgtaataaactaatatgtcataagatg

SEQ ID NO: 2490 - DNA, 4259 bp, Homo sapiens
  source 1..4259: mol_type = unassigned DNA
atggcgaaccggcgagtggggcgaggctgctgggaagtgagcccgaccgagcggaggccgcccgcggggctgcggggccccgcggccgaggaggaggcgtcttccccgccggtcctgtctctcagccacttctgcaggtctcctttcctttgcttcggggacgttctcctgggagcctcacggacgctgtctctggccctagacaaccctaacgaggaggtggcagaagtgaagatctcccacttcccggccgcggacctgggcttcagtgtgtcgcagcgctgtttcgtgttgcagcctaaagagaaaattgttatttctgttaactggacaccactcaaagaaggccgagtaagagagattatgacatttcttgtaaatgatgttctgaaacaccaagctatattactaggaaatgcagaagagcagaaaaagaaaaagaggagtctttgggataccattaaaaagaagaaaatttcagcctctacaagtcacaacagaagggtttcaaatattcagaatgttaataaaacatttagtgtttcccaaaaagttgacagaagatacagacagcaaacatactttaataagttaaagaaaataacaaaaacagtacagcaaagatactgggcaatgaaagaaagaaacatacaatttcaaaggtataacaaactgaggcattctgtaatatacattcaggctatttttaggggaaagaaagctagaagacatttaaaaatgatgcatatagccgcaactctcattcagaggagatttagaactctaatgatgagaagaagattcctctctctcaagaaaactgctattttgattcagagaaaatatcgggcacatctttgtacaaagcatcacttacagttccttcaggtacaaaatgcagttattaaaatccagtcatcatacagaagatggatgataaggaaaaggatgcgagagatgcacagggctgctactttcatccagtctactttcagaatgcacagattacatatgagatatcaggctttgaaacaggcctccgttgtgatccaacagcaataccaagcaaatagagctgcaaaactgcagaggcagcattatctcagacaaagacactctgctgtgatccttcaggctgcattcaggggtatgaaaactagaagacatttgaagagtatgcattcctctgcaacccttattcagagtaggtttagatcattactggtgaggagaagattcatttccctcaaaaaagctactatttttgttcagaggaaatatcgagccaccatttgtgccaaacataaattgtaccaattcttgcacttaagaaaggcagccattacaatacagtcatcttacagaagactgatggtaaagaagaagttacaagaaatgcaaagggctgcagttctcattcaggctactttcaggatgtacagaacatatattacatttcagacttggaaacatgcttcaattctaattcagcaacattatcgaacatatagagctgcaaaattacaaagagaaaattatatcagacaatggcattctgctgtggttattcaggctgcatataaaggaatgaaagcaagacaacttttaagggaaaaacacaaagcttctatcgtaatacaaagcacctacagaatgtataggcagtattgtttctaccaaaagcttcagtgggctacaaaaatcatacaagaaaaatatagagcaaataaaaagaaacagaaagtatttcaacacaatgaacttaagaaagagacttgtgttcaggcaggttttcaggacatgaacataaaaaaacagattcaggaacagcaccaggctgccattattattcagaagcattgtaaagcctttaaaataaggaagcattatctccaccttagagcaacagtagtttctattcaaagaagatacagaaaactaactgcagtgcgtacccaagcagttatttgtatacagtcttattacagaggctttaaagtacgaaaggatattcaaaatatgcaccgggctgccacactaattcagtcattctatcgaatgcacagggccaaagttgattatgaaacaaagaaaactgcaattgtggttatacagaattattataggttgtatgttagagtaaaaacagaaagaaaaaactttttagcagttcagaaatctgtacgaactattcaggctgcttttagaggcatgaaagttagacaaaaattgaaaaatgtatcagaggaaaagatggcagccattgttaaccaatctgcactctgctgttacagaagtaaaactcagtatgaagctgttcaaagtgaaggtgttatgattcaagagtggtataaagcttctggccttgcttgttcacaggaagcagagtatcattctcaaagtagggctgcagtaacaattcaaaaagctttttgtagaatggtcacaagaaaactggaaacacagaaatgtgctgccctacggattcagttcttccttcagatggctgtgtatcggagaagatttgttcagcagaaaagagctgctatcactttacagcattattttaggacgtggcaaaccagaaaacagtttttactatatagaaaagcagcagtggttttacaaaatcactacagagcatttctgtctgcaaaacatcaaagacaagtctatttacagatcagaagcagtgttatcattattcaagctagaagtaaaggatttatacagaaacggaagtttcaggaaattaaaaatagcaccataaaaattcaggctatgtggaggagatatagagccaagaaatatttatgtaaagtgaaagctgcctgcaagattcaagcctggtatagatgttggagagcacacaaagaatatctagctatattaaaagctgttaaaattattcaaggttgcttctataccaaactagagagaacacggtttttgaatgtgagagcatcagcaattatcattcagagaaaatggagagctatacttcctgcaaagatagctcatgaacacttcttaatgataaaaagacatcgagctgcttgtttgatccaagcacattatagaggatataaaggaaggcaggtctttcttcggcagaaatctgctgctttgatcatacaaaaatatatacgagccagggaggctggaaagcatgaaaggataaaatatattgaatttaaaaaatctacagttatcctacaagcactggtgcgtggttggctagtacgaaaaagatttttagaacagagagccaaaattcgacttcttcacttcactgcagctgcatattatcacctgaatgctgttagaattcaaagagcctataaactttacctggctgtgaagaatgctaacaagcaggttaattcagtcatctgtattcagagatggtttcgagcaagattacaagaaaagagatttattcagaaatatcatagcatcaaaaagattgagcatgaaggtcaagaatgtctgagccagcgaaatagggctgcatcagtaatacagaaagcagtgcgccattttctcctccgtaaaaagcaggaaaaattcactagtggaatcattaaaattcaggcattatggagaggctattcttggaggaagaaaaatgattgtacaaaaattaaagctatacgactaagtcttcaagttgttaatagggagattcgagaagaaaacaaactctacaaaagaactgcacttgcacttcattaccttttgacatataagcacctttctgccattcttgaggccttaaaacacctagaggtagttactagattgtctccactttgttgtgagaacatggcccagagtggagcaatttctaaaatatttgttttgatccgaagttgtaatcgcagtattccttgtatggaagtcatcagatatgctgtgcaagtcttgcttaatgtatctaagtatgagaaaactacttcagcagtttatgatgtagaaaattgtatagatatactattggagcttttgcagatataccgagaaaagcctggtaataaagttgcagacaaaggcggaagcatttttacaaaaacttgttgtttgttggctattttactgaagacaacaaatagagcctctgtaagtattagtcagttgcctttctttaagattatttttctgtggtcttaagtctatgacttttatagttttcctttagtaattatcactctaaaatagggttttatgtgtgttcaaacctgctttttgcacggataaaa

SEQ ID NO: 2491 - DNA, 3747 bp, Homo sapiens
  source 1..3747: mol_type = unassigned DNA
tttatattaacccctgatgacttcactgtaaaaacaaatatttctgaagtaaatgctgctactcttcttttgggaatagagaatcaacataaaataagtgttcctagagcacctacaaaagaggaaatgtctctcagagcttatactgctcggtgtaggttaaacagactacgtcgtgcagcatgccgtttgtttacttctgaaaaaatggttaaagctattaaaaagcttgaaattgaaattgaagctaggcggttaattgttcgaaaagatagacacctatggaaagatgtgggagaacgtcagaaagtcctgaattggctgttgtcctacaatcctttgtggcttcgaattggtctagagacaacttatggagaactcatatctttggaagataacagtgatgtcacagggttggctatgtttattctgaatcgcctactttggaatcctgatatagcagctgagtatagacaccccactgttcctcacctgtatagagatggtcatgaagaagctttgtccaagtttacattgaaaaagttattgttgttggtctgttttcttgattatgctaaaatttccagactcattgatcatgatccttgtctcttctgtaaagatgccgaattcaaggctagtaaagaaatccttttggctttttcacgagatttcctaagtggtgaaggtgacctttcccgtcaccttggcttattgggattacctgttaaccatgttcagacaccatttgatgaatttgattttgccgttacaaatcttgccgtagacttgcaatgtggagtgcgccttgtgcgaaccatggaacttctcacacagaactgggacctctcaaagaaactcaggattccggcaataagtcgtcttcaaaagatgcacaatgttgacattgttcttcaagttcttaaatcacgaggaattgaattaagtgatgagcatggaaatacaattctatctaaggatattgtggataggcacagagaaaaaactctcaggttgctttggaaaatagcgtttgcttttcaggtggatatttcccttaacttagatcaattaaaggaagaaattgcctttctaaaacacacaaagagtataaagaaaacaatatctctactatcatgccattctgatgatcttattaataagaaaaaaggcaaaagggatagtggttcctttgaacaatatagtgaaaacataaagttattgatggattgggtaaatgctgtttgtgccttctataataaaaaggtggagaattttacagtgtctttctcagacggccgtgtgttatgttacctgatccaccattaccatccttgctatgtgccatttgacgctatatgtcagcgtactactcaaactgtggaatgtacgcaaactggttcagtggtattaaattcatcatctgaatctgatgacagttctctggatatgtctcttaaagcatttgatcatgaaaatacttcagagctatacaaagagctcctagaaaatgaaaagaaaaattttcacttggttaggtctgcagttagagaccttggtggaatacctgctatgattaatcattcagatatgtcaaatacaattccagatgaaaaggtggttattacctatttgtcatttctttgtgcaaggcttttggatcttcgtaaagaaataagagctgctcgactcatacaaacaacatggagaaaatataaactaaaaacagatctcaaacgccatcaggagagagagaaagctgcaagaattattcaattggctgtaatcaattttctagcaaaacaaagattgagaaaaagagttaatgcagcactcgtcattcagaaatattggcgaagagtcttagcacagagaaaattattaatgttaaaaaaggaaaagctggaaaaagttcaaaataaagcagcatcacttattcaggctatgtggaggagatatagagccaagaaatatttatgtaaagtgaaagctgcctgcaagattcaagcctggtatagatgttggagagcacacaaagaatatctagctatattaaaagctgttaaaattattcaaggttgcttctataccaaactagagagaacacggtttttgaatgtgagagcatcagcaattatcattcagagaaaatggagagctatacttcctgcaaagatagctcatgaacacttcttaatgataaaaagacatcgagctgcttgtttgatccaagcacattatagaggatataaaggaaggcaggtctttcttcggcagaaatctgctgctttgatcatacaaaaatatatacgagccagggaggctggaaagcatgaaaggataaaatatattgaatttaaaaaatctacagttatcctacaagcactggtgcgtggttggctagtacgaaaaagatttttagaacagagagccaaaattcgacttcttcacttcactgcagctgcatattatcacctgaatgctgttagaattcaaagagcctataaactttacctggctgtgaagaatgctaacaagcaggttaattcagtcatctgtattcagagatggtttcgagcaagattacaagaaaagagatttattcagaaatatcatagcatcaaaaagattgagcatgaaggtcaagaatgtctgagccagcgaaatagggctgcatcagtaatacagaaagcagtgcgccattttctcctccgtaaaaagcaggaaaaattcactagtggaatcattaaaattcaggcattatggagaggctattcttggaggaagaaaaatgattgtacaaaaattaaagctatacgactaagtcttcaagttgttaatagggagattcgagaagaaaacaaactctacaaaagaactgcacttgcacttcattaccttttgacatataagcacctttctgccattcttgaggccttaaaacacctagaggtagttactagattgtctccactttgttgtgagaacatggcccagagtggagcaatttctaaaatatttgttttgatccgaagttgtaatcgcagtattccttgtatggaagtcatcagatatgctgtgcaagtcttgcttaatgtatctaagtatgagaaaactacttcagcagtttatgatgtagaaaattgtatagatatactattggagcttttgcagatataccgagaaaagcctggtaataaagttgcagacaaaggcggaagcatttttacaaaaacttgttgtttgttggctattttactgaagacaacaaatagagcctctgatgtacgaagtaggtccaaagttgttgaccgtatttacagtctctacaaacttacagctcataaacataaaatgaatactgaaagaatactttacaagcaaaagaagaattcttctataagcattccttttatcccagaaacacctgtaaggaccagaatagtttcaagacttaagccagattgggttttgagaagagataacatggaagaaatcacaaatcccctgcaagctattcaaatggtgatggatacgcttggcattccttattagtaaatgtaaacattttcagtatgtatagtgtaaagaaatattaaagccaatcatgagtacgtaaagtgatttttgctctccgtgtacaacttttaaaatctgactttgttttaaaaaaacataaactgttcattacattcttcatttttatcatttatagttttatgcatgtaataaactaatatgtcataa

SEQ ID NO: 2492 - DNA, 10887 bp, Homo sapiens
  source 1..10887: mol_type = unassigned DNA
attggtggaggcggcaagtttaaacagagtcaaaacgccatacttgtttggctcctctttttaatttgcgagtttattgggcttgttttctgttttctagggagtaggttagtggaaaagaaaaagggccgaattcactcccacgacctctacagccgcccctgaggggaagcggtcagcgtaagtcccggatccccgctccggagccgcctcgtgggagcggggcaaggagatccaggaggggtctcgaatctgccatggcgaaccggcgagtggggcgaggctgctgggaagtgagcccgaccgagcggaggccgcccgcggggctgcggggccccgcggccgaggaggaggcgtcttccccgccggtcctgtctctcagccacttctgcaggtctcctttcctttgcttcggggacgttctcctgggagcctcacggacgctgtctctggccctagacaaccctaacgaggaggtggcagaagtgaagatctcccacttcccggccgcggacctgggcttcagtgtgtcgcagcgctgtttcgtgttgcagcctaaagagaaaattgttatttctgttaactggacaccactcaaagaaggccgagtaagagagattatgacatttcttgtaaatgatgttctgaaacaccaagctatattactaggaaatgcagaagagcagaaaaagaaaaagaggagtctttgggataccattaaaaagaagaaaatttcagcctctacaagtcacaacagaagggtttcaaatattcagaatgttaataaaacatttagtgtttcccaaaaagttgacagagttaggagcccactacaagcttgtgaaaacttggctatgaatgaaggcggtcccccaacagaaaacaattctttaatacttgaagaaaataaaatacccatatcacctattagccctgctttcaatgaatgccatggtgcaacttgcttgccactctctgtacgtcgatctactacctactcatctcttcatgcatcagaaaatagggaactattaaatgtacacagtgccaacgtttcaaaagtttcttttaatgagaaagctgtaactgaaacttcctttaattccgtaaatgttaatggccaaagaggagagaatagtaaacttagtcttacccccaactgttcttcaactttgaacattacacaaagccaaatacattttctaagtccagattcttttgtaaataatagtcatggagctaataatgaactagaattagtaacatgtctttcatcagatatgtttatgaaagataattcacagcctgtgcatttggaatcaacaattgcacatgaaatttatcagaaaattttaagtccagattctttcataaaagataattatggactaaatcaggatctagaatcagagtcagttaatcctattttatcccctaatcaatttttaaaagataacatggcatatatgtgtacatctcagcaaacatgtaaagtaccattatcaaatgaaaattctcaagtcccacagtctcctgaagattggagaaaaagtgaagtttcgccacgtattcctgaatgtcagggttcaaaatctcccaaagctatttttgaagaactagtagaaatgaagtcaaattactacagttttataaaacaaaataatcctaaattttctgcagttcaggatatttctagtcatagccacaataaacaacctaagagacgtccaatactttctgccactgttactaaaaggaaggccacctgtaccagagaaaaccaaactgagattaataaaccaaaagcaaaaagatgtctcaacagtgcagtgggtgaacatgaaaaagtaataaataatcaaaaggaaaaagaagattttcattcttatcttccaattatagatccaatattaagtaaatctaagagttataaaaacgaggtaacaccctcttcgacaacagcttcagttgctcggaaaagaaagagcgatggaagcatggaagatgcaaatgtgagagttgcaattacagaacatacagaagtgcgagaaatcaaaagaatccatttttctccctcagagcctaaaacatcagctgttaagaaaacaaaaaatgtgacaacacccatctcaaaacgtattagcaacagagagaaattaaacctgaagaagaaaactgatttatcaatattcagaactccaatttctaaaacaaacaaaaggacaaaacccattatcgctgtggcacagtccagtttgaccttcataaaaccattaaaaacagatattcccagacacccgatgccatttgctgcaaaaaacatgttttatgatgaacgctggaaggaaaagcaggaacagggcttcacttggtggttaaattttatattaacccctgatgacttcactgtaaaaacaaatatttctgaagtaaatgctgctactcttcttttgggaatagagaatcaacataaaataagtgttcctagagcacctacaaaagaggaaatgtctctcagagcttatactgctcggtgtaggttaaacagactacgtcgtgcagcatgccgtttgtttacttctgaaaaaatggttaaagctattaaaaagcttgaaattgaaattgaagctaggcggttaattgttcgaaaagatagacacctatggaaagatgtgggagaacgtcagaaagtcctgaattggctgttgtcctacaatcctttgtggcttcgaattggtctagagacaacttatggagaactcatatctttggaagataacagtgatgtcacagggttggctatgtttattctgaatcgcctactttggaatcctgatatagcagctgagtatagacaccccactgttcctcacctgtatagagatggtcatgaagaagctttgtccaagtttacattgaaaaagttattgttgttggtctgttttcttgattatgctaaaatttccagactcattgatcatgatccttgtctcttctgtaaagatgccgaattcaaggctagtaaagaaatccttttggctttttcacgagatttcctaagtggtgaaggtgacctttcccgtcaccttggcttattgggattacctgttaaccatgttcagacaccatttgatgaatttgattttgccgttacaaatcttgccgtagacttgcaatgtggagtgcgccttgtgcgaaccatggaacttctcacacagaactgggacctctcaaagaaactcaggattccggcaataagtcgtcttcaaaagatgcacaatgttgacattgttcttcaagttcttaaatcacgaggaattgaattaagtgatgagcatggaaatacaattctatctaaggatattgtggataggcacagagaaaaaactctcaggttgctttggaaaatagcgtttgcttttcaggtggatatttcccttaacttagatcaattaaaggaagaaattgcctttctaaaacacacaaagagtataaagaaaacaatatctctactatcatgccattctgatgatcttattaataagaaaaaaggcaaaagggatagtggttcctttgaacaatatagtgaaaacataaagttattgatggattgggtaaatgctgtttgtgccttctataataaaaaggtggagaattttacagtgtctttctcagacggccgtgtgttatgttacctgatccaccattaccatccttgctatgtgccatttgacgctatatgtcagcgtactactcaaactgtggaatgtacgcaaactggttcagtggtattaaattcatcatctgaatctgatgacagttctctggatatgtctcttaaagcatttgatcatgaaaatacttcagagctatacaaagagctcctagaaaatgaaaagaaaaattttcacttggttaggtctgcagttagagaccttggtggaatacctgctatgattaatcattcagatatgtcaaatacaattccagatgaaaaggtggttattacctatttgtcatttctttgtgcaaggcttttggatcttcgtaaagaaataagagctgctcgactcatacaaacaacatggagaaaatataaactaaaaacagatctcaaacgccatcaggagagagagaaagctgcaagaattattcaattggctgtaatcaattttctagcaaaacaaagattgagaaaaagagttaatgcagcactcgtcattcagaaatattggcgaagagtcttagcacagagaaaattattaatgttaaaaaaggaaaagctggaaaaagttcaaaataaagcagcatcacttattcagggatattggagaagatattccactagacaaagatttctgaaattgaaatattattcaatcatcctgcaatctaggataagaatgataattgctgttacatcttataaacgatatctttgggctacagttacaattcagaggcattggcgtgcttatttaagaagaaaacaagatcaacaaagatatgaaatgctaaaatcatcaactcttataatccaatctatgttcagaaaatggaagcaacgtaaaatgcaatcacaagtaaaagctacagtaatattgcaaagagcttttagagaatggcatttaagaaaacaagctaaagaagaaaattctgctattatcatacaatcatggtatagaatgcataaagaattacggaaatatatttatattagatcttgtgttgttatcattcagaaaagatttcggtgctttcaagcccaaaagttatataaaagaagaaaagagtccatactaaccatccagaagtactacaaagcatatctgaaaggaaagattgagcgcaccaactatttgcagaaacgagctgcagccattcaattacaagctgcttttaggagactgaaagctcataatttatgtagacaaattagagctgcttgtgttattcagtcatactggagaatgagacaagacagagttcgatttttaaaccttaagaagactattatcaaatttcaggcacatgtaagaaaacatcaacaacgacagaaatataagaagatgaagaaagcagctgttataattcagactcatttccgagcttatatttttgccatgaaagttctagcatcttaccagaaaacacgctctgctgtcattgtgctgcagtctgcatatagagggatgcaagccaggaaaatgtatattcacatcctcacatctgttataaagattcaatcatattatcgtgcttatgtttctaaaaaggaatttttgagcctaaaaaatgctacaataaaattgcagtcaactgttaagatgaaacaaacacgtaaacaatatttgcatttaagagcagctgcactatttatccagcaatgttaccgttccaaaaaaatagctgcacaaaagagagaagagtatatgcagatgcgggaatcttgtatcaaactgcaagcatttgttagaggataccttgtccgaaagcagatgaggttacaaagaaaagctgttatttcactacagtcttatttcagaatgagaaaggctcggcagtattatctgaaaatgtataaagcaattattgtcattcagaattactatcatgcatacaaagcacaggtcaatcagaggaagaacttcttgcaagtcaaaaaagcagctacttgcttgcaagcagcttacagaggttataaagtacgccagctaatcaaacaacaatctatagctgctcttaaaattcagtctgcttttagaggctataataaaagggtaaaatatcaatctgtgcttcaatctataataaagattcagagatggtacagggcgtacaagactcttcatgatacaagaacacattttttgaagacaaaggcagctgtgatttccctccagtctgcttatcgtggctggaaggttcggaaacagattagaagggaacatcaagctgccttgaagattcagtctgcttttagaatggccaaggcccagaaacagtttagattgtttaaaacagcagcattagtcatccagcaaaatttcagagcatggactgcaggaaggaagcaatgtatggagtatattgaactccgtcatgcggtactggtgcttcaatctatgtggaagggaaaaacactgagaagacagcttcaaaggcaacataaatgtgctatcatcatacagtcatactatagaatgcatgtgcaacaaaagaagtggaaaatcatgaaaaaagctgctcttctgattcaaaagtattatagggcttacagtattggaagagaacagaatcatttatatttgaaaacaaaagcagctgtagtaactttacagtcagcttatcgtggtatgaaagtgagaaaaagaataaaggattgcaacaaagcagcagtcactatacagtctaaatacagagcttacaaaaccaaaaagaaatatgcaacctatagagcttcagctattataattcagagatggtatcgaggtattaaaattacaaaccatcagcataaggagtatcttaatttgaagaagacagcaattaaaatccaatctgtttatagaggtattagagttagaagacatattcaacacatgcacagggcagccacttttattaaagccatgtttaaaatgcatcagtcaagaataagttaccatacaatgagaaaagcagctattgttattcaagtaagatgtagagcatattatcaaggtaaaatgcagcgtgaaaagtacctgacaattttgaaagctgttaaagtccttcaggcaagttttagaggagtaagagttagacggactcttagaaagatgcagactgcagcaacactcattcagtcaaactacagaagatacagacagcaaacatactttaataagttaaagaaaataacaaaaacagtacagcaaagatactgggcaatgaaagaaagaaacatacaatttcaaaggtataacaaactgaggcattctgtaatatacattcaggctatttttaggggaaagaaagctagaagacatttaaaaatgatgcatatagccgcaactctcattcagaggagatttagaactctaatgatgagaagaagattcctctctctcaagaaaactgctattttgattcagagaaaatatcgggcacatctttgtacaaagcatcacttacagttccttcaggtacaaaatgcagttattaaaatccagtcatcatacagaagatggatgataaggaaaaggatgcgagagatgcacagggctgctactttcatccagtctactttcagaatgcacagattacatatgagatatcaggctttgaaacaggcctccgttgtgatccaacagcaataccaagcaaatagagctgcaaaactgcagaggcagcattatctcagacaaagacactctgctgtgatccttcaggctgcattcaggggtatgaaaactagaagacatttgaagagtatgcattcctctgcaacccttattcagagtaggtttagatcattactggtgaggagaagattcatttccctcaaaaaagctactatttttgttcagaggaaatatcgagccaccatttgtgccaaacataaattgtaccaattcttgcacttaagaaaggcagccattacaatacagtcatcttacagaagactgatggtaaagaagaagttacaagaaatgcaaagggctgcagttctcattcaggctactttcaggatgtacagaacatatattacatttcagacttggaaacatgcttcaattctaattcagcaacattatcgaacatatagagctgcaaaattacaaagagaaaattatatcagacaatggcattctgctgtggttattcaggctgcatataaaggaatgaaagcaagacaacttttaagggaaaaacacaaagcttctatcgtaatacaaagcacctacagaatgtataggcagtattgtttctaccaaaagcttcagtgggctacaaaaatcatacaagaaaaatatagagcaaataaaaagaaacagaaagtatttcaacacaatgaacttaagaaagagacttgtgttcaggcaggttttcaggacatgaacataaaaaaacagattcaggaacagcaccaggctgccattattattcagaagcattgtaaagcctttaaaataaggaagcattatctccaccttagagcaacagtagtttctattcaaagaagatacagaaaactaactgcagtgcgtacccaagcagttatttgtatacagtcttattacagaggctttaaagtacgaaaggatattcaaaatatgcaccgggctgccacactaattcagtcattctatcgaatgcacagggccaaagttgattatgaaacaaagaaaactgcaattgtggttatacagaattattataggttgtatgttagagtaaaaacagaaagaaaaaactttttagcagttcagaaatctgtacgaactattcaggctgcttttagaggcatgaaagttagacaaaaattgaaaaatgtatcagaggaaaagatggcagccattgttaaccaatctgcactctgctgttacagaagtaaaactcagtatgaagctgttcaaagtgaaggtgttatgattcaagagtggtataaagcttctggccttgcttgttcacaggaagcagagtatcattctcaaagtagggctgcagtaacaattcaaaaagctttttgtagaatggtcacaagaaaactggaaacacagaaatgtgctgccctacggattcagttcttccttcagatggctgtgtatcggagaagatttgttcagcagaaaagagctgctatcactttacagcattattttaggacgtggcaaaccagaaaacagtttttactatatagaaaagcagcagtggttttacaaaatcactacagagcatttctgtctgcaaaacatcaaagacaagtctatttacagatcagaagcagtgttatcattattcaagctagaagtaaaggatttatacagaaacggaagtttcaggaaattaaaaatagcaccataaaaattcaggctatgtggaggagatatagagccaagaaatatttatgtaaagtgaaagctgcctgcaagattcaagcctggtatagatgttggagagcacacaaagaatatctagctatattaaaagctgttaaaattattcaaggttgcttctataccaaactagagagaacacggtttttgaatgtgagagcatcagcaattatcattcagagaaaatggagagctatacttcctgcaaagatagctcatgaacacttcttaatgataaaaagacatcgagctgcttgtttgatccaagcacattatagaggatataaaggaaggcaggtctttcttcggcagaaatctgctgctttgatcatacaaaaatatatacgagccagggaggctggaaagcatgaaaggataaaatatattgaatttaaaaaatctacagttatcctacaagcactggtgcgtggttggctagtacgaaaaagatttttagaacagagagccaaaattcgacttcttcacttcactgcagctgcatattatcacctgaatgctgttagaattcaaagagcctataaactttacctggctgtgaagaatgctaacaagcaggttaattcagtcatctgtattcagagatggtttcgagcaagattacaagaaaagagatttattcagaaatatcatagcatcaaaaagattgagcatgaaggtcaagaatgtctgagccagcgaaatagggctgcatcagtaatacagaaagcagtgcgccattttctcctccgtaaaaagcaggaaaaattcactagtggaatcattaaaattcaggcattatggagaggctattcttggaggaagaaaaatgattgtacaaaaattaaagctatacgactaagtcttcaagttgttaatagggagattcgagaagaaaacaaactctacaaaagaactgcacttgcacttcattaccttttgacatataagcacctttctgccattcttgaggccttaaaacacctagaggtagttactagattgtctccactttgttgtgagaacatggcccagagtggagcaatttctaaaatatttgttttgatccgaagttgtaatcgcagtattccttgtatggaagtcatcagatatgctgtgcaagtcttgcttaatgtatctaagtatgagaaaactacttcagcagtttatgatgtagaaaattgtatagatatactattggagcttttgcagatataccgagaaaagcctggtaataaagttgcagacaaaggcggaagcatttttacaaaaacttgttgtttgttggctattttactgaagacaacaaatagagcctctgatgtacgaagtaggtccaaagttgttgaccgtatttacagtctctacaaacttacagctcataaacataaaatgaatactgaaagaatactttacaagcaaaagaagaattcttctataagcattccttttatcccagaaacacctgtaaggaccagaatagtttcaagacttaagccagattgggttttgagaagagataacatggaagaaatcacaaatcccctgcaagctattcaaatggtgatggatacgcttggcattccttattagtaaatgtaaacattttcagtatgtatagtgtaaagaaatattaaagccaatcatgagtacgtaaagtgatttttgctctccgtgtacaacttttaaaatctgactttgttttaaaaaaacataaactgttcattacattcttcatttttatcatttatagttttatgcatgtaataaactaatatgtcataagatg

SEQ ID NO: 2493 - DNA, 2356 bp, Homo sapiens
  source 1..2356: mol_type = unassigned DNA
agtcctgctccgccccggacaccccgcggccccgcccctgtgcgcgctggttggtcctcgcaggcatgatgaaacttcccgcacgcgttacaggagccaggtcggtataagcgccagcggcctcgccgcccgtcaagctgtccacatccctggcctcagcccgccacatcaccctgacctgcttacgcccagcctgtggacattttcgcggtccgggtccctgcggcggacgggtcggatcgtgctcgtggccagggcgcagtcaggtgtcgcgtggtcctgatctaggaagagactgcggccttatcaccgtctcggtgtctgctttcaccttcaactgcccccctcctcacctggaccgctcaccctcctcctcccctctcaccccgccatccccaccagtccccacctgtctctgtagactgcaagactcatcaagtgacttgctgagcaaaccctgccgagaagagattttcttcaatcacatctgaataaatcacttgaagaaagcttatagcttcattgcaccatgtgtggcatttgggcgctgtttggcagtgatgattgcctttctgttcagtgtctgagtgctatgaagattgcacacagaggtccagatgcattccgttttgagaatgtcaatggatacaccaactgctgctttggatttcaccggttggcggtagttgacccgctgtttggaatgcagccaattcgagtgaagaaatatccgtatttgtggctctgttacaatggtgaaatctacaaccataagaagatgcaacagcattttgaatttgaataccagaccaaagtggatggtgagataatccttcatctttatgacaaaggaggaattgagcaaacaatttgtatgttggatggtgtgtttgcatttgttttactggatactgccaataagaaagtgttcctgggtagagatacatatggagtcagacctttgtttaaagcaatgacagaagatggatttttggctgtatgttcagaagctaaaggtcttgttacattgaagcactccgcgactccctttttaaaagtggagccttttcttcctggacactatgaagttttggatttaaagccaaatggcaaagttgcatccgtggaaatggttaaatatcatcactgtcgggatgtacccctgcacgccctctatgacaatgtggagaaactctttccaggttttgagatagaaactgtgaagaacaacctcaggatcctttttaataatgctgtaaagaaacgtttgatgacagacagaaggattggctgccttttatcagggggcttggactccagcttggttgctgccactctgttgaagcagctgaaagaagcccaagtacagtatcctctccagacatttgcaattggcatggaagacagccccgatttactggctgctagaaaggtggcagatcatattggaagtgaacattatgaagtcctttttaactctgaggaaggcattcaggctctggatgaagtcatattttccttggaaacttatgacattacaacagttcgtgcttcagtaggtatgtatttaatttccaagtatattcggaagaacacagatagcgtggtgatcttctctggagaaggatcagatgaacttacgcagggttacatatattttcacaaggctccttctcctgaaaaagccgaggaggagagtgagaggcttctgagggaactctatttgtttgatgttctccgcgcagatcgaactactgctgcccatggtcttgaactgagagtcccatttctagatcatcgattttcttcctattacttgtctctgccaccagaaatgagaattccaaagaatgggatagaaaaacatctcctgagagagacgtttgaggattccaatctgatacccaaagagattctctggcgaccaaaagaagccttcagtgatggaataacttcagttaagaattcctggtttaagattttacaggaatacgttgaacatcaggttgatgatgcaatgatggcaaatgcagcccagaaatttcccttcaatactcctaaaaccaaagaaggatattactaccgtcaagtctttgaacgccattacccaggccgggctgactggctgagccattactggatgcccaagtggatcaatgccactgacccttctgcccgcacgctgacccactacaagtcagctgtcaaagcttaggtggtctttatgctgtaatgtgaaagcaaatatttcttcgtgttggatggggactgtgggtagataggggaacaatgagagtcaactcaggctaacttgggtgtgaaaaaaataaaagtcctaaatctaaaccattgctgt

SEQ ID NO: 2494 - DNA, 1994 bp, Homo sapiens
  source 1..1994: mol_type = unassigned DNA
aaacttcccgcacgcgttacaggagccaggtcggtataagcgccagcggcctcgccgcccgtcaagctgtccacatccctggcctcagcccgccacatcaccctgacctgcttacgcccagattttcttcaatcacatctgaataaatcacttgaagaaagcttatagcttcattgcaccatgtgtggcatttgggcgctgtttggcagtgatgattgcctttctgttcagtgtctgagtgctatgaagattgcacacagaggtccagatgcattccgttttgagaatgtcaatggatacaccaactgctgctttggatttcaccggttggcggtagttgacccgctgtttggaatgcagccaattcgagtgaagaaatatccgtatttgtggctctgttacaatggtgaaatctacaaccataagaagatgcaacagcattttgaatttgaataccagaccaaagtggatggtgagataatccttcatctttatgacaaaggaggaattgagcaaacaatttgtatgttggatggtgtgtttgcatttgttttactggatactgccaataagaaagtgttcctgggtagagatacatatggagtcagacctttgtttaaagcaatgacagaagatggatttttggctgtatgttcagaagctaaaggtcttgttacattgaagcactccgcgactccctttttaaaagtggagccttttcttcctggacactatgaagttttggatttaaagccaaatggcaaagttgcatccgtggaaatggttaaatatcatcactgtcgggatgtacccctgcacgccctctatgacaatgtggagaaactctttccaggttttgagatagaaactgtgaagaacaacctcaggatcctttttaataatgctgtaaagaaacgtttgatgacagacagaaggattggctgccttttatcagggggcttggactccagcttggttgctgccactctgttgaagcagctgaaagaagcccaagtacagtatcctctccagacatttgcaattggcatggaagacagccccgatttactggctgctagaaaggtggcagatcatattggaagtgaacattatgaagtcctttttaactctgaggaaggcattcaggctctggatgaagtcatattttccttggaaacttatgacattacaacagttcgtgcttcagtaggtatgtatttaatttccaagtatattcggaagaacacagatagcgtggtgatcttctctggagaaggatcagatgaacttacgcagggttacatatattttcacaaggctccttctcctgaaaaagccgaggaggagagtgagaggcttctgagggaactctatttgtttgatgttctccgcgcagatcgaactactgctgcccatggtcttgaactgagagtcccatttctagatcatcgattttcttcctattacttgtctctgccaccagaaatgagaattccaaagaatgggatagaaaaacatctcctgagagagacgtttgaggattccaatctgatacccaaagagattctctggcgaccaaaagaagccttcagtgatggaataacttcagttaagaattcctggtttaagattttacaggaatacgttgaacatcaggttgatgatgcaatgatggcaaatgcagcccagaaatttcccttcaatactcctaaaaccaaagaaggatattactaccgtcaagtctttgaacgccattacccaggccgggctgactggctgagccattactggatgcccaagtggatcaatgccactgacccttctgcccgcacgctgacccactacaagtcagctgtcaaagcttaggtggtctttatgctgtaatgtgaaagcaaatatttcttcgtgttggatggggactgtgggtagataggggaacaatgagagtcaactcaggctaacttgggtgtgaaaaaaataaaagtcctaaatct

SEQ ID NO: 2495 - DNA, 2289 bp, Homo sapiens
  source 1..2289: mol_type = unassigned DNA
tttctgtcctggttccctgaagcatcgagagggaaccgcggccggcaggccggaccgctccggagaggaggcagcggcagtttgagcccctgtaaatgttatatgtgtacttttttttactatgtggcgtcgaagcctgtggacattttcgcggtccgggtccctgcggcggacgggtcggatcgtgctcgtggccagggcgcagtcaggtgtcgcgtggtcctgatctaggaagagactgcggccttatcaccgtctcggtgtctgctttcaccttcaactgcccccctcctcacctggaccgctcaccctcctcctcccctctcaccccgccatccccaccagtccccacctgtctctgtagactgcaagactcatcaagtgacttgctgagcaaaccctgccgagaagagattttcttcaatcacatctgaataaatcacttgaagaaagcttatagcttcattgcaccatgtgtggcatttgggcgctgtttggcagtgatgattgcctttctgttcagtgtctgagtgctatgaagattgcacacagaggtccagatgcattccgttttgagaatgtcaatggatacaccaactgctgctttggatttcaccggttggcggtagttgacccgctgtttggaatgcagccaattcgagtgaagaaatatccgtatttgtggctctgttacaatggtgaaatctacaaccataagaagatgcaacagcattttgaatttgaataccagaccaaagtggatggtgagataatccttcatctttatgacaaaggaggaattgagcaaacaatttgtatgttggatggtgtgtttgcatttgttttactggatactgccaataagaaagtgttcctgggtagagatacatatggagtcagacctttgtttaaagcaatgacagaagatggatttttggctgtatgttcagaagctaaaggtcttgttacattgaagcactccgcgactccctttttaaaagtggagccttttcttcctggacactatgaagttttggatttaaagccaaatggcaaagttgcatccgtggaaatggttaaatatcatcactgtcgggatgtacccctgcacgccctctatgacaatgtggagaaactctttccaggttttgagatagaaactgtgaagaacaacctcaggatcctttttaataatgctgtaaagaaacgtttgatgacagacagaaggattggctgccttttatcagggggcttggactccagcttggttgctgccactctgttgaagcagctgaaagaagcccaagtacagtatcctctccagacatttgcaattggcatggaagacagccccgatttactggctgctagaaaggtggcagatcatattggaagtgaacattatgaagtcctttttaactctgaggaaggcattcaggctctggatgaagtcatattttccttggaaacttatgacattacaacagttcgtgcttcagtaggtatgtatttaatttccaagtatattcggaagaacacagatagcgtggtgatcttctctggagaaggatcagatgaacttacgcagggttacatatattttcacaaggctccttctcctgaaaaagccgaggaggagagtgagaggcttctgagggaactctatttgtttgatgttctccgcgcagatcgaactactgctgcccatggtcttgaactgagagtcccatttctagatcatcgattttcttcctattacttgtctctgccaccagaaatgagaattccaaagaatgggatagaaaaacatctcctgagagagacgtttgaggattccaatctgatacccaaagagattctctggcgaccaaaagaagccttcagtgatggaataacttcagttaagaattcctggtttaagattttacaggaatacgttgaacatcaggttgatgatgcaatgatggcaaatgcagcccagaaatttcccttcaatactcctaaaaccaaagaaggatattactaccgtcaagtctttgaacgccattacccaggccgggctgactggctgagccattactggatgcccaagtggatcaatgccactgacccttctgcccgcacgctgacccactacaagtcagctgtcaaagcttaggtggtctttatgctgtaatgtgaaagcaaatatttcttcgtgttggatggggactgtgggtagataggggaacaatgagagtcaactcaggctaacttgggtgtgaaaaaaataaaagtcctaaatctaaa

SEQ ID NO: 2496 - DNA, 584 bp, Homo sapiens
  source 1..584: mol_type = unassigned DNA
acgcacctgacagctagcggaaggacctttctgtcctggttccctgaagcatcgagagggaaccgcggccggcaggccggaccgctccggagaggaggcagcggcagtttgagcccctgtaaatgttatatgtgtacttttttttactatgtggcgtcgaagcctgtggacattttcgcggtccgggtccctgcggcggacgggtcggatcgtgctcgtggccagggcgcagtcaggtgtcgcgtggtcctgatctaggaagagactgcggccttatcaccgtctcggtgtctgctttcaccttcaactgcccccctcctcacctggaccgctcaccctcctcctcccctctcaccccgccatccccaccagtccccacctgtctctgtagactgcaagactcatcaagtgacttgctgagcaaaccctgccgagaagagattttcttcaatcacatctgaataaatcacttgaagaaagcttatagcttcattgcaccatgtgtggcatttgggcgctgtttggcagtgatgattgcctttctgttcagtgtctgagtgctatgaagattgcacacagaggtc

SEQ ID NO: 2497 - DNA, 745 bp, Homo sapiens
  source 1..745: mol_type = unassigned DNA
ccgtctcggtgtctgctttcaccttcaactgcccccctcctcacctggaccgctcaccctcctcctcccctctcaccccgccatccccaccagtccccacctgtctctgtagactgcaagactcatcaagtgacttgctgagcaaaccctgccgagaagaggtctgtttagggacacaggcgaccaagtacagaaaaagattttcttcaatcacatctgaataaatcacttgaagaaagcttatagcttcattgcaccatgtgtggcatttgggcgctgtttggcagtgatgattgcctttctgttcagtgtctgagtgctatgaagattgcacacagaggtccagatgcattccgttttgagaatgtcaatggatacaccaactgctgctttggatttcaccggttggcggtagttgacccgctgtttggaatgcagccaattcgagtgaagaaatatccgtatttgtggctctgttacaatggtgaaatctacaaccataagaagatgcaacagcattttgaatttgaataccagaccaaagtggatggtgagataatccttcatctttatgacaaaggaggaattgagcaaacaatttgtatgttggatggtgtgtttgcatttgttttactggatactgccaataagaaagtgttcctgggtagagatacatatggagtcagacctttgtttaaagcaatgacagaagatggatttttggctgtatgttcagaagctaaag

SEQ ID NO: 2498 - DNA, 828 bp, Homo sapiens
  source 1..828: mol_type = unassigned DNA
gattgttacgcacctgacagctagcggaaggacctttctgtcctggttccctgaagcatcgagagggaaccgcggccggcaggccggaccgctccggagaggaggcagcggcagtttgagcccctattttcttcaatcacatctgaataaatcacttgaagaaagcttatagcttcattgcaccatgtgtggcatttgggcgctgtttggcagtgatgattgcctttctgttcagtgtctgagtgctatgaagattgcacacagaggtccagatgcattccgttttgagaatgtcaatggatacaccaactgctgctttggatttcaccggttggcggtagttgacccgctgtttggaatgcagccaattcgagtgaagaaatatccgtatttgtggctctgttacaatggtgaaatctacaaccataagaagatgcaacagcattttgaatttgaataccagaccaaagtggatggtgagataatccttcatctttatgacaaaggaggaattgagcaaacaatttgtatgttggatggtgtgtttgcatttgttttactggatactgccaataagaaagtgttcctgggtagagatacatatggagtcagacctttgtttaaagcaatgacagaagatggatttttggctgtatgttcagaagctaaaggtcttgttacattgaagcactccgcgactccctttttaaaagtggagccttttcttcctggacactatgaagttttggatttaaagccaaatggcaaagttgcatccgtggaaatggttaaatatcatcactgtcgggatgtacccctgcacgccct

SEQ ID NO: 2499 - DNA, 579 bp, Homo sapiens
  source 1..579: mol_type = unassigned DNA
tactgaacaatgcaactttgagacagaaatatttgagaacatttttgtcagtgaggacattttgatagtgaatattttgtatcttctattaacttgaaatgttttatttgttataaagccaggatatctgatatcaaattaaattgttttttttttccctttagattttcttcaatcacatctgaataaatcacttgaagaaagcttatagcttcattgcaccatgtgtggcatttgggcgctgtttggcagtgatgattgcctttctgttcagtgtctgagtgctatgaagattgcacacagaggtccagatgcattccgttttgagaatgtcaatggatacaccaactgctgctttggatttcaccggttggcggtagttgacccgctgtttggaatgcagccaattcgagtgaagaaatatccgtatttgtggctctgttacaatggtgaaatctacaaccataagaagatgcaacagcattttgaatttgaataccagaccaaagtggatggtgagataatccttcatctttatgacaaaggaggaattgagcaaacaatttgtatgttggatgg

SEQ ID NO: 2500 - DNA, 562 bp, Homo sapiens
  source 1..562: mol_type = unassigned DNA
atgatgaaacttcccgcacgcgttacaggagccaggtcggtataagcgccagcggcctcgccgcccgtcaagctgtccacatccctggcctcagcccgccacatcaccctgacctgcttacgcccagcctgtggacattttcgcggtccgggtccctgcggcggacgggtcggatcgtgctcgtggccagggcgcagtcaggtgtcgcgtggtcctgatctaggaagagactgcggccttatcaccgtctcggtgtctgctttcaccttcaactgcccccctcctcacctggaccgctcaccctcctcctcccctctcaccccgccatccccaccagtccccacctgtctctgtagactgcaagactcatcaagtgacttgctgagcaaaccctgccgagaagagattttcttcaatcacatctgaataaatcacttgaagaaagcttatagcttcattgcaccatgtgtggcatttgggcgctgtttggcagtgatgattgcctttctgttcagtgtctgagtgctatgaagattgcacacagaggtccagatgcattccg

SEQ ID NO: 2501 - DNA, 573 bp, Homo sapiens
  source 1..573: mol_type = unassigned DNA
aagctgtccacatccctggcctcagcccgccacatcaccctgacctgcttacgcccagcctgtggacattttcgcggtccgggtccctgcggcggacgggtcggatcgtgctcgtggccagggcgcagtcaggtgtcgcgtggtcctgatctaggaagagactgcggccttatcaccgtctcggtgtctgctttcaccttcaactgcccccctcctcacctggaccgctcaccctcctcctcccctctcaccccgccatccccaccagtccccacctgtctctgtagactgcaagactcatcaagtgacttgctgagcaaaccctgccgagaagagattttcttcaatcacatctgaataaatcacttgaagtgtctgagtgctatgaagattgcacacagaggtccagatgcattccgttttgagaatgtcaatggatacaccaactgctgctttggatttcaccggttggcggtagttgacccgctgtttggaatgcagccaattcgagtgaagaaatatccgtatttgtggctctgttacaatggtgaaatctacaaccataagaaggtg

SEQ ID NO: 2502 - DNA, 1638 bp, Homo sapiens
  source 1..1638: mol_type = unassigned DNA
gaagcatcgagagggaaccgcggccggcaggccggaccgctccggagaggaggcagcggcagtttgagcccctatgcaacagcattttgaatttgaataccagaccaaagtggatggtgagataatccttcatctttatgacaaaggaggaattgagcaaacaatttgtatgttggatggtgtgtttgcatttgttttactggatactgccaataagaaagtgttcctgggtagagatacatatggagtcagacctttgtttaaagcaatgacagaagatggatttttggctgtatgttcagaagctaaaggtcttgttacattgaagcactccgcgactccctttttaaaagtggagccttttcttcctggacactatgaagttttggatttaaagccaaatggcaaagttgcatccgtggaaatggttaaatatcatcactgtcgggatgtacccctgcacgccctctatgacaatgtggagaaactctttccaggttttgagatagaaactgtgaagaacaacctcaggatcctttttaataatgctgtaaagaaacgtttgatgacagacagaaggattggctgccttttatcagggggcttggactccagcttggttgctgccactctgttgaagcagctgaaagaagcccaagtacagtatcctctccagacatttgcaattggcatggaagacagccccgatttactggctgctagaaaggtggcagatcatattggaagtgaacattatgaagtcctttttaactctgaggaaggcattcaggctctggatgaagtcatattttccttggaaacttatgacattacaacagttcgtgcttcagtaggtatgtatttaatttccaagtatattcggaagaacacagatagcgtggtgatcttctctggagaaggatcagatgaacttacgcagggttacatatattttcacaaggctccttctcctgaaaaagccgaggaggagagtgagaggcttctgagggaactctatttgtttgatgttctccgcgcagatcgaactactgctgcccatggtcttgaactgagagtcccatttctagatcatcgattttcttcctattacttgtctctgccaccagaaatgagaattccaaagaatgggatagaaaaacatctcctgagagagacgtttgaggattccaatctgatacccaaagagattctctggcgaccaaaagaagccttcagtgatggaataacttcagttaagaattcctggtttaagattttacaggaatacgttgaacatcaggttgatgatgcaatgatggcaaatgcagcccagaaatttcccttcaatactcctaaaaccaaagaaggatattactaccgtcaagtctttgaacgccattacccaggccgggctgactggctgagccattactggatgcccaagtggatcaatgccactgacccttctgcccgcacgctgacccactacaagtcagctgtcaaagcttaggtggtctttatgctgtaatgtgaaagcaaatatttcttcgtgttggatggggactgtgggtagataggggaacaatgagagtcaactcaggctaacttgggtgtgaaaaaaataaaagtcctaaatct

SEQ ID NO: 2503 - DNA, 1812 bp, Homo sapiens
  source 1..1812: mol_type = unassigned DNA
ataagcgccagcggcctcgccgcccgtcaagctgtccacatccctggcctcagcccgccacatcaccctgacctgcttacgcccagattttcttcaatcacatctgaataaatcacttgaagtgtctgagtgctatgaagattgcacacagaggtccagatgcattccgttttgagaatgtcaatggatacaccaactgctgctttggatttcaccggttggcggtagttgacccgctgtttggaatgcagccaattcgagtgaagaaatatccgtatttgtggctctgttacaatggtgaaatctacaaccataagaagatgcaacagcattttgaatttgaataccagaccaaagtggatggtgagataatccttcatctttatgacaaaggaggaattgagcaaacaatttgtatgttggatggtgtgtttgcatttgttttactggatactgccaataagaaagtgttcctgggtagagatacatatggagtcagacctttgtttaaagcaatgacagaagatggatttttggctgtatgttcagaagctaaaggtcttgttacattgaagcactccgcgactccctttttaaaagtggagccttttcttcctggacactatgaagttttggatttaaagccaaatggcaaagttgcatccgtggaaatggttaaatatcatcactgtcgggatgtacccctgcacgccctctatgacaatgtggagaaactctttccaggttttgagatagaaactgtgaagaacaacctcaggatcctttttaataatgctgtaaagaaacgtttgatgacagacagaaggattggctgccttttatcagggggcttggactccagcttggttgctgccactctgttgaagcagctgaaagaagcccaagtacagtatcctctccagacatttgcaattggcatggaagacagccccgatttactggctgctagaaaggtggcagatcatattggaagtgaacattatgaagtcctttttaactctgaggaaggcattcaggctctggatgaagtcatattttccttggaaacttatgacattacaacagttcgtgcttcagtaggtatgtatttaatttccaagtatattcggaagaacacagatagcgtggtgatcttctctggagaaggatcagatgaacttacgcagggttacatatattttcacaaggctccttctcctgaaaaagccgaggaggagagtgagaggcttctgagggaactctatttgtttgatgttctccgcgcagatcgaactactgctgcccatggtcttgaactgagagtcccatttctagatcatcgattttcttcctattacttgtctctgccaccagaaatgagaattccaaagaatgggatagaaaaacatctcctgagagagacgtttgaggattccaatctgatacccaaagagattctctggcgaccaaaagaagccttcagtgatggaataacttcagttaagaattcctggtttaagattttacaggaatacgttgaacatcaggttgatgatgcaatgatggcaaatgcagcccagaaatttcccttcaatactcctaaaaccaaagaaggatattactaccgtcaagtctttgaacgccattacccaggccgggctgactggctgagccattactggatgcccaagtggatcaatgccactgacccttctgcccgcacgctgacccactacaagtcagctgtcaaagcttaggtggtctttatgctgtaatgtgaaagcaaatatttcttcgtgttggatggggact

SEQ ID NO: 2504 - DNA, 1588 bp, Homo sapiens
  source 1..1588: mol_type = unassigned DNA
cctggcctcagcccgccacatcaccctgacctgcttacgcccagatgcaacagcattttgaatttgaataccagaccaaagtggatggtgagataatccttcatctttatgacaaaggaggaattgagcaaacaatttgtatgttggatggtgtgtttgcatttgttttactggatactgccaataagaaagtgttcctgggtagagatacatatggagtcagacctttgtttaaagcaatgacagaagatggatttttggctgtatgttcagaagctaaaggtcttgttacattgaagcactccgcgactccctttttaaaagtggagccttttcttcctggacactatgaagttttggatttaaagccaaatggcaaagttgcatccgtggaaatggttaaatatcatcactgtcgggatgtacccctgcacgccctctatgacaatgtggagaaactctttccaggttttgagatagaaactgtgaagaacaacctcaggatcctttttaataatgctgtaaagaaacgtttgatgacagacagaaggattggctgccttttatcagggggcttggactccagcttggttgctgccactctgttgaagcagctgaaagaagcccaagtacagtatcctctccagacatttgcaattggcatggaagacagccccgatttactggctgctagaaaggtggcagatcatattggaagtgaacattatgaagtcctttttaactctgaggaaggcattcaggctctggatgaagtcatattttccttggaaacttatgacattacaacagttcgtgcttcagtaggtatgtatttaatttccaagtatattcggaagaacacagatagcgtggtgatcttctctggagaaggatcagatgaacttacgcagggttacatatattttcacaaggctccttctcctgaaaaagccgaggaggagagtgagaggcttctgagggaactctatttgtttgatgttctccgcgcagatcgaactactgctgcccatggtcttgaactgagagtcccatttctagatcatcgattttcttcctattacttgtctctgccaccagaaatgagaattccaaagaatgggatagaaaaacatctcctgagagagacgtttgaggattccaatctgatacccaaagagattctctggcgaccaaaagaagccttcagtgatggaataacttcagttaagaattcctggtttaagattttacaggaatacgttgaacatcaggttgatgatgcaatgatggcaaatgcagcccagaaatttcccttcaatactcctaaaaccaaagaaggatattactaccgtcaagtctttgaacgccattacccaggccgggctgactggctgagccattactggatgcccaagtggatcaatgccactgacccttctgcccgcacgctgacccactacaagtcagctgtcaaagcttaggtggtctttatgctgtaatgtgaaagcaaatatttcttcgtgttggatggggactgtgggtagataggggaacaatgagagtcaactcaggctaacttgggtgtgaa

SEQ ID NO: 2505 - DNA, 1939 bp, Homo sapiens
  source 1..1939: mol_type = unassigned DNA
gcggtcacgtgactgctgcgggccagccaagatggcggcctcatgcttggtcctgctggcgctgtgtctgctgctgccgctgctgctgctgggaggatggaagcgctggcgccgggggcgggcggcccggcatgtagtagcggtggtgctgggcgacgtgggccgcagcccccgtatgcagtaccacgcgctgtcgttggccatgcacggcttctcggtgaccctcctggggttctgcaactccaaaccccatgatgagctcttgcagaacaacagaattcagattgtggggttgacagaacttcagagtcttgcagttgggccccgagttttccagtacggagtcaaagttgtacttcaggctatgtacttgctgtggaagttgatgtggagggagccaggtgcctatatctttctccagaaccccccaggtctgcctagcattgctgtctgctggttcgtgggctgcctttgtggaagcaagctcgtcattgactggcacaactatggctactccatcatgggtctggtgcatggccccaaccatcccctcgttctgctggccaagtggtacgagaagttctttgggcgcctgtcccacctgaacctgtgtgttaccaatgctatgcgagaagacctggcggataactggcacatcagggctgtgaccgtctacgacaagcccgcatctttctttaaagagacacctctggacctgcagcaccggctcttcatgaagctgggcagcatgcactctccgttcagggcccgctcagaacctgaggacccagtcacggagcggtcggccttcacggagcgggatgctgggagcgggctggtgacgcgtctccgtgagcggccagccctgctggtcagcagcacgagctggacagaggacgaagacttctccatcctgctggcagctttagaaaagtttgaacaactgactcttgatggacacaaccttccttctctcgtctgtgtgataacaggcaaagggcctctgagggagtattatagccgcctcatccaccagaagcacttccagcacatccaggtctgcaccccctggctggaggccgaggactaccccctgcttctagggtcggcggacctgggtgtctgtctgcacacgtcctccagtggcctggacctgcccatgaaggtggtggacatgttcgggtgctgtttgcctgtgtgtgctgtgaacttcaagtgtttacatgagctggtgaaacatgaagaaaatggcctggtctttgaggactcagaggaactggcagctcagctgcagatgcttttctcaaactttcctgatcctgcgggcaagctaaaccagttccggaagaacctgcgggagtcgcagcagctccgatgggatgagagctgggtgcagactgtgctccctttggttatggacacataactcctgggccagaggctaaaaccccaggacccctgctgtccttcccgcagcttcttcttggagtctcagggcaaaccctttcgagcagcacctcccagtggccagaagctgaaatgacagcagtggtactgcctggtaaaagaattggttctgtgacccgggaagctttggttggccttgatttcttctctggaggcttggaaacgcttcctctcttcttctgttcttcacgccccatgcccctgctagcgtattactgttctgtgacttccctgtgacctctgcagaactcctcatcctgcgtttggtctccaggtgtcccctttctgccgtgttcctaacattttgattcctgtcttgaaaaaagcacctgctgcaccgtaagcccagggatgtggcagctgcagtgggcttggctttgtgaggaactgagtgtgtccacgttgggggaacatcatacttgatacacacgtttttatttgcacaaagaaaatgctatttttggagccagaa

SEQ ID NO: 2506 - DNA, 1419 bp, Homo sapiens
  source 1..1419: mol_type = unassigned DNA
cacgtgtcagaagtgtgttaagtgaatccattgcgtggtctcacgtaattctcctaactccaaaccccatgatgagctcttgcagaacaacagaattcagattgtggggttgacagaacttcagagtcttgcagttgggccccgagttttccagtacggagtcaaagttgtacttcaggctatgtacttgctgtggaagttgatgtggagggagccaggtgcctatatctttctccagaaccccccaggtctgcctagcattgctgtctgctggttcgtgggctgcctttgtggaagcaagctcgtcattgactggcacaactatggctactccatcatgggtctggtgcatggccccaaccatcccctcgttctgctggccaagtggtacgagaagttctttgggcgcctgtcccacctgaacctgtgtgttaccaatgctatgcgagaagacctggcggataactggcacatcagggctgtgaccgtctacgacaagcccgcatctttctttaaagagacacctctggacctgcagcaccggctcttcatgaagctgggcagcatgcactctccgttcagggcccgctcagaacctgaggacccagtcacggagcggtcggccttcacggagcgggatgctgggagcgggctggtgacgcgtctccgtgagcggccagccctgctggtcagcagcacgagctggacagaggacgaagacttctccatcctgctggcagctttagaaaagtttgaacaactgactcttgatggacacaaccttccttctctcgtctgtgtgataacaggcaaagggcctctgagggagtattatagccgcctcatccaccagaagcacttccagcacatccaggtctgcaccccctggctggaggccgaggactaccccctgcttctagggtcggcggacctgggtgtctgtctgcacacgtcctccagtggcctggacctgcccatgaaggtggtggacatgttcgggtgctgtttgcctgtgtgtgctgtgaacttcaagtgtttacatgagctggtgaaacatgaagaaaatggcctggtctttgaggactcagaggaactggcagctcagctgcagatgcttttctcaaactttcctgatcctgcgggcaagctaaaccagttccggaagaacctgcgggagtcgcagcagctccgatgggatgagagctgggtgcagactgtgctccctttggttatggacacataactcctgggccagaggctaaaaccccaggacccctgctgtccttcccgcagcttcttcttggagtctcagggcaaaccctttcgagcagcacctcccagtggccagaagctgaaatgacagcagtggtactgcctggtaaaagaattggttctgtgacccgggaagctttggttggc

SEQ ID NO: 2507 - DNA, 2393 bp, Homo sapiens
  source 1..2393: mol_type = unassigned DNA
ctaagcagcaagccacgcacctcccgcgctggcgaaatccgagacccgccccttccggaagttttgacactttgtgcgccccgggcaatgcgattgagagggtaatcatccggtccgttatctaaacccgtcactccgggaaacagcgacccgatctttccggatccgcgctctcccagcatcctttgccttccggtatgtggccccgtctggctagtcccgcctagcgcgcccatttcgagcccaagtttccagctcgggtttccaggctcagaattttccaggagtaggttcttgggcagtggctgtgggagctggaatggcgcagctggaaggttactatttctcggccgccttgagctgtacctttttagtatcctgcctcctcttctccgccttcagccgggcgttgcgagagccctacatggacgagatcttccacctgcctcaggcgcagcgctactgtgagggccatttctccctttcccagtgggatcccatgattactacattacctggcttgtacctggtgtcaattggagtgatcaaacctgccatttggatctttggatggtctgaacatgttgtctgctccattgggatgctcagatttgttaatcttctcttcagtgttggcaacttctatttactatatttgcttttctgcaaggtacaacccagaaacaaggctgcctcaagtatccagagagtcttgtcaacattaacactagcagtatttccaacactttatttttttaacttcctttattatacagaagcaggatctatgttttttactctttttgcgtatttgatgtgtctttatggaaatcataaaacttcagccttccttggattttgtggcttcatgtttcggcaaacaaatatcatctgggctgtcttctgtgcaggaaatgtcattgcacaaaagttaacggaggcttggaaaactgagctacaaaagaaggaagacagacttccacctattaaaggaccatttgcagaattcagaaaaattcttcagtttcttttggcttattccatgtcctttaaaaacttgagtatgcttttgcttctgacttggccctacatccttctgggatttctgttttgtgcttttgtagtagttaatggtggaattgttattggcgatcggagtagtcatgaagcctgtcttcattttcctcaactattctactttttttcatttactctctttttttcctttcctcatctcctgtctcctagcaaaattaagacttttctttccttagtttggaaacgtagaattctgttttttgtggttaccttagtctctgtgtttttagtttggaaattcacttatgctcataaatacttgctagcagacaatagacattatactttctatgtgtggaaaagagtttttcaaagatatgaaactgtaaaatatttgttagttccagcctatatatttgctggttggagtatagctgactcattgaaatcaaagtcaattttttggaatttaatgtttttcatatgcttgttcactgttatagttcctcagaaactgctggaatttcgttacttcattttaccttatgtcatttataggcttaacatacctctgcctcccacatccagactcatttgtgaactgagctgctatgcagttgttaatttcataacttttttcatctttctgaacaagacttttcagtggccaaatagtcaggacattcaaaggtttatgtggtaatatcagtgatatttcgaactgtgaaaatggacttaataattagaccatttctacaaagaacaactgaataggtggaaaacatggaatttcttttaggtgcagtggtggtcttcaaattacattagttttttttatatatattttaaacatatgtaagaaattaagtggcaaagaactgagaaagcttaagacctgcttcaaaagcctgaaaaatggaaaaataaaattgttttcagatatctcatatcactctcataatgttggccccttaaaaagcttgggaatgttttgtatgtacaagtttattaaaactgggtatgcttcatattactggaatgaatttattctcttcagagagaaatattaggttagtgcaaaagtaattgtggtttttgccattgaaagtaatggcaaaaccacaattacttttttaccaacctaataacaatgtattagcaaatatttacaaatggtcaggtgatattcttgattgaaaagttgcttaacatttcagtaatataattttaattctaagtcaaaatacaaatgcatagatagtaaatgataaagtagagactcatatatgcctgtctagacatcaaattgttggttattgtttacaatctagaaatgatgaagctctttcactaat

SEQ ID NO: 2508 - DNA, 2558 bp, Homo sapiens
  source 1..2558: mol_type = unassigned DNA
ggaagatggcggccggcgaaaggagctggtgcctgtgcaagttgttgaggtttttttattcattattcttccctgggctcattgtatgtggaactttatgtgtgtgtttggtcattgtcctttggggaatcagactgctgctacagagaaagaaaaaattagtgtcaactagcaaaaatgggaaaaatcaaatggtgattgcattttttcatccatactgcaatgctggtggaggaggagaaagagttttatggtgtgctttaagagccctgcagaaaaagtatcctgaagcagtttatgttgtttataccggcgatgttaatgtcaacggtcaacagatactagaaggtgctttcagaagatttaacatcagattaattcacccagtgcagtttgtttttttaaggaaacgctatcttgtggaagattcactgtatcctcacttcacactgctgggccaaagtctaggatccatttttcttggctgggaagctctaatgcagtgtgttcctgatgtttacattgattcaatgggatacgcttttacgcttcctctgtttaagtatatagggggttgccaagttggaagctatgttcattatcctactatcagcaccgacatgctctctgtagtgaagaatcaaaatattggatttaataatgcagccttcattaccaggaatccttttctcagcaaagtaaagctcatctactactatttatttgcttttatttatggacttgttggttcttgcagtgatgtagtcatggtcaattcttcttggacactaaaccatattctctcactatggaaagttgggaattgcactaacattgtttatccaccttgtgatgtgcagacatttctggacattcccttacatgagaaaaagatgaccccaggacatttgctggtttctgttggccagtttaggccggaaaagaatcatccattgcagatcagagcctttgctaaattgctgaataagaagatggttgagtcacctccttcgcttaaacttgtcctcattggaggttgtcgtaacaaagatgatgaacttagggtaaaccaactgagaaggctgtctgaggatttaggagttcaagaatatgtggaatttaaaataaacattccatttgatgaattaaagaattatttgtctgaagcaacaattggtctgcataccatgtggaacgagcattttgggattggagttgtggagtgtatggcagctggcacaattatccttgcacacaattcggggggcccaaagcttgacattgtggttcctcacgaaggagatataactggctttctggctgagagtgaagaagactatgctgaaactatcgctcacattctttccatgtctgcagaaaagagactccaaatcagaaaaagtgctcgtgcatctgtaagcagattctctgatcaggaatttgaagtgacattcctatcatctgtggaaaagttatttaagtaatgccatatctgtaaaattaaagatattttatataaactggttaaacaccttcatatgtaaatatttttctaaattcaatctcatttgtcaaatcattttactttagaaaacagacaaaatttccttttagaataaaaggaagtgttgaaaagaaaatggatgactagccttcggcttccattcttggtatacatgagagaggctggctgctgagatgaatgtgaaccaggttgcagagaatctggctttgagccaccaggaagaactagtggatttgccaaaaaactaccccttgagtgaaaatgaagatgagggggacagtgatggagagagaaagcatcaaaagcttctggaagcaatcatttcccttgatggaaagaataggcggaaattggctgagaggtctgaggctagtctgaaagtgtcagagttcagtgtcagttctgaaggatcaggagaaaagctgggccttgcagatctgcttgagcccgttaaaacttcatcttctttggccactgtaaaaaagcaactgaatagagtcaaatcaaagaaggtggtggagttacctcttaacaaagaaaaaattgaacagatccacagagaagtagcattcagtaaaacctcacaggtcctctccaaatgggaccctatcatcctgaagaaccagcaggcagagcagctggtttttcccctggggaaggagcagccagccattgctcccattgaacatgcgctcagtggctggaaggcaagaactcccctggagcaggaaatttttaacctcctccataagaacaagcagccagtgacagatcctttactgactcccatggaaaaggcctctctccaagccatgagcctggaagaggcaaagatgcaccgagcagagcttcagagggctcgggctctgcagtcctactatgaggccaaggctcgaaaagagaagaaaatcaaaagtaaaaagtatcacaaagtcgtgaagaaaggaaaggccaagaaagccttaaaagagtttgagcagctacagaaggttaatccaactgtggcactggaagaaatggaaaaaattgaaaa

SEQ ID NO: 2509 - DNA, 1404 bp, Homo sapiens
  source 1..1404: mol_type = unassigned DNA
gagttcgggggtcggcggaagatggcggccggcgaaaggagctggtgcctgtgcaagttgttgaggagttgtggagtgtatggcagctggcacaattatccttgcacacaattcggggggcccaaagcttgacattgtggttcctcacgaaggagatataactggctttctggctgagagtgaagaagactatgctgaaactatcgctcacattctttccatgtctgcagaaaagagactccaaatcagaaaaagtgctcgtgcatctgtaagcagattctctgatcaggaatttgaagtgacattcctatcatctgtggaaaagttatttaagtaatgccatatctgtaaaattaaagatattttatataaactggttaaacaccttcatatgtaaatatttttctaaattcaatctcatttgtcaaatcattttactttagaaaacagacaaaatttccttttagaataaaaggaagtgttgaaaagaaaatggatgactagccttcggcttccattcttggtatacatgagagaggctggctgctgagatgaatgtgaaccaggttgcagagaatctggctttgagccaccaggaagaactagtggatttgccaaaaaactaccccttgagtgaaaatgaagatgagggggacagtgatggagagagaaagcatcaaaagcttctggaagcaatcatttcccttgatggaaagaataggcggaaattggctgagaggtctgaggctagtctgaaagtgtcagagttcagtgtcagttctgaaggatcaggagaaaagctgggccttgcagatctgcttgagcccgttaaaacttcatcttctttggccactgtaaaaaagcaactgaatagagtcaaatcaaagaaggtggtggagttacctcttaacaaagaaaaaattgaacagatccacagagaagtagcattcagtaaaacctcacaggtcctctccaaatgggaccctatcatcctgaagaaccagcaggcagagcagctggtttttcccctggggaaggagcagccagccattgctcccattgaacatgcgctcagtggctggaaggcaagaactcccctggagcaggaaatttttaacctcctccataagaacaagcagccagtgacagatcctttactgactcccatggaaaaggcctctctccaagccatgagcctggaagaggcaaagatgcaccgagcagagcttcagagggctcgggctctgcagtcctactatgaggccaaggctcgaaaagagaagaaaatcaaaagtaaaaagtatcacaaagtcgtgaagaaaggaaaggccaagaaagccttaaaagagtttgagcagctacagaaggttaatccaactgtggcactggaagaaatggaaaaaa

SEQ ID NO: 2510 - DNA, 2360 bp, Homo sapiens
  source 1..2360: mol_type = unassigned DNA
gcgcgcagcccgcggcggccatctttactcagggcacagagggtctctgcggccgtagcggccggggctgcggtagccactttagatttgggcaaggactttagattcgggctctgttctgtttccgccgtcctgcttcctgccgaggctggcccaggcagccgcgcttcgaaggacgccgccgggagctgcggagcatgcgtggagtggcagtgctaacggctggtgtctcgcactgttggcctgtgaaggtacgtgaagctgaaagcctggaatggctggaaaggggtcatcaggcaggcggcccctgctgctggggctgctggtggccgtagccactgtccacctggtcatctgtccctacaccaaagtggaggagagcttcaacctgcaggccacacatgacctgctctaccactggcaagacctggagcagtacgaccatcttgagttccccggagtcgtccccaggacgttcctcgggccagtggtgatcgcagtgttctccagccccgcggtttacgtgctttcgctgttagaaatgtccaagttttactctcagctaatagttagaggagtgcttggactcggcgtgatttttggactctggacgttacaaaaggaagtgagacggcacttcggggccatggtggccaccatgttctgctgggtgacggccatgcagttccacctgatgttctactgcacgcggacactgcccaatgtgctggccctgcctgtagtcctgctggccctcgcggcctggctgcggcacgagtgggcccgcttcatctggctgtcagccttcgccatcatcgtgttcagggtggagctgtgcctgttcctgggcctcctgctgctgctggccttgggcaaccgaaaggtttctgtagtcagagcccttcgccacgccgtcccggcagggatcctctgtttaggactgacggttgctgtggactcttatttttggcggcagctcacttggccggaaggaaaggtgctttggtacaacactgtcctgaacaaaagctccaactgggggacctccccgctgctgtggtacttctactcagccctgccccgcggcctgggctgcagcctgctcttcatccccctgggcttggtagacagaaggacgcacgcgccgacggtgctggcactgggcttcatggcactctactccctcctgccacacaaggagctacgcttcatcatctatgccttccccatgctcaacatcacggctgccagaggctgctcctacctgctgaataactataaaaagtcttggctgtacaaagcggggtctctgcttgtgatcggacacctcgtggtgaatgccgcctactcagccacggccctgtatgtgtcccatttcaactacccaggtggcgtcgcaatgcagaggctgcaccagctggtgcccccccagacagacgtccttctgcacattgacgtggcagccgcccagacaggtgtgtctcggtttctccaagtcaacagcgcctggaggtacgacaagagggaggatgtgcagccggggacaggcatgctggcatacacacacatcctcatggaggcggcccctgggctcctggccctctacagggacacacaccgggtcctggccagcgtcgtggggaccacaggtgtgagtctgaacctgacccaactgccccccttcaacgtccacctgcagacaaagctggtgcttctggagaggctcccccggccgtcctgagggggaccaggcagccctcagcagccacaggccttccaggagctgttatcactaccagtttctggcacaattccagcacaattatgacaattcagagaagcaagtcaaaggactgggcacctgcctctgacagacaccagaccaggtccagggcctcctccacagcctcagctggggctctcagcaccaaagaacgaggggcccaggtcttgttggcaccccgggagccactgcccagggtgatggtggccagctcagggcttcctgcgggtgactgtcgcccagaccaggtgccattcatgactaatcaggagcagcgggctcacccaggcacctgtctgccaggaggccacgtgtgtcctgcccacccagggggagctgtattttggcagcaccccacgcttgctgcccgagggcctcttggggcacctaagacagcaccccctctcaggggagaccatggtggccccggccgcacccccccaccctggtgccaccactgcaacttttgtattcacaggcatcccatctccatcacagataaaatcttaggagataaacacattcaaaaaggaatgagataaaaagaataaggcaataaatgttgattggaacctct

SEQ ID NO: 2511 - DNA, 1488 bp, Homo sapiens
  source 1..1488: mol_type = unassigned DNA
ggcaaccgaaaggtttctgtagtcagagcccttcgccacgccgtcccggcagggatcctctgtttaggactgacggttgctgtggactcttatttttggcggcagctcacttggccggaaggaaaggtgctttggtacaacactgtcctgaacaaaagctccaactgggggacctccccgctgctgtggtacttctactcagccctgccccgcggcctgggctgcagcctgctcttcatccccctgggcttggtagacagaaggacgcacgcgccgacggtgctggcactgggcttcatggcactctactccctcctgccacacaaggagctacgcttcatcatctatgccttccccatgctcaacatcacggctgccagaggctgctcctacctgctgaataactataaaaagtcttggctgtacaaagcggggtctctgcttgtgatcggacacctcgtggtgaatgccgcctactcagccacggccctgtatgtgtcccatttcaactacccaggtggcgtcgcaatgcagaggctgcaccagctggtgcccccccagacagacgtccttctgcacattgacgtggcagccgcccagacaggtgtgtctcggtttctccaagtcaacagcgcctggaggtacgacaagagggaggatgtgcagccggggacaggcatgctggcatacacacacatcctcatggaggcggccctgggctcctggccctctacagggacacacaccgggtcctggccagcgtcgtggggaccacaggtgtgagtctgaacctgacccaactgccccccttcaacgtccacctgcagacaaagctggtgcttctggagaggctcccccggccgtcctgagggggaccaggcagccctcagcagccacaggccttccaggagctgttatcactaccagtttctggcacaattccagcacaattatgacaattcagagaagcaagtcaaaggactgggcacctgcctctgacagacaccagaccaggtccagggcctcctccacagcctcagctggggctctcagcaccaaagaacgaggggcccaggtcttgttggcaccccgggagccactgcccagggtgatggtggccagctcagggcttcctgcgggtgactgtcgcccagaccaggtgccattcatgactaatcaggagcagcgggctcacccaggcacctgtctgccaggaggccacgtgtgtcctgcccacccagggggagctgtattttggcagcaccccacgcttgctgcccgagggcctcttggggcacctaagacagcaccccctctcaggggagaccatggtggccccggccgcacccccccaccctggtgccaccactgcaacttttgtattcacaggcatcccatctccatcacagataaaatcttaggagataaacacattcaaaaaggaatgagataaaaagaataaggcaataaatgttgattggaacctct

SEQ ID NO: 2512 - DNA, 3924 bp, Homo sapiens
  source 1..3924: mol_type = unassigned DNA
acggatttccgcctccctcacagaaggcagtcactgcaacgtgcgtggcctcagttgcgtcatatccggcccttgcgatcagggcttgaggaacccgcgccatgaagtgcgtgtttgttaccgtagggaccaccagctttgacgacctcattgcgtgtgtgtcggcgcccgacagtctgcaaaaaatcgagagccttggttacaaccgacttatcctgcaaattggtagaggaacggtggtacctgaacccttcagtactgagtcgtttactctggatgtttacaggtacaaggattccttgaaagaagacattcagaaagcagatcttgttattagtcacgcaggtgcaggaagctgtttggagactctggaaaaaggaaagccactcgtagtggttataaacgaaaagttgatgaacaatcatcagctggaactggcaaagcagctacacaaagagggtcatctcttctattgtacctgcagggtcctgacttgtcctgggcaagccaagtccattgcttctgctcctgggaagtgccaagattctgcagcgctgacttcaactgccttttcaggcctagactttgggctgctttccggatacctgcataagcaagcccttgttactgctacccatcctacctgcaccctgctttttccctcttgccacgctttttttcctctccctcttacccccaccctgtacaaaatgcataaaggatggaaaaactactgcagccagaagtctttgaatgaggcatcaatggatgaatatttaggcagcttagggctgtttcgaaagctgactgccaaggatgcctcttgcctctttcgggccatttcggagcagttgttttgcagccaggtccatcatttggaaatcaggaaggcttgtgtctcatatatgagggaaaatcaacaaacttttgagtcttatgtggagggatcttttgagaaatacctggaacggttgggagatcccaaggaaagtgctggccagctggaaataagagctctttctctaatttataatcgggatttcattctttatcgctttcctggaaaacctccaacttatgtcacagataatggctatgaagacaagattctactctgctactcaagtagtggtcactatgattctgtgtactcaaaacaatttcagtcaagtgcagctgtttgtcaggctgtattgtacgaaattctctataaagatgtgtttgttgtggatgaagaagagttgaagactgcgattaaattgtttcgaagtggttctaagaagaacagaaataatgctgtaactggaagcgaggatgcccatactgattacaagagttcaaatcagaataggatggaagagtggggtgcctgctacaatgctgaaaatataccagagggctacaataaaggaacagaagaaacaaagtctccagaaaatccatcaaagatgcccttcccctataaggtgctcaaagccctggatccagaaatctatcgtaatgtagaatttgatgtttggttggacagcagaaaagaacttcaaaaatctgattacatggagtatgctgggagacagtactatttgggagacaagtgtcaggtttgcttggaatcagaaggaagatattataatgctcatatccaggaagttggaaatgagaacaattcagtaacagtcttcattgaagaattggcggaaaagcatgttgttccactggctaacttaaaaccagttacccaagtgatgtctgttcctgcctggaatgctatgcccagtcggaaaggaagaggttaccagaaaatgcctgggggttatgtcccggaaatagttatatcagagatggacataaagcaacagaagaagatgttcaagaaaattcgagggaaagaagtttacatgactatggcttacggcaagggagaccccctcctcccacccaggctgcagcacagtatgcattatgggcacgatcctccaatgcactactcacagacagctggcaatgttatgtctaatgaacattttcatcctcagcatccatctccgagacaaggtcggggatatgggatgcccaggaattcatctcggtttataaacaggcacaacatgccgggccctaaagttgatttttacccaggcccaggtaaaaggtgctgccagagctatgataacttctcttatagatctcgttcatttagacgtagtcaccgccagatgagttgtgtgaataaggagtcccagtatggatttaccccagggaatggacagatgcccaggggcttggaagaaactattactttttatgaagttgaagaaggggatgagactgcttatccaactttacctaatcatggaggtccctctacaatggttcctgctacttcaggatactgtgttggaaggcggggacatagctcaggcaaacagactttgaatttagaggagggcaatggccagagtgaaaatgggcgatatcatgaagaatatctttatcgtgcagagccagactatgaaacttcaggtgtttatagcacaactgcatctacagcaaacttgtctcttcaggacagaaagtcatgttctatgtctcctcaggacacagttacctcatacaactacccccagaagatgatgggaaatattgcagcagttgcagcttcctgtgccaataatgttccagctccagtcttatctaacggtgcagcggctaatcaagctattagtaccacttcagtttcctcacagaatgctatacagcctctctttgtatctccacctacacacggcaggccagatacaaaagttttgcagtactatttcaatctaggattgcagtgctattaccacagctactggcactccatggtctatgtgccacagatgcagcagcagcttcatgtagagaattatccagtctatactgagccacctctggtagatcaaaccgttcctcaatgctacagtgaggtgaggagagaagatggcatacaggcggaagcatcagcaaatgatacttttccgaatgctgattcttcatctgtccctcatggagcagtctattatccagtaatgtcagatccctatgggcagccacctttgccaggttttgactcctgccttccggttgtgccagattattcctgtgttcccccctggcatccagttggtacagcatatggtggttcttctcaaattcatggtgctataaatcctgggccaattggctgtattgctccatctcccccagcttctcattatgtacctcagggtatgtaagatccagcagtatgaagtattcttgcactgccattttcttgctgtttttgtttttaaaaagtattttatgttagtggttaaatgatttaggtgattagtgtttactattgtatttgtctttaaaattattttatcttttgatttaaaatagtactttaaaattaaggggtattattttgggctgtgactaaggaaattgagatggatgtacaactagccccatattgagcatacttcattgtattcagctgttttcctgtcagccatttgtcagctttatattagctgatggtaccaattgataaaatgaatataaagtatttcattggttcaaaaatcacacatcatattaaaccatgcagaattggagtaacttccacttttttctagaaagtaaaaccaagagcctttgcttctggataactcacttaatattaaattaaagagctcttcacgtttcttgagaattatctgaagccagttgcattctgtgatatcagttttgaaggcacatggttctctgctttagatttatcccatatgctattgtttaatactggatgtatgtaagtgttttactgcactgtattgaattggtgtcttttgcacagttagcagtaaataaaaattagcatttaaaattgcc

SEQ ID NO: 2513 - DNA, 1398 bp, Homo sapiens
  source 1..1398: mol_type = unassigned DNA
acggatttccgcctccctcacagaaggcagtcactgcaacgtgcgtggcctcagttgcgtcatatccggcccttgcgatcagggcttgaggaacccgcgccatgaagtgcgtgtttgttaccgtagggaccaccagctttgacgacctcattgcgtgtgtgtcggcgcccgacagtctgcaaaaaatcgagagccttggttacaaccgacttatcctgcaaattggtagaggaacggtggtacctgaacccttcagtactgagtcgtttactctggatgtttacaggtacaaggattccttgaaagaagacattcagaaagcagatcttgttattagtcacgcaggtgcaggaagctgtttggagactctggaaaaaggaaagccactcgtagtggttataaacgaaaagttgatgaacaatcatcagctggaactggcaaagcagctacacaaagagggtcatctcttctattgtacctgcagcacgcttcctgggctgttacagtcaatggacttatcaacactgaaatgttatcctcctggccagccagaaaaattttctgcatttttggataaagttgttggattacaaaaataaacactaaactctcaacactttaaaagcaacccccaaattcaacctatgtaatgtgattaaatcaaattaaatacataatatatatttacaaaataatataattaataaacttcctacatctatagaatgtataggaaattttatgttgtgcacatttgcattgggtccaaatcctaattgcagtttagtgaaattactagatttttttctaatcttcagtatgtagtgagcattcacaggttttctcctagaatctcaagtggaattggaatcataaaaatgaatgagatttgaaaactttcacaaagattataaatgtagttagtttgatactccttagaataaaaaaatgaaacagtaacaacttttatgtaaaaaaattttacataagagttagcatctttagctttataatctaaggaaccaaatttaaaaaatgatggattatgctctgtgaaatgaaaagttcaatcattgcctaaaaaagatgatcaagttagttgatctcttgtacttggaaaagctacttttttcctaaagaacagagtggagtggatatattcactttttttttctaaaacatacaaagtgataaaataatcgtgcctaatgtcaaaactttactggtttgagaagaataatcaaaaaggacttataccaataggacttactattgttttttaaggatctcctctcacagtggtaatgaaacattaactgtaacagaaatttacaatttatgtgcttataaaattagttttatgaatgaacaataaactgatgcatataatggcttaaa

SEQ ID NO: 2514 - DNA, 4071 bp, Homo sapiens
  source 1..4071: mol_type = unassigned DNA
ggaacccgcgccatgaagtgcgtgtttgttaccgtagggaccaccagctttgacgacctcattgcgtgtgtgtcggcgcccgacagtctgcaaaaaatcgagagccttggttacaaccgacttatcctgcaaattggtagaggaacggtggtacctgaacccttcagtactgagtcgtttactctggatgtttacaggtacaaggattccttgaaagaagacattcagaaagcagatcttgttattagtcacgcaggtgcaggaagctgtttggagactctggaaaaaggaaagccactcgtagtggttataaacgaaaagttgatgaacaatcatcagctggaactggcaaagcagctacacaaagagggtcatctcttctattgtacctgcagggtcctgacttgtcctgggcaagccaagtccattgcttctgctcctgggaagtgccaagattctgcagcgctgacttcaactgccttttcaggcctagactttgggctgctttccggatacctgcataagcaagcccttgttactgctacccatcctacctgcaccctgctttttccctcttgccacgctttttttcctctccctcttacccccaccctgtacaaaatgcataaaggatggaaaaactactgcagccagaagtctttgaatgaggcatcaatggatgaatatttaggcagcttagggctgtttcgaaagctgactgccaaggatgcctcttgcctctttcgggccatttcggagcagttgttttgcagccaggtccatcatttggaaatcaggaaggcttgtgtctcatatatgagggaaaatcaacaaacttttgagtcttatgtggagggatcttttgagaaatacctggaacggttgggagatcccaaggaaagtgctggccagctggaaataagagctctttctctaatttataatcgggatttcattctttatcgctttcctggaaaacctccaacttatgtcacagataatggctatgaagacaagattctactctgctactcaagtagtggtcactatgattctgtgtactcaaaacaatttcagtcaagtgcagctgtttgtcaggctgtattgtacgaaattctctataaagatgtgtttgttgtggatgaagaagagttgaagactgcgattaaattgtttcgaagtggttctaagaagaacagaaataatgctgtaactggaagcgaggatgcccatactgattacaagagttcaaatcagaataggatggaagagtggggtgcctgctacaatgctgaaaatataccagagggctacaataaaggaacagaagaaacaaagtctccagaaaatccatcaaagatgcccttcccctataaggtgctcaaagccctggatccagaaatctatcgtaatgtagaatttgatgtttggttggacagcagaaaagaacttcaaaaatctgattacatggagtatgctgggagacagtactatttgggagacaagtgtcaggtttgcttggaatcagaaggaagatattataatgctcatatccaggaagttggaaatgagaacaattcagtaacagtcttcattgaagaattggcggaaaagcatgttgttccactggctaacttaaaaccagttacccaagtgatgtctgttcctgcctggaatgctatgcccagtcggaaaggaagaggttaccagaaaatgcctgggggttatgtcccggaaatagttatatcagagatggacataaagcaacagaagaagatgttcaagaaaattcgagggaaagaagtttacatgactatggcttacggcaagggagaccccctcctcccacccaggctgcagcacagtatgcattatgggcacgatcctccaatgcactactcacagacagctggcaatgttatgtctaatgaacattttcatcctcagcatccatctccgagacaaggtcggggatatgggatgcccaggaattcatctcggtttataaacaggcacaacatgccgggccctaaagttgatttttacccaggcccaggtaaaaggtgctgccagagctatgataacttctcttatagatctcgttcatttagacgtagtcaccgccagatgagttgtgtgaataaggagtcccagtatggatttaccccagggaatggacagatgcccaggggcttggaagaaactattactttttatgaagttgaagaaggggatgagactgcttatccaactttacctaatcatggaggtccctctacaatggttcctgctacttcaggatactgtgttggaaggcggggacatagctcaggcaaacagactttgaatttagaggagggcaatggccagagtgaaaatgggcgatatcatgaagaatatctttatcgtgcagagccagactatgaaacttcaggtgtttatagcacaactgcatctacagcaaacttgtctcttcaggacagaaagtcatgttctatgtctcctcaggacacagttacctcatacaactacccccagaagatgatgggaaatattgcagcagttgcagcttcctgtgccaataatgttccagctccagtcttatctaacggtgcagcggctaatcaagctattagtaccacttcagtttcctcacagaatgctatacagcctctctttgtatctccacctacacacggcaggccagtgattgcctcaccatcctatccatgccattctgctattcctcatgctggtgcctctctaccaccaccaccaccaccaccaccaccaccaccaccaccaccacctcctcctcctcctcctcctcctcctcctcctcctcctgctcttgatgtgggagagacttcaaacttacaaccaccaccaccactaccacctccaccttattcctgtgatccaagcggcagtgatttgcctcaagatacaaaagttttgcagtactatttcaatctaggattgcagtgctattaccacagctactggcactccatggtctatgtgccacagatgcagcagcagcttcatgtagagaattatccagtctatactgagccacctctggtagatcaaaccgttcctcaatgctacagtgaggtgaggagagaagatggcatacaggcggaagcatcagcaaatgatacttttccgaatgctgattcttcatctgtccctcatggagcagtctattatccagtaatgtcagatccctatgggcagccacctttgccaggttttgactcctgccttccggttgtgccagattattcctgtgttcccccctggcatccagttggtacagcatatggtggttcttctcaaattcatggtgctataaatcctgggccaattggctgtattgctccatctcccccagcttctcattatgtacctcagggtatgtaagatccagcagtatgaagtattcttgcactgccattttcttgctgtttttgtttttaaaaagtattttatgttagtggttaaatgatttaggtgattagtgtttactattgtatttgtctttaaaattattttatcttttgatttaaaatagtactttaaaattaaggggtattattttgggctgtgactaaggaaattgagatggatgtacaactagccccatattgagcatacttcattgtattcagctgttttcctgtcagccatttgtcagctttatattagctgatggtaccaattgataaaatgaatataaagtatttcattggttcaaaaatcacacatcatattaaaccatgcagaattggagtaacttccacttttttctagaaagtaaaaccaagagcctttgcttctggataactcacttaatattaaattaaagagctcttcacgtttcttgagaattatctgaagccagttgcattctgtgatatcagttttgaaggcacatggttctctgctttagatttatcccatatgctattgtttaatactggatgtatgtaagtgttttactgcactgtattgaattggtgtcttttgcacagttagcagtaaataaaaattagcatttaaaattgc

SEQ ID NO: 2515 - DNA, 1033 bp, Homo sapiens
  source 1..1033: mol_type = unassigned DNA
gacagcggctggtccccggaagttggacgcatgcgccgtttctctgcatggtgtgcgttctcgttctagctgcggccgcaggagctgtggcggttttcctaatcctgcgaatatgggtagtgcttcgttccatggacgttacgccccgggagtctctcagtatcttggtagtggctgggtccggtgggcataccactgagatcctgaggctgcttgggagcttgtccaatgcctactcacctagacattatgtcattgctgacactgatgaaatgagtgccaataaaataaattcttttgaactagatcgagctgatagagaccctagtaacatgtataccaaatactacattcaccgaattccaagaagccgggaggttcagcagtcctggccctccaccgttttcaccaccttgcactccatgtggctctcctttcccctaattcacagggtgaagccagatttggtgttgtgtaacggaccaggaacatgtgttcctatctgtgtatctgcccttctccttgggatactaggaataaagaaagtgatcattgtctacgttgaaagcatctgccgtgtagaaacgttatccatgtccggaaagattctgtttcatctctcagattacttcattgttcagtggccggctctgaaagaaaagtatcccaaatcggtgtaccttgggcgaattgtttgacaaatggcaactgacttctttagaattttgcagttaacagtagtatgtactcaaattggggggaaaaaaaccctacatgtttcttgtaaaggcgtctgacagtcctgagaattattgatggtaaggaataaaaaatgtacagatgactcagtgaagaaactgaggcttctcttatgaaacaaacattgataaacgtaactactaaatgtttatgcctctgtaaaccaaatttcttttctagataaaaatatgtattactacctgcaaattttcttctggctgttttagtagtattttttttacagaactaaatatagagtttgtatgattagtaa

SEQ ID NO: 2516 - DNA, 1536 bp, Homo sapiens
  source 1..1536: mol_type = unassigned DNA
atgcccctattaaaacttgtacatggctccccattggtttttggagaaaagttcaagctttttaccttggtgtctgcctgtatcccagtgttcaggctggctagacggcggaagaagatcctattttactgtcacttcccagatctgcttctcaccaagagagattcttttcttaaacgactatacagggccccaattgactggatagaggaatacaccacaggcatggcagactgcatcttagtcaacagccagttcacagctgctgtttttaaggaaacattcaagtccctgtctcacatagaccctgatgtcctctatccatctctaaatgtcaccagctttgactcagttgttcctgaaaagctggatgacctagtccccaaggggaaaaaattcctgctgctctccatcaacagatacgaaaggaagaaaaatctgactttggcactggaagccctagtacagctgcgtggaagattgacatcccaagattgggagagggttcatctgatcgtggcaggtggttatgacgagagagtcctggagaatgtggaacattatcaggaattgaagaaaatggtccaacagtccgaccttggccagtatgtgaccttcttgaggtctttctcagacaaacagaaaatctccctcctccacagctgcacgtgtgtgctttacacaccaagcaatgagcactttggcattgtccctctggaagccatgtacatgcagtgcccagtcattgctgttaattcgggtggacccttggagtccattgaccacagtgtcacagggtttctgtgtgagcctgacccggtgcacttctcagaagcaatagaaaagttcatccgtgaaccttccttaaaagccaccatgggcctggctggaagagccagagtgaaggaaaaattttcccctgaagcatttacagaacagctctaccgatatgttaccaaactgctggtataatcagattgtttttaagatctccattaatgtcatttttatggattgtagacccagttttgaaaccaaaaaagaaacctagaatctaatgcagaagagatcttttaaaaaataaacttgagtcttgaatgtgagccactttcctatataccacacctccctgtccacttttcagaaaaaccatgtcttttatgctataatcattccaaattttgccagtgttaagttacaaatgtggtgtcattccatgttcagcagagtattttaattatattttctcgggattattgctcttctgtctataaattttgaatgatactgtgccttaattggttttcatagtttaagtgtgtatcattatcaaagttgattaatttggcttcatagtataatgagagcagggctattgtagttcccagattcaatccaccgaagtgttcactgtcatctgttagggaatttttgtttgtcctgtctttgcctggatccatagcgagagtgctctgtattttttttaagataatttgtatttttgcacactgagatataataaaaggtgtttatcat

SEQ ID NO: 2517 - DNA, 1880 bp, Homo sapiens
  source 1..1880: mol_type = unassigned DNA
agcgcggagcttgcgcagaagacccccatcagggtgcggggtgcagttgcggctccagggccatggcggaggagcagggccgggaacgggactcggttcccaagccgtcggtgctgttcctccacccagacctgggcgtgggcggcgctgagcggctggtgttggacgcggcgctggcgctgcaggcgcgcgggtgtagcgtgaagatctggacagcgcactacgacccgggccactgtttcgccgagagccgcgagctaccggtgcgctgtgccggggactggctgccgcgaggcctgggctggggcggccgcggcgccgccgtctgcgcctacgtgcgcatggttttcctggcgctctacgtgctgttcctcgccgacgaggagttcgacgtggtagtgtgcgaccaggtgtctgcctgtatcccagtgttcaggctggctagacggcggaagaagatcctattttactgtcacttcccagatctgcttctcaccaagagagattcttttcttaaacgactatacagggccccaattgactggatagaggaatacaccacaggcatggcagactgcatcttagtcaacagccagttcacagctgctgtttttaaggaaacattcaagtccctgtctcacatagaccctgatgtcctctatccatctctaaatgtcaccagctttgactcagttgttcctgaaaagctggatgacctagtccccaaggggaaaaaattcctgctgctctccatcaacagatacgaaaggaagaaaaatctgactttggcactggaagccctagtacagctgcgtggaagattgacatcccaagattgggagagggttcatctgatcgtggcaggtggttatgacgagagagtcctggagaatgtggaacattatcaggaattgaagaaaatggtccaacagtccgaccttggccagtatgtgaccttcttgaggtctttctcagacaaacagaaaatctccctcctccacagctgcacgtgtgtgctttacacaccaagcaatgagcactttggcattgtccctctggaagccatgtacatgcagtgcccagtcattgctgttaattcgggtggacccttggagtccattgaccacagtgtcacagggtttctgtgtgagcctgacccggtgcacttctcagaagcaatagaaaagttcatccgtgaaccttccttaaaagccaccatgggcctggctggaagagccagagtgaaggaaaaattttcccctgaagcatttacagaacagctctaccgatatgttaccaaactgctggtataatcagattgtttttaagatctccattaatgtcatttttatggattgtagacccagttttgaaaccaaaaaagaaacctagaatctaatgcagaagagatcttttaaaaaataaacttgagtcttgaatgtgagccactttcctatataccacacctccctgtccacttttcagaaaaaccatgtcttttatgctataatcattccaaattttgccagtgttaagttacaaatgtggtgtcattccatgttcagcagagtattttaattatattttctcgggattattgctcttctgtctataaattttgaatgatactgtgccttaattggttttcatagtttaagtgtgtatcattatcaaagttgattaatttggcttcatagtataatgagagcagggctattgtagttcccagattcaatccaccgaagtgttcactgtcatctgttagggaatttttgtttgtcctgtctttgcctggatccatagcgagagtgctctgtattttttttaagataatttgtatttttgcacactgagatataataaaaggtgtttatcataaa

SEQ ID NO: 2518 - DNA, 1528 bp, Homo sapiens
  source 1..1528: mol_type = unassigned DNA
ggtgggcccacacaagcggcgcaccgttaagatggcggctgggctgcggaaacgcggccggtccggttccgcggcccaggcagagggactctgcaagcaatggctgcagcgcgcctggcaagagcggcgcctgctgctgcgggagccgcgctacacgctgctggtggccgcctgcctctgcctggcggaggtgggcatcaccttctgggtcattcacagggtggcatacacagagattgactggaaggcctacatggccgaggtagaaggcgtcatcaatggtacctatgactatacccaactgcagggtgacaccggaccacttgtgtacccagctggtttcgtgtacatctttatggggttgtactatgccaccagccgaggcactgacatccgcatggcccagaacatctttgctgtgctctacctggctaccttgctgcttgtcttcttgatctatcaccagacctgcaaggtacctcccttcgtctttttcttcatgtgctgcgcctcttaccgtgtccactccatctttgtgctgcggctcttcaatgacccagtggccatggtgctgctcttcctcagtatcaacctcctgctggcccagcgctggggctggggttgctgctttttcagcctggcagtctctgtgaagatgaatgtgctgctcttcgcccctgggttactgtttcttctcctcacacagtttggcttccgtggggccctccccaagctgggaatctgtgctggccttcaggtggtgctggggctgcccttcctgctggagaaccccagcggctacctgtcccgctcctttgaccttggccgccagtttctgttccactggacagtgaactggcgcttcctcccagaggcgctcttcctgcatcgagccttccacctggccctgttgactgcccacctcaccctgctcctgctgtttgccctctgcaggtggcacaggacaggggaaagtatcttgtcgctgctgagggatccctccaaaaggaaggttccaccccagccccttacacccaaccagatcgtttctaccctcttcacctccaacttcattggcatctgcttcagccgctccctccactaccagttctacgtctggtatttccacacactgccctacctcctgtgggccatgcctgcacgctggctcacacacctgctcaggttgttggtgctggggctcatcgagctctcctggaacacatacccttccacatcctgcagctctgctgccctgcacatatgccatgccgtcatcctgctgcagctctggctgggcccgcagcctttccccaagagcacccaacacagcaagaaagcccactgaagtccacccctttccctcaggacctgagtctaccctcaggacctggggttggttggactctgcccttccaaataaaccttgctaagtccaactctgtgcaacctacatggaggtgggggcagccgatgcctggtccaggctgtgagggacacgtatggagcagataaagaattcactcaa

SEQ ID NO: 2519 - DNA, 1452 bp, Homo sapiens
  source 1..1452: mol_type = unassigned DNA
acacaagcggcgcaccgttaagatggcggctgggctgcggaaacgcggccggtccggttccgcggcccaggcagagggactctgcaagcaatggctgcagcgcgcctggcaagagcggcgcctgctgctgcgggagccgcgctacacgctgctggtggccgcctgcctctgcctggcggaggtgggcatcaccttctgggtcattcacagggtggcatgtacccagctggtttcgtgtacatctttatggggttgtactatgccaccagccgaggcactgacatccgcatggcccagaacatctttgctgtgctctacctggctaccttgctgcttgtcttcttgatctatcaccagacctgcaaggtacctcccttcgtctttttcttcatgtgctgcgcctcttaccgtgtccactccatctttgtgctgcggctcttcaatgacccagtggccatggtgctgctcttcctcagtatcaacctcctgctggcccagcgctggggctggggttgctgctttttcagcctggcagtctctgtgaagatgaatgtgctgctcttcgcccctgggttactgtttcttctcctcacacagtttggcttccgtggggccctccccaagctgggaatctgtgctggccttcaggtggtgctggggctgcccttcctgctggagaaccccagcggctacctgtcccgctcctttgaccttggccgccagtttctgttccactggacagtgaactggcgcttcctcccagaggcgctcttcctgcatcgagccttccacctggccctgttgactgcccacctcaccctgctcctgctgtttgccctctgcaggtggcacaggacaggggaaagtatcttgtcgctgctgagggatccctccaaaaggaaggttccaccccagccccttacacccaaccagatcgtttctaccctcttcacctccaacttcattggcatctgcttcagccgctccctccactaccagttctacgtctggtatttccacacactgccctacctcctgtgggccatgcctgcacgctggctcacacacctgctcaggttgttggtgctggggctcatcgagctctcctggaacacatacccttccacatcctgcagctctgctgccctgcacatatgccatgccgtcatcctgctgcagctctggctgggcccgcagcctttccccaagagcacccaacacagcaagaaagcccactgaagtccacccctttccctcaggacctgagtctaccctcaggacctggggttggttggactctgcccttccaaataaaccttgctaagtccaactctgtgcaacctacatggaggtgggggcagccgatgcctggtccaggctgtgagggacacgtatggagcagataaagaattcactcaagcagtcctaagaggcactttattgcataggatt

SEQ ID NO: 2520 - DNA, 1895 bp, Homo sapiens
  source 1..1895: mol_type = unassigned DNA
ggatacttctacatagacataatcaagttttgactatttggaaaccaagcatcattaaaattctctcaaactcctaattgcgaagaatcgataacatttcaagaagtgataacatttctctgaacaagaaaagaagtgattgaccacgttttaaaagtactctggcactggtgctgtgttttcttcccctccctaaatttgaagaactatggagaaatggtacttgatgacagtagtggttttaataggactaacagtacgatggacagtgtctcttaattcttattcaggtgctggtaaaccgcctatgtttggtgattatgaagctcagagacactggcaagaaataacttttaatttaccggtcaaacaatggtattttaacagcagtgataacaatttacagtattggggattggattacccacctcttacagcttatcatagtctcctatgtgcatatgtggcaaagtttataaatccagactggattgctctccatacatcacgtggatatgagagtcaggcacataagctcttcatgcgtacaacagttttaattgctgatctgctgatttacatacctgcagtggttttgtactgttgttgcttaaaagaaatctcaactaagaaaaagattgctaatgcattatgcatcttgctgtatccaggccttattcttatagactatggacattttcagaacatatataattctgtgagtcttggctttgctttgtggggtgttcttggaatatcttgtgactgcgacctcctagggtcactggcattttgcttagctataaattataaacagatggaactttaccacgccttgccatttttttgctttttacttggcaagtgttttaaaaaaggcctcaaaggaaaggggtttgtgttgctagttaagctagcttgtattgttgtggcttccttcgttctctgctggctgccattctttacagaaagggaacaaaccctgcaggttctaagaagactcttcccggttgatcgtggattatttgaggataaagtagccaatatttggtgcagcttcaatgtctttctgaagattaaggatattttgccacgtcacatccaattaataatgagcttttgttctacgtttttgagcctgcttcctgcatgcataaaattaatacttcagccctcttccaaaggattcaaatttacactggttagctgtgcgctatcattctttttattttctttccaagtacatgaaaaatccattctcttggtgtcactaccagtctgcttagttttaagtgaaattccttttatgtctacttggtttttacttgtgtcaacatttagtatgctacctcttctattgaaggatgaactcctaatgccctctgttgtgacaacaatggcattttttatagcttgtgtaacttccttttcaatatttgaaaagacttctgaagaagaactgcagttgaaatccttttccatttctgtgaggaaatatcttccatgttttacatttctttccagaattatacaatatttgtttcttatctcagtcatcactatggtgcttctgacgttgatgactgtcacactggatcctcctcagaaactaccggacttgttttctgtattggtgtgttttgtatcttgcttgaacttcctgttcttcttggtatactttaacattattattatgtgggattccaaaagtggaagaaatcagaagaaaatcagctagctgtattcctaaacaaattgtttcctaaacaaatgtgaaaatgtgaacagtgctgaaaggttttgtgaactttttgctatgtataaatgaaattaccattttgagaaccatggaaccacaggaaaggaaatggtgaaaagtcattgttgtctacaca

SEQ ID NO: 2521 - DNA, 3371 bp, Homo sapiens
  source 1..3371: mol_type = unassigned DNA
cggaaggccggaggggcagtccgccgcgggggcgagcgcgcatgcgccttcctgggacccacggcaggcgcgaatcccagcggccggcgggcggcggggatacttctacatagacataatcaagttttgactatttggaaaccaagcatcattaaaattctctcaaactcctaattgcgaagaatcgataacatttcaagaagtgataacatttctctgaacaagaaaagaagtgattgaccacgttttaaaagtactctggcactggtgctgtgttttcttcccctccctaaatttgaagaactatggagaaatggtacttgatgacagtagtggttttaataggactaacagtacgatggacagtgtctcttaattcttattcaggtgctggtaaaccgcctatgtttggtgattatgaagctcagagacactggcaagaaataacttttaatttaccggtcaaacaatggtattttaacagcagtgataacaatttacagtattggggattggattacccacctcttacagcttatcatagtctcctatgtgcatatgtggcaaagtttataaatccagactggattgctctccatacatcacgtggatatgagagtcaggcacataagctcttcatgcgtacaacagttttaattgctgatctgctgatttacatacctgcagtggttttgtactgttgttgcttaaaagaaatctcaactaagaaaaagattgctaatgcattatgcatcttgctgtatccaggccttattcttatagactatggacattttcaatataattctgtgagtcttggctttgctttgtggggtgttcttggaatatcttgtgactgcgacctcctagggtcactggcattttgcttagctataaattataaacagatggaactttaccacgccttgccatttttttgctttttacttggcaagtgttttaaaaaaggcctcaaaggaaaggggtttgtgttgctagttaagctagcttgtattgttgtggcttccttcgttctctgctggctgccattctttacagaaagggaacaaaccctgcaggttctaagaagactcttcccggttgatcgtggattatttgaggataaagtagccaatatttggtgcagcttcaatgtctttctgaagattaaggatattttgccacgtcacatccaattaataatgagcttttgttctacgtttttgagcctgcttcctgcatgcataaaattaatacttcagccctcttccaaaggattcaaatttacactggttagctgtgcgctatcattctttttattttctttccaagtacatgaaaaatccattctcttggtgtcactaccagtctgcttagttttaagtgaaattccttttatgtctacttggtttttacttgtgtcaacatttagtatgctacctcttctattgaaggatgaactcctaatgccctctgttgtgacaacaatggcattttttatagcttgtgtaacttccttttcaatatttgaaaagacttctgaagaagaactgcagttgaaatccttttccatttctgtgaggaaatatcttccatgttttacatttctttccagaattatacaatatttgtttcttatctcagtcatcactatggtgcttctgacgttgatgactgtcacactggatcctcctcagaaactaccggacttgttttctgtattggtgtgttttgtatcttgcttgaacttcctgttcttcttggtatactttaacattattattatgtgggattccaaaagtggaagaaatcagaagaaaatcagctagctgtattcctaaacaaattgtttcctaaacaaatgtgaaaatgtgaacagtgctgaaaggttttgtgaactttttgctatgtataaatgaaattaccattttgagaaccatggaaccacaggaaaggaaatggtgaaaagtcattgttgtctacacaaaataaatgtatatggagaccaaagaccaatggaggcttgtctaagtactgcttggccaaaacatgtggttttattattcacagctattcaagtggggaaaaaagagaaacatgtccttaatcccattgtttactcaggaaatgcactttttaaatgtctttaaaaaactgagaaatatttcttgatatttgctttgtctaaacctacttccttcatcagaccatatagtgagcttcatgggagaattgagccccttctttttaatggaaatcactaattttggtattcaaacttacattttagaatgcaagtagtgtgtatttcactgtttagaagtcatatcttagggaattaaatttgtgataatctttttaattactgagaaggcaatttaaactgcttgaagtttgaatatgccttattacacatgcaaatttgattgttttaacaaggcaaataaaccataatcttatttatttccaagaatgcatattttaatacaattaaaaatgaattttcctgaatttaaatgtaagctttaacttaactttaagtggtttgagtgaagtcttctaaattacacataatcactggttctaaacttccagaaccattctgtttaattaaacattatattatatatatattattattgacatggttcagggttaccactgccagagcattgattcatgttaacttcatcctattaatactgtatcaccctgtattagcagaagccaatatttattatagtattcaactggtaaaaataatacatgatatccatgttgcagtttctcatataaagatatgttttctttagcctctgtaataaagataatcattttcccatcaacattttttaaggaatatatttcttctttcataagatagccattaaactatattaagtggtggtatattttaatatagtgcaaatcaaaccacatacaaaaaaaaactggttctagacacggacagtcacaggctgatataagaaggtatgtgtttctaagtctggtaaaggaagtgggtttagacaaagcaaaaatctagaaaggtttctttctcaaagcaaatgtgcataaagactcaaagggcaggtcaacgcagaatagcagccttgaatcactgccgaatcagcaagaacattgctgtccatggtcaccatctgtaatcactgtgcccaaatgtcagcatcttggctggctggtgtagctttatttttaaaaatattttttgtaatagtacacttgtgtttaacatagaatgttgacttagataaatgatgaggaagttataaataattggagtagcataactttattatttggaaataaaagtattatgtacatatattagtaaaatgaaatgcacctga

SEQ ID NO: 2522 - DNA, 1736 bp, Homo sapiens
  source 1..1736: mol_type = unassigned DNA
cttgctgtatccaggccttattcttatagactatggacattttcaatataattctgtgagtcttggctttgctttgtggggtgttcttggaatatcttgtgactgcgacctcctagggtcactggcattttgcttagctataaattataaacagatggaactttaccacgccttgccatttttttgctttttacttggcaagtgttttaaaaaaggcctcaaaggaaaggggtttgtgttgctagttaagctagcttgtattgttgtggcttccttcgttctctgctggctgccattctttacagaaagggaacaaaccctgcaggttctaagaagactcttcccggttgatcgtggattatttgaggataaagtagccaatatttggtgcagcttcaatgtctttctgaagattaaggatattttgccacgtcacatccaattaataatgagaccagtctgcttagttttaagtgaaattccttttatgtctacttggtttttacttgtgtcaacatttagtatgctacctcttctattgaaggatgaactcctaatgccctctgttgtgacaacaatggcattttttatagcttgtgtaacttccttttcaatatttgaaaagacttctgaagaagaactgcagttgaaatccttttccatttctgtgaggaaatatcttccatgttttacatttctttccagaattatacaatatttgtttcttatctcagtcatcactatggtgcttctgacgttgatgactgtcacactggatcctcctcagaaactaccggacttgttttctgtattggtgtgttttgtatcttgcttgaacttcctgttcttcttggtatactttaacattattattatgtgggattccaaaagtggaagaaatcagaagaaaatcagctagctgtattcctaaacaaattgtttcctaaacaaatgtgaaaatgtgaacagtgctgaaaggttttgtgaactttttgctatgtataaatgaaattaccattttgagaaccatggaaccacaggaaaggaaatggtgaaaagtcattgttgtctacacaaaataaatgtatatggagaccaaagaccaatggaggcttgtctaagtactgcttggccaaaacatgtggttttattattcacagctattcaagtggggaaaaaagagaaacatgtccttaatcccattgtttactcaggaaatgcactttttaaatgtctttaaaaaactgagaaatatttcttgatatttgctttgtctaaacctacttccttcatcagaccatatagtgagcttcatgggagaattgagccccttctttttaatggaaatcactaattttggtattcaaacttacattttagaatgcaagtagtgtgtatttcactgtttagaagtcatatcttagggaattaaatttgtgataatctttttaattactgagaaggcaatttaaactgcttgaagtttgaatatgccttattacacatgcaaatttgattgttttaacaaggcaaataaaccataatcttatttatttccaagaatgcatattttaatacaattaaaaatgaattttcctgaatttaaatgtaagctttaacttaactttaagtggtttgagtgaagtcttctaaattacacataatcactggttctaaacttccagaaccattctgtttaattaaacattatattatatatatattattattgacat

SEQ ID NO: 2523 - DNA, 1675 bp, Homo sapiens
  source 1..1675: mol_type = unassigned DNA
agagggctttctccgcatgcgcgggatcccggatgtggatcaagttggtgggaagcgtgcggtgccgcagcaatggcggcgctcacaattgccacgggtactggcaattggttttcggctttggcgctcggggtgactcttctcaaatgccttctcatccccacataccattccacagattttgaagtacaccgaaactggcttgctatcactcacagtttgccaatatcacagtggtattatgaggcaacttcagagtggacgttggattacccccctttctttgcatggtttgagtatatcctgtcacatgttgccaaatattttgatcaagaaatgctgaatgtccataatttgaattactccagctcaaggaccttacttttccagagattttccgtcatctttatggatgtactctttgtgtatgctgtccgtgagtgctgtaaatgcattgatggaaaaaaagtgggtaaagaacttacagaaaagccaaaatttattctgtcggtattacttctgtggaacttcgggttattaattgtggaccatattcattttcagtacaatggctttttatttggattaatgctactctccattgcacgattatttcagaaaaggcatatggaaggagcatttctctttgctgttctcctacatttcaagcatatctacctctatgtagcaccagcttatggtgtatatctgctgcgatcctactgtttcactgcaaataaaccagatgggtctattcgatggaagagtttcagctttgttcgtgttatttccctgggactggttgttttcttagtttctgctctttcattgggtcctttcctggccttgaatcagctgcctcaagtcttttcccgactctttcctttcaagaggggcctctgtcatgcatattgggctccaaacttctgggctttgtacaatgctttggacaaagtgctgtctgtcatcggtttgaaattgaaatttcttgatcccaacaatattcccaaggcctcaatgacaagtggtttggttcagcagttccaacacacagtccttccctcagtgactcccttggcaaccctcatctgcacactgattgccatattgccctctattttctgtctttggtttaaaccccaagggcccagaggctttctccgatgtctaactctttgtgccttgagctcctttatgtttgggtggcatgttcatgaaaaagccatacttctagcaattctcccaatgagccttttgtctgtgggaaaagcaggagacgcttcgatttttctgattctgaccacaacaggacattattccctctttcctctgctcttcactgcaccagaacttcccattaaaatcttactcatgttactattcaccatatatagtatttcgtcactgaagactttattcagaaaagaaaaacctctttttaattggatggaaactttctacctgcttggcctggggcctctggaagtctgctgtgaatttgtattccctttcacctcctggaaggtgaagtaccccttcatccctttgttactaacctcagtgtattgtgcagtaggcatcacatatgcttggttcaaactgtatgtttcagtattgattgactctgctattggcaagacaaagaaacaatgaataaaggaactgcttagatatg

SEQ ID NO: 2524 - DNA, 1677 bp, Homo sapiens
  source 1..1677: mol_type = unassigned DNA
agcaatggcggcgctcacaattgccacgggtactggcaattggttttcggctttggcgctcggggtgactcttctcaaatgccttctcatccccacataccattccacagattttgaagtacaccgaaactggcttgctatcactcacagtttgccaatatcacagtggtattatgaggcaacttcagagtggacgttggattacccccctttctttgcatggtttgagtatatcctgtcacatgttgccaaatattttgatcaagaaatgctgaatgtccataatttgaattactccagctcaaggaccttacttttccagagattttccgtcatctttatggatgtactctttgtgtatgctgtccgtgagtgctgtaaatgcattgatggaaaaaaagtgggtaaagaacttacagaaaagccaaaatttattctgtcggtattacttctgtggaacttcgggttattaattgtggaccatattcattttcagtacaatggctttttatttggattaatgctactctccattgcacgattatttcagaaaaggcatatggaaggagcatttctctttgctgttctcctacatttcaagcatatctacctctatgtagcaccagcttatggtgtatatctgctgcgatcctactgtttcactgcaaataaaccagatgggtctattcgatggaagagtttcagctttgttcgtgttatttccctgggactggttgttttcttagtttctgctctttcattgggtcctttcctggccttgaatcagctgcctcaagtcttttcccgactctttcctttcaagaggggcctctgtcatgcatattgggctccaaacttctgggctttgtacaatgctttggacaaagtgctgtctgtcatcggtttgaaattgaaatttcttgatcccaacaatattcccaaggcctcaatgacaagtggtttggttcagcagttccaacacacagtccttccctcagtgactcccttggcaaccctcatctgcacactgattgccatattgccctctattttctgtctttggtttaaaccccaagggcccagaggctttctccgatgtctaactctttgtgccttgagctcctttatgtttgggtggcatgttcatgaaaaagccatacttctagcaattctcccaatgagccttttgtctgtgggaaaagcaggagacgcttcgatttttctgattctgaccacaacaggacattattccctctttcctctgctcttcactgcaccagaacttcccattaaaatcttactcatgttactattcaccatatatagtatttcgtcactgaagactttattcagacggagtttcacccttgttgcccaggctggagtgcaatggcacgatctcagctaactgaaacctccgcctcccagaaaagaaaaacctctttttaattggatggaaactttctacctgcttggcctggggcctctggaagtctgctgtgaatttgtattccctttcacctcctggaaggtgaagtaccccttcatccctttgttactaacctcagtgtattgtgcagtaggcatcacatatgcttggttcaaactgtatgtttcagtattgattgactctgctattggcaagacaaagaaacaatgaataaaggaactgcttag

SEQ ID NO: 2525 - DNA, 2345 bp, Homo sapiens
  source 1..2345: mol_type = unassigned DNA
gctgcccccgggagggtcttagctgtggcgcgcggggctcagtccggcctggcctcaccgcgggaggcccgagctccctcttcagctaggtcctattggtcttcctgggcgggtcagcattcagtcttcgcccaccttagatccctccactgcgctgtaaaactgccttggagtgcggatctgtgatgctcctgggccaggcctagagtgggcacagcctctgtgggagatgtagacaggatcaaagagtataccttttacggctgttcctcacagctccttttattctccctcaagtcccgaccctttactgggcccatccaacccgccatcacctcttcccaaaccctggaggctgcaggttagaactgcattaagggagctgtcaacatatggaattggagtaggctatgtaccttgcacctaggcttctatctgaacataagggggaatgaataaagccatcaaaagcaatgaccttgttaagaaaagaaagaaaaggagaatgacagctttgtggccttcaagttatctgggaacaaagcaggacaagtctgggcacctgaaggatctactgctttcaagtgtctgctttcagcaaggttatgtgctgctctcctgagcaacatctctgactgtgatgaaacattcaactactgggagccaacacactacctcatctatggggaagggtttcagacttgggaatattccccagcatatgccattcgctcctatgcttacctgttgcttcatgcctggccagctgcatttcatgcaagaattctacaaactaataagattcttgtgttttactttttgcgatgtcttctggcttttgtgagctgtatttgtgaactttacttttacaaggctgtgtgcaagaagtttgggttgcacgtgagtcgaatgatgctagccttcttggttctcagcactggcatgttttgctcatcatcagcattccttcctagtagcttctgtatgtacactacgttgatagccatgactggatggtatatggacaagacttccattgctgtgctgggagtagcagctggggctatcttaggctggccattcagtgcagctcttggtttacccattgcctttgatttgctggtcatgaaacacaggtggaagagtttctttcattggtcgctgatggccctcatactatttctggtgcctgtggtggtcattgacagctactattatgggaagttggtgattgcaccactcaacattgttttgtataatgtctttactcctcatggacctgatctttatggtacagaaccctggtatttctatttaattaatggatttctgaatttcaatgtagcctttgctttggctctcctagtcctaccactgacttctcttatggaatacctgctgcagagatttcatgttcagaatttaggccacccgtattggcttaccttggctccaatgtatatttggtttataattttcttcatccagcctcacaaagaggagagatttcttttccctgtgtatccacttatatgtctctgtggcgctgtggctctctctgcacttcagaaatgttaccactttgtgtttcaacgatatcgcctggagcactatactgtgacatcgaattggctggcattaggaactgtcttcctgtttgggctcttgtcattttctcgctctgtggcactgttcagaggatatcacgggccccttgatttgtatccagaattttaccgaattgctacagacccaaccatccacactgtcccagaaggcagacctgtgaatgtctgtgtgggaaaagagtggtatcgatttcccagcagcttccttcttcctgacaattggcagcttcagttcattccatcagagttcagaggtcagttaccaaaaccttttgcagaaggacctctggccacccggattgttcctactgacatgaatgaccagaatctagaagagccatccagatatattgatatcagtaaatgccattatttagtggatttggacaccatgagagaaacaccccgggagccaaaatattcatccaataaagaagaatggatcagcttggcctatagaccattccttgatgcttctagatcttcaaagctgctgcgggcattctatgtccccttcctgtcagatcagtatacagtgtacgtaaactacaccatcctcaaaccccggaaagcaaagcaaatcaggaagaaaagtggaggttagcaacacacctgtggccccaaaggacaaccatcttgttaactattgattccagtgacctgactccctgcaagtcatcgcctgtaacatttgtaataaaggtcttctgacatgaa

SEQ ID NO: 2526 - DNA, 2935 bp, Homo sapiens
  source 1..2935: mol_type = unassigned DNA
gtgacctcatgcaggtgtgatgaagtcgctcaaggccatgcttgggctaaagacactttgatcttcccgagggggtgaaagggcgaggtgacaggaaagtgcgcgtcttgcttttgcactcatagttatcatccaccggggagtcggtacaccggctcgtctagacaaccaggcgccatgggtgcgtcatcaactagtgacgggagaagacggggcggagagagatccgtgaaggaagtgacgtaaaacgagcgccacagagaacgcgagccgggagtccgtggaggccatggcccctcggcgcctcctgttggttggggaggggaatttctccttcgccgccgctctgagcgaaaccctggatcagagcactcaacttaccgccacctgcctccagcgcccggccgagttggctcgggatccactggcctgggagaatctgcagtgcctgcgcgagcgaggtatcgatgtacgtttcggtgtggactgcacccagctggcagatgtctttgaactgcacgagagagaatttgatcaaatttatttcatcttcccgcattgtggacgcaaagctggcgtagctaagaacagggaactgcttgccaaatttttccaaagctgtgcagacgttcttgcagaggaaggagaagtccacgtggcattatgtagaggacaaggtggaactcctgcggataagccccagagagaatggcacaacagttggcaagtggttgccatggcagccctgggggggctcattttaagcgacgtgtatccattcagctgtaaggctgtggcagggtacaagtgcactggatataggagtcaagataagtcctttcatgtagaaggtgctttgaaccatatcttcaccaggagcttaccttttgaaggttctcaacccagaatcttcaggatcaaactgggtaaccagtggttttcctttccagaaccagaagcacttgtaggaaagttgaacaggcttgccatggctagtcgaggggctcggcagcgcctgaagggcagcggggccagcagtggggatacggccccggctgcggacaagctgcgggagctgctgggcagccgagaggcgggcggcgcggagcaccggaccgagttatctgggaacaaagcaggacaagtctgggcacctgaaggatctactgctttcaagtgtctgctttcagcaaggttatgtgctgctctcctgagcaacatctctgactgtgatgaaacattcaactactgggagccaacacactacctcatctatggggaagggtttcagacttgggaatattccccagcatatgccattcgctcctatgcttacctgttgcttcatgcctggccagctgcatttcatgcaagaattctacaaactaataagattcttgtgttttactttttgcgatgtcttctggcttttgtgagctgtatttgtgaactttacttttacaaggctgtgtgcaagaagtttgggttgcacgtgagtcgaatgatgctagccttcttggttctcagcactggcatgttttgctcatcatcagcattccttcctagtagcttctgtatgtacactacgttgatagccatgactggatggtatatggacaagacttccattgctgtgctgggagtagcagctggggctatcttaggctggccattcagtgcagctcttggtttacccattgcctttgatttgctggtcatgaaacacaggtggaagagtttctttcattggtcgctgatggccctcatactatttctggtgcctgtggtggtcattgacagctactattatgggaagttggtgattgcaccactcaacattgttttgtataatgtctttactcctcatggacctgatctttatggtacagaaccctggtatttctatttaattaatggatttctgaatttcaatgtagcctttgctttggctctcctagtcctaccactgacttctcttatggaatacctgctgcagagatttcatgttcagaatttaggccacccgtattggcttaccttggctccaatgtatatttggtttataattttcttcatccagcctcacaaagaggagagatttcttttccctgtgtatccacttatatgtctctgtggcgctgtggctctctctgcacttcagaaatgttaccactttgtgtttcaacgatatcgcctggagcactatactgtgacatcgaattggctggcattaggaactgtcttcctgtttgggctcttgtcattttctcgctctgtggcactgttcagaggatatcacgggccccttgatttgtatccagaattttaccgaattgctacagacccaaccatccacactgtcccagaaggcagacctgtgaatgtctgtgtgggaaaagagtggtatcgatttcccagcagcttccttcttcctgacaattggcagcttcagttcattccatcagagttcagaggtcagttaccaaaaccttttgcagaaggacctctggccacccggattgttcctactgacatgaatgaccagaatctagaagagccatccagatatattgatatcagtaaatgccattatttagtggatttggacaccatgagagaaacaccccgggagccaaaatattcatccaataaagaagaatggatcagcttggcctatagaccattccttgatgcttctagatcttcaaagctgctgcgggcattctatgtccccttcctgtcagatcagtatacagtgtacgtaaactacaccatcctcaaaccccggaaagcaaagcaaatcaggaagaaaagtggaggttagcaacacacctgtggccccaaaggacaaccatcttgttaactattgattccagtgacctgactccctgcaagtcatcgcctgtaacatttgtaataaaggtcttctgacatg

SEQ ID NO: 2527 - DNA, 1930 bp, Homo sapiens
  source 1..1930: mol_type = unassigned DNA
tgaacataagggggaatgaataaagccatcaaaagcaatgaccttgttaagaaaagaaagaaaaggagaatgacagctttgtggccttcaagttatctgggaacaaagcaggacaagtctgggcacctgaaggatctactgctttcaagtgtctgctttcagcaaggttatgtgctgctctcctgagcaacatctctgactgtgatgaaacattcaactactgggagccaacacactacctcatctatggggaagggtttcagacttgggaatattccccagcatatgccattcgctcctatgcttacctgttgcttcatgcctggccagctgcatttcatgcaagaattctacaaactaataagattcttgtgttttactttttgcgatgtcttctggcttttgtgagctgtatttgtgaactttacttttacaaggctgtgtgcaagaagtttgggttgcacgtgagtcgaatgatgctagccttcttggttctcagcactggcatgttttgctcatcatcagcattccttcctagtagcttctgtatgtacactacgttgatagccatgactggatggtatatggacaagacttccattgctgtgctgggagtagcagctggggctatcttaggctggccattcagtgcagctcttggtttacccattgcctttgatttgctggtcatgaaacacaggtggaagagtttctttcattggtcgctgatggccctcatactatttctggtgcctgtggtggtcattgacagctactattatgggaagttggtgattgcaccactcaacattgttttgtataatgtctttactcctcatggacctgatctttatggtacagaaccctggtatttctatttaattaatggatttctgaatttcaatgtagcctttgctttggctctcctagtcctaccactgacttctcttatggaatacctgctgcagagatttcatgttcagaatttaggccacccgtattggcttaccttggctccaatgtatatttggtttataattttcttcatccagcctcacaaagaggagagatttcttttccctgtgtatccacttatatgtctctgtggcgctgtggctctctctgcacttcagcacagttttctgtacttccagaaatgttaccactttgtgtttcaacgatatcgcctggagcactatactgtgacatcgaattggctggcattaggaactgtcttcctgtttgggctcttgtcattttctcgctctgtggcactgttcagaggatatcacgggccccttgatttgtatccagaattttaccgaattgctacagacccaaccatccacactgtcccagaaggcagacctgtgaatgtctgtgtgggaaaagagtggtatcgatttcccagcagcttccttcttcctgacaattggcagcttcagttcattccatcagagttcagaggtcagttaccaaaaccttttgcagaaggacctctggccacccggattgttcctactgacatgaatgaccagaatctagaagagccatccagatatattgatatcagtaaatgccattatttagtggatttggacaccatgagagaaacaccccgggagccaaaatattcatccaataaagaagaatggatcagcttggcctatagaccattccttgatgcttctagatcttcaaagctgctgcgggcattctatgtccccttcctgtcagatcagtatacagtgtacgtaaactacaccatcctcaaaccccggaaagcaaagcaaatcaggaagaaaagtggaggttagcaacacacctgtggccccaaaggacaaccatcttgttaactattgattccagtgacctgactccctgcaagtcatcgcctgtaacatttgtaataaaggtcttctgacatgaa

SEQ ID NO: 2528 - DNA, 2863 bp, Homo sapiens
  source 1..2863: mol_type = unassigned DNA
atccggaagttgcctctgccctcaccaaagatggcggccccggcgccgctcgcccacctctcgtaaccaatggaaccgcggcgctcggccgattctcgcaggcgccctcagatctacgctctctgatgcaacgccggaatcgcggaaaccgccggtgcacgttggagtcataagacggcgtcggtgttgcagtctgtgtccttggaggtgaccagggccactgcaggcatggtgctagcagagctgtacgtctctgaccgagagggaagcgatgccacgggagatggaaccaaggagaaaccatttaaaacaggtctaaaggctttgatgacagtagggaaagaaccatttcctaccatttacgtagattcacaaaaagaaaatgagaggtggaatgttatttctaaatcacagttgaagaacattaaaaagatgtggcatagggaacaaatgaagagtgaatcccgggaaaagaaagaggcagaagatagtttacgaagagaaaagaacctggaagaagcaaagaagattaccattaaaaatgatccaagtctcccagagccaaaatgtgtgaagattggtgcgttagaaggatatagaggccaaagagtaaaggtgtttggctgggtccacaggctgcgcaggcaaggaaagaatttaatgtttctggtgttgcgagatggtacaggttatcttcagtgtgtcttggcggatgagttgtgtcagtgctacaatggagttctcttgtccacggagagcagtgttgcagtgtatggaatgctaaatcttaccccaaagggcaagcaggctccaggtggccatgagctgagttgtgacttctgggaactaattgggttggcccctgctggaggagctgacaacctgatcaatgaggagtctgacgttgatgtccagctcaacaacagacacatgatgatccgaggagaaaacatgtccaaaatcctaaaagcacgatccatggtcaccaggtgctttagagatcacttctttgatagggggtactatgaagttactcctccaacattagtgcaaacacaagtagaaggtggtgccacactcttcaagcttgactattttggggaagaggcatttttgactcaatcctctcagttgtacttggagacctgcctcccagccctgggagatgttttttgtattgctcagtcataccgggcagagcagtccagaacacgaaggcacctggctgagtacactcacgtggaagctgagtgtcctttcctgacttttgacgacctcctgaaccggttggaggacttggtttgtgatgtggtagatcgaatattgaagtcacctgcagggagcatagtgcatgagctcaacccgaactttcagccccccaaacggcctttcaaacggatgaactattcagatgctatcgtttggctaaaagaacatgatgtaaagaaagaagatggaactttctatgaatttggagaagatatcccagaagctcctgagagactgatgacagacaccattaatgaaccaatcttgctgtgtcgatttcctgtggagatcaagtccttctacatgcagcgatgtcctgaggattcccgtcttactgaatctgtcgacgtgttgatgcccaatgttggtgagattgtgggaggctcaatgcgtatctttgatagtgaagaaatactggcaggttataaaagggaagggattgaccccactccctattactggtatacggatcagagaaaatacggtacatgtccccatggaggatatggcttgggcttggaacgattcttaacgtggattctgaataggtatcacatccgagacgtgtgcttataccctcgatttgtccagcgttgcacgccataaccattttctccagaagcgtggaggaaagattatgaaaggaacaggctctttaaaaaagaaaacaaaaagccagaatcttcctttttttgtttcattggggtttctctttctgtttttctttctactaccataaaaactatctcaaatcacctgaacatcaagtgatattaaggttgtcatcttaagaaaaaatatccatttttttcttaagttcgggaaacaaagttcggggaaaatacctggcatgaaactgtagttagggatacatttcagcattttactcactttatccaagttattcattttattcaagttatatgtatgtataattcaacaattttagattatggtgtaagatactccagtaacttatctttctgtccttttaagtgtaccttgaattctttgatttattttattgcatcaatgaattaaaacaaaaatcttgggggaagaaattggcaatatcgtataaaaatctgctcatattagaacacagtataattcagcagtaaacactagaatcaaatgaatagccttttgtatcagttattaatcttttctaactctgcttagctgctaataatcctgaggcatagaaattgaagaatttgtaaaaatagaattgccttaaaggatttgaagtaagaacataattttggggagagttttttagtgattcacagtatccctcttagcattaatttaaggtaaagaggcagattgattttccctctttcctggtaattcctaagtaattaagaataaataagttccaaaagaaattgtagctggaatcttaataacaattgtgagtggctgtttgagttgcccccaccatgtccttagatctaatctgtgctaccttattaactcacagcaggcttactgaatggcttcatttcagatttagttgatttctccaccaaatgcatgtcatgtattctcaataggctgtattcccagcagtcaataaatgaacacccgt

SEQ ID NO: 2529 - DNA, 1097 bp, Homo sapiens
  source 1..1097: mol_type = unassigned DNA
aatcgcggaaaccgccggtgcacgttggagtcataagacggcgtcggtgttgcagtctgtgtccttggaggtgaccagggccactgcaggcatggtgctaggctttgatgacagtagggaaagaaccatttcctaccatttacgtagattcacaaaaagaaaatgagaggtggaatgttatttctaaatcacagttgaagaacattaaaaagatgtggcatagggaacaaatgaagagtgaatcccgggaaaagaaagaggcagaagatagtttacgaagagaaaagaacctggaagaagcaaagaagattaccattaaaaatgatccaagtctcccagagccaaaatgtgtgaagattggtgcgttagaaggatatagaggccaaagagtaaaggtgtttggctgggtccacaggctgcgcaggcaaggaaagaatttaatgtttctggtgttgcgagatggtacaggttatcttcagtgtgtcttggcggatgagttgtgtcagtgctacaatggagttctcttgtccacggagagcagtgttgcagtgtatggaatgctaaatcttaccccaaagggcaagcaggctccaggtggccatgagctgagttgtgacttctgggaactaattgggttggcccctgctggaggagctgacaacctgatcaatgaggagtctgacgttgatgtccagctcaacaacagacacatgatgatccgaggagaaaacatgtccaaaatcctaaaagcacgatccatggtcaccaggtgctttagagatcacttctttgatagggggtactatgaagtaagtatgcattcgtcagcttttgcaaagaatatgttttttgccgttttgaaacttgaatagtggtgctcacgatagcattgatttattccttctttgcatttgaacaggttactcctccaacattagtgcaaacacaagtagaaggtggtgccacactcttcaagcttgactattttggggaagaggcatttttgactcaatcctctcagttgtacttggagacctgcctcccagccctgggagatgttttttgtattgctcagtcataccgggcagagcagtcca

SEQ ID NO: 2530 - DNA, 1608 bp, Homo sapiens
  source 1..1608: mol_type = unassigned DNA
gttggagtcataagacggcgtcggtgttgcagtctgtgtccttggaggtgaccagggccactgcaggcatggtgctagcagagctgtacgtctctgaccgagagggaagcgatgccacgggagatggaaccaaggagaaaccatttaaaacaggtctaaaggctttgatgacagtagggaaagaaccatttcctaccatttacgtagattcacaaaaagaaaatgagaggtggaatgttatttctaaatcacagttgaagaacattaaaaagatgtggcatagggaacaaatgaagagtgaatcccgggaaaagaaagaggcagaagatagtttacgaagagaaaagaacctggaagaagcaaagaagattaccattaaaaatgatccaagtctcccagagccaaaatgtgtgaagattggtgctttagagatcacttctttgatagggggtactatgaagttactcctccaacattagtgcaaacacaagtagaaggtggtgccacactcttcaagcttgactattttggggaagaggcatttttgactcaatcctctcagttgtacttggagacctgcctcccagccctgggagatgttttttgtattgctcagtcataccgggcagagcagtccagaacacgaaggcacctggctgagtacactcacgtggaagctgagtgtcctttcctgacttttgacgacctcctgaaccggttggaggacttggtttgtgatgtggtagatcgaatattgaagtcacctgcagggagcatagtgcatgagctcaacccgaactttcagccccccaaacggcctttcaaacggatgaactattcagatgctatcgtttggctaaaagaacatgatgtaaagaaagaagatggaactttctatgaatttggagaagatatcccagaagctcctgagagactgatgacagacaccattaatgaaccaatcttgctgtgtcgatttcctgtggagatcaagtccttctacatgcagcgatgtcctgaggattcccgtcttactgaatctgtcgacgtgttgatgcccaatgttggtgagattgtgggaggctcaatgcgtatctttgatagtgaagaaatactggcaggttataaaagggaagggattgaccccactccctattactggtatacggatcagagaaaatacggtacatgtccccatggaggatatggcttgggcttggaacgattcttaacgtggattctgaataggtatcacatccgagacgtgtgcttataccctcgatttgtccagcgttgcacgccataaccattttctccagaagcgtggaggaaagattatgaaaggaacaggctctttaaaaaagaaaacaaaaagccagaatcttcctttttttgtttcattggggtttctctttctgtttttctttctactaccataaaaactatctcaaatcacctgaacatcaagtgatattaaggttgtcatcttaagaaaaaatatccatttttttcttaagttcgggaaacaaagttcggggaaaatacctggcatgaaactgtagttagggatacatttcagcattttactcactttatccaagttattca

SEQ ID NO: 2531 - DNA, 937 bp, Homo sapiens
  source 1..937: mol_type = unassigned DNA
ggtgcacgttggagtcataagacggcgtcggtgttgcagtctgtgtccttggaggtgaccagggccactgcaggcatggtgctagcagagctgtacgtctctgaccgagagggaagcgatgccacgggagatggaaccaaggagaaaccatttaaaacaggtctaaaggctttgatgacagtagggaaagaaccatttcctaccatttacgtagattcacaaaaagaaaatgagaggtggaatgttatttctaaatcacagttgaagaacattaaaaagatgtggcatagggaacaaatgaagagtgaatcccgggaaaagaaagaggcagaagatagtttacgaagagaaaagaacctggaagaagcaaagaagattaccattaaaaatgatccaagtctcccagagccaaaatgtgtgaagattggtgcgttagaaggatatagaggccaaagagtaaaggtgtttggctgggtccacaggctgcgcaggcaagtgtcagtgctacaatggagttctcttgtccacggagagcagtgttgcagtgtatggaatgctaaatcttaccccaaagggcaagcaggctccaggtggccatgagctgagttgtgacttctgggaactaattgggttggcccctgctggaggagctgacaacctgatcaatgaggagtctgacgttgatgtccagctcaacaacagacacatgatgatccgaggagaaaacatgtccaaaatcctaaaagcacgatccatggtcaccaggtgctttagagatcacttctttgatagggggtactatgaagttactcctccaacattagtgcaaacacaagtagaaggtggtgccacactcttcaagcttgactattttggggaagaggcatttttgactcaatcctctcagttgtacttggagacctgcctcccagccctg

SEQ ID NO: 2532 - DNA, 2519 bp, Homo sapiens
  source 1..2519: mol_type = unassigned DNA
gtagcgtgatgacgtaagcggcgttggcgtggtgtggtaggagtggttgcgcgtgttgcggcccgggttctgttcgtaggtttacaattgtcgcgggtagtggggcgccccagctgccaactgcacgtggtttctttctggcgtttgcctagtgtcctgtccattccgccccgttgggaagtgggaagcggagaggttctgtggggacagagctgggagtcctgaaggagaaagcgcgcagccgaggggctctggagtgccttagagcagagctgcggccgcggaaggggagcagctgagaaaggagggccgctgcaggcggggttcgaaccgtggggtctgggctgctcccgcggagggcctgggcggacgcgggatgctgggggtccgctgcctgctgcggtccgtgcgcttctgttcctccgcccccttccccaagcacaaaccttcagccaaactgagcgtgcgggacgctctcggggctcagaacgcgagtggggagcgcattaagatccagggatggattcgttctgtccgatcccagaaggaagtcttgttcctgcatgtaaatgatgggtcatctttggaaagccttcaggttgttgcagattcaggccttgacagtagagaattaaattttgggagttctgtggaagtacaagggcagctgataaaaagtccatccaaaaggcaaaatgtggaactgaaggcagaaaaaattaaagttattggaaattgtgatgccaaggatttccccatcaaatataaagagaggcatcctctggagtatctgcgacaatatcctcactttaggtgtaggactaacgttctgggttctatattgaggattcgcagtgaagcgacagctgctattcattctttctttaaggacagtggctttgtacatattcatactccaataatcacatccaatgactctgagggagctggagaactttttcaacttgaaccttcaggcaaacttaaggtacctgaggagaatttcttcaatgttcctgctttcttaactgtctcaggacaacttcatctagaagtgatgtcaggagcttttactcaagtgtttacctttggtccgaccttccgagctgaaaattctcagagccggaggcacctggcagagttttatatgatagaagcagagatttcttttgttgacagccttcaagatcttatgcaggttatagaggaactgttcaaggctacaacaatgatggttctctcaaaatgtcctgaagatgttgaactctgtcacaaattcatagcacctggccaaaaggacagattagaacatatgctaaaaaacaactttttaatcatttcttatactgaagcagtggagatcttaaagcaagcatcccagaacttcacctttaccccagagtggggtgctgacctacggactgaacatgaaaagtacctggtgaagcactgtggcaacatacctgtcttcgttattaattatccattaacactcaagcctttctacatgagggataatgaagatggccctcagcacacggttgctgctgttgatcttctggttcctggagttggggaactctttggaggaggcctcagagaagaacgataccatttcttagaggagcgcttagccagatcgggacttacagaagtctaccaatggtatctggaccttcgtcgatttggatctgtgccacatggaggttttgggatgggatttgaacgctacctgcagtgcatcttgggtgttgacaatatcaaagatgttatccctttcccaaggtttcctcattcatgccttttatagctggaagattggttaaggaaaagcaccccccatggcagagacactgcacatgattgtgcatacagcagaatgcatgtttggattttagaaatgcagatttcaatatgtaattgttgtgccataagatatcatagaaaaaatataagtggttgtgattttcttagaaagttgagggtatttcacgtaaggatgagctcccgcaagaagaggtacttatagcaaggggactctcaaatccattacctcaattaagaaatgaagaaattgaattagtctcaaagtttcttttaaactctaaaacagaatgagataatgtattttacgttgtctataatcattaaatcactccctgtgtaatttgtgagaaccatctagtagctcgaaataaaataatgttgcatcttttctcccttgccatatactttgtgataaatccttatctcattttcagtacttcattaaacattgcagaaaaaaatattccttaaggtcttaattgatttaaagaagtagctattctgaattgaaatctcctttcattgaactggatgaaaaaatcatgtttaataactgttgcttttcaattttcaaagctgttgagatattacattaagtatttcaactctttaatcactgttgttataatttgtttatatttgatgtttataatttgtctaataaaatagatttttttaatagacacctatgg

SEQ ID NO: 2533 - DNA, 2904 bp, Homo sapiens
  source 1..2904: mol_type = unassigned DNA
agggagtcacaggttcgtacacgcgaggccgggcgcgcgcagccggcaggcgggtgaagtcttcccaggtgctgcaggcggtgctgaggcacagggtctgctgcaggagcagcggcccgaacccgctccagcggcccgccgccgccagcggttcccgcgtcgcgtgtgtacccccgcgcactgaaggaggtccgccagccctcaccagcccccgcggaccgtgcaatggcccagcgtaagaatgccaagagcagcggcaacagcagcagcagcggctccggcagcggtagcacgagtgcgggcagcagcagccccggggcccggagagagacaaagcatggaggacacaagaatgggaggaaaggcggactctcaggaacttcattcttcacgtggtttatggtgattgcattgctgggcgtctggacatctgtagctgtcgtttggtttgatcttgttgactatgaggaagttctaggaaaactaggaatctatgatgctgatggtgatggagattttgatgtggatgatgccaaagttttattaggacttaaagagagatctacttcagagccagcagtcccgccagaagaggctgagccacacactgagcccgaggagcaggttcctgtggaggcagaaccccagaatatcgaagatgaagcaaaagaacaaattcagtcccttctccatgaaatggtacacgcagaacatgttgagggagaagacttgcaacaagaagatggacccacaggagaaccacaacaagaggatgatgagtttcttatggcgactgatgtagatgatagatttgagaccctggaacctgaagtatctcatgaagaaaccgagcatagttaccacgtggaagagacagtttcacaagactgtaatcaggatatggaagagatgatgtctgagcaggaaaatccagattccagtgaaccagtagtagaagatgaaagattgcaccatgatacagatgatgtaacataccaagtctatgaggaacaagcagtatatgaacctctagaaaatgaagggatagaaatcacagaagtaactgctccccctgaggataatcctgtagaagattcacaggtaattgtagaagaagtaagcatttttcctgtggaagaacagcaggaagtaccaccagatacttaaagcttcaaaaagactgcccctaccaccacaggaggaccagcctaaccatacgctccaaaagatggctgtgatagatcttgtgaagcaattactgagcagatcaagatctttgggaaggaacactaaagatgttttgaatgaattatagtccactggcattttagtgtatttttttttctttttagaaacacacatttctaaaaatgtcatgttacattcctgcatgtcccttttgatagcattagtggatccattggatttcttttttctttttgtgagacagcttttagtcttacctgaatttatgtgtgtttttccgacagtggttaataattatattggtgatgtagcagcaattgtgttggcagggttttcatatattattagtaattaacactaactgttggactgacttgtgtacactgtgttaaacatgatttaaaagctattaagagtactttgtgttagcactcttaaaaacgctaacagagatcatcattagctgtgaagatttgagttgtatatacctgcactgatattcttatcaaaaatttctacattagctttaagtgttcagattaacacttttgaaatttttgtagcttttagctgattaattagaaaaatttaatatttcagtgaaagttttaaattatcatttatttatttttttaaatgagaggggaaagctgaaattccttgttaagacacaaggaaaaagaatggccctactattatcatgcaaaaatgctttgttggcacctcagattaatcatataatagctatagtctcttcagcatttgtttaaattttagaaaacctgtataaattactggtgcataacttaaagattattctgcctttggctaattgagtaattcccctccagcactagagaccgctcagtgctcttactagatgaactcagtaacgccttgagctgggttgattgaggatgtgtgaaaagctcacagagcccgatgcctgctgctatttcacggcaatgagcctttttctttctacactgaagattttcttcttatttaatgtggtttattttgggctcagaaataattgctctgttgaaaataatcctttgtcagaaaagaaggtagctaccacatcattttgaaaggaccatgagcaactataagcaaagccataagaagtggtttgatcgatatattaggggtagctcttgattttgttaacattaagataaggtgactttttccccctgcttttaggattaaaatcaaagatacttctatatttttatcactatagatcatagttattatacaatgtagtgagtcctgcatgggtactcgatgtgtaatgaaacctgaaataataagataataagaaaagcaataattttctaaagctgtgctgtcggtgatacagagatgatactcaaattataataaaactcttcattttgtgaattatagaagctactttttataaagccatatttttttagggaaactaaggagtgacatagaactgatgaatgagtaaaagtaagttttgctggatttttgtagaactctggacgttgaggattcattatgctgtggttaactttaaatatttttgaattccaaatatctgaattaatgagccttgtctttacaaatatgtgccattgtgcaacatcggtggattttctaaaaataatgtaaatgtcttctattaaatgttgagtgcaataaaatacagaagaattctct

SEQ ID NO: 2534 - DNA, 1561 bp, Homo sapiens
  source 1..1561: mol_type = unassigned DNA
cgggtgaagtcttcccaggtgctgcaggcggtgctgaggcacagggtctgctgcaggagcagcggcccgaacccgctccagcggcccgccgccgccagcggttcccgcgtcgcgtgtgtacccccgcgcactgaaggaggtccgccagccctcaccagcccccgcggaccgtgcaatggcccagcgtaagaatgccaagagcagcggcaacagcagcagcagcggctccggcagcggtagcacgagtgcgggcagcagcagccccggggcccggagagagacaaagcatggaggacacaagaatgggaggaaaggcggactctcaggaacttcattcttcacgtggtttatggtgattgcattgctgggcgtctggacatctgtagctgtcgtttggtttgatcttgttgactatgaggaagttctagccaaagcaaaggacttccgttataacttatcagaggtgcttcaaggaaaactaggaatctatgatgctgatggtgatggagattttgatgtggatgatgccaaagttttattaggcctgaccaaagatggcagtaatgaaaatattgattctcttgaggaagtccttaatattttagcagaggaaagttcagattggttttatggtttcctctcatttctctatgatataatgactccttttgaaatgctagaagaagaagaagaagaaagcgaaaccgcagatggtgttgatggtacgtcacagaatgaaggggttcagggaaagacttgtgtcatattggatttacataaccagtaaccttgattcagggactgaagtcattggctaatgaacacctgaagcagcctcctttttcttttctttccttggcttatgcagggcttaatgtgcagtggggtggttgtgatcttaccgtgcaagtcaaccatgtgatcttgcccagtacagctactagctagtcccttgctcgctcagctcccccaacttctattgaagaaaatggtactcctcattcttgtagtcagctacaaagtacactgaaaatgatgttcttggtggtataattggtttctgtatcgttttgtttcaactcatgtattcactgaactaaatttggacacttaacagcaaattgtgttgtggttaacccttgatgcttgtctttctaacacactattaattatgatgattctaatggatttcattataaaaatatttctggcatgatttttaagttaaatgcttctctgttctttaacatgactgatgtataaaatgatggttctttactaagctgatattttttattgtaatttgtttaggtttgtcagataggttcatacaaatttctatgtaaaattctgtgttaatggtgcttttaaaataatttaaaaataactccatgtttttgccttagagtaagttaacttactgttttcagatagtagcatgacatatttctgtctgtgaaagcaaaatttattttaaattttatttccaaatatacatccagagaaagtaatttgtattttttttaaagtaggcatattacacaagagggaacatgtgaat

SEQ ID NO: 2535 - DNA, 4595 bp, Homo sapiens
  source 1..4595: mol_type = unassigned DNA
cgcagccggcaggcgggtgaagtcttcccaggtgctgcaggcggtgctgaggcacagggtctgctgcaggagcagcggcccgaacccgctccagcggcccgccgccgccagcggttcccgcgtcgcgtgtgtacccccgcgcactgaaggaggtccgccagccctcaccagcccccgcggaccgtgcaatggcccagcgtaagaatgccaagagcagcggcaacagcagcagcagcggctccggcagcggtagcacgagtgcgggcagcagcagccccggggcccggagagagacaaagcatggaggacacaagaatgggaggaaaggcggactctcaggaacttcattcttcacgtggtttatggtgattgcattgctgggcgtctggacatctgtagctgtcgtttggtttgatcttgttgactatgaggaagttctaggaaaactaggaatctatgatgctgatggtgatggagattttgatgtggatgatgccaaagttttattaggacttaaagagagatctacttcagagccagcagtcccgccagaagaggctgagccacacactgagcccgaggagcaggttcctgtggaggcagaaccccagaatatcgaagatgaagcaaaagaacaaattcagtcccttctccatgaaatggtacacgcagaacatgttgagggagaagacttgcaacaagaagatggacccacaggagaaccacaacaagaggatgatgagtttcttatggcgactgatgtagatgatagatttgagaccctggaacctgaagtatctcatgaagaaaccgagcatagttaccacgtggaagagacagtttcacaagactgtaatcaggatatggaagagatgatgtctgagcaggaaaatccagattccagtgaaccagtagtagaagatgaaagattgcaccatgatacagatgatgtaacataccaagtctatgaggaacaagcagtatatgaacctctagaaaatgaagggatagaaatcacagaagtaactgctccccctgaggataatcctgtagaagattcacaggtaattgtagaagaagtaagcatttttcctgtggaagaacagcaggaagtaccaccagaaacaaatagaaaaacagatgatccagaacaaaaagcaaaagttaagaaaaagaagcctaaacttttaaataaatttgataagactattaaagctgaacttgatgctgcagaaaaactccgtaaaaggggaaaaattgaggaagcagtgaatgcatttaaagaactagtacgcaaataccctcagagtccacgagcaagatatgggaaggcgcagtgtgaggatgatttggctgagaagaggagaagtaatgaggtgctacgtggagccatcgagacctaccaagaggtggccagcctacctgatgtccctgcagacctgctgaagctgagtttgaagcgtcgctcagacaggcaacaatttctaggtcatatgagaggttccctgcttaccctgcagagattagttcaactatttcccaatgatacttccttaaaaaatgaccttggcgtgggatacctcttgataggagataatgacaatgcaaagaaagtttatgaagaggtgctgagtgtgacacctaatgatggctttgctaaagtccattatggcttcatcctgaaggcacagaacaaaattgctgagagcatcccatatttaaaggaaggaatagaatccggagatcctggcactgatgatgggagattttatttccacctgggggatgccatgcagagggttgggaacaaagaggcatataagtggtatgagcttgggcacaagagaggacactttgcatctgtctggcaacgctcactctacaatgtgaatggactgaaagcacagccttggtggaccccaaaagaaacgggctacacagagttagtaaagtctttagaaagaaactggaagttaatccgagatgaaggccttgcagtgatggataaagccaaaggtctcttcctgcctgaggatgaaaacctgagggaaaaaggggactggagccagttcacgctgtggcagcaaggaagaagaaatgaaaatgcctgcaaaggagctcctaaaacctgtaccttactagaaaagttccccgagacaacaggatgcagaagaggacagatcaaatattccatcatgcaccccgggactcacgtgtggccgcacacagggcccacaaactgcaggctccgaatgcacctgggcttggtgattcccaaggaaggctgcaagattcgatgtgccaacgagaccaagacctgggaggaaggcaaggtgctcatctttgatgactcctttgagcacgaggtatggcaggatgcctcatctttccggctgatattcatcgtggatgtgtggcatccggaactgacaccacagcagagacgcagccttccagcaatttagcatgaattcatgcaagcttgggaaactctggagagaggctgcctttctggttccatctccttgggtgtgaggatagaatttcgaacaccaagagtcaattcccttgacttgcagcccgagtaattcaaagcctcctcctagggtcagaagacactaaagggaatatttgcctcgctgcaattcatttaggaaacaccctgctgtgtgtcatctcatgacagcactggtcttctgccagtatttaaggtgaacatttgatagcttctaccttaccagccaaagatattttttccacatagaataggtctaattcaatgtataatgagaacatatgtagaaactgtgaatggattgctttagtttgtaatttttctatgcagttatatttttctagtgtagctagactattttgtcatcatgtaccactacatttttgtttattttaatgacaagctgtataaatgctttacttctagctatttaatggtagcattactggggaactcagacttccctcttttaattcttcttagtaaaagatactcatgaaaaaagcagttttattttcctaacaaaaaagaaagagctcattatgtcagtgtctatgaactgtacccatcccaactctcaaatcgtttggttttttttatcttgattgagatcctcttctcactatgctagtggtggagatattgacaaaatcctatttctttcaaagaggaacttttcacaccgaaaaaagagcatggaattattttatattgttataaaaatcccagatgcaaatttttttaatgccaattattagagcttctggggaaaaagtatagttcacggaaataaaactatgttctttcagggttgggtggataggtggctgctagggtgtctggctcctggcggctttgccatccatgaggcaagggctgggaacacagtgtctttgcctatggtagatccatgtgaatgtcaggaagccagctcttcagtcttggagatgatttctgctacaattctgtagaaagattaaggatggcagagtaaaaggttaccaagaatgccaggatgtttttcttgggcgtaggaggtccagattactttcctttttgatgaaagagtttggaagactgtcccatctctctggcttgagaaatctctgccattttaaacatcactgtgaaatagcaattattatcatctgtatttagttttaacattacccacaacatagaaataataggtaaaaatcgtcttgcctactcattccaaagatgatcaagtcattaatctagcaaagtattcatgtatcagattttgtatattttgaatcaaagctaactaggaatgttagatataagaatgtaatgatattcatgcactgaattctaagccaatatgaacaaaaatgctgcatgaatggcacatataggtcaccaaagttcattcacaggtagaaaaaacttgtgctttcttttccatctaaaaacaaaaggagactttctttatctcatttaaagaacagctctttgaaattgaaattgaccctttttgcttgaccttaaggagattagcttccagtagatgagtttgcaaaatacttttcctgttcttttgttttgctggtattgaaaacatcccactaaatcagatgaagaggcatgggaggaaaaatatccaaattaattactaaaatcgagaagagaaggcaaactcttgaaaagtaaaaaggtgtttgtgaccttcagtatttattgaacagaggaaataactgacaagggcaatacaattcaatgttcatgtagtaacattcatgtcacttgttgaatttggttctcatatgtatattgcatacacataaattcaaactataagtcgtcatttttgagccatcatcttacattcatgtaatgaaattatggaagagagtaaaaactagctcttaacttagtaaatataatatggtatttaaaatcaggtcactacagtaaggttctaagtattgccaattgaaaagctagaaatggtattactgttgcaaagtgttgtcaataattgactccaatagcattgtaaatacttgtatcccacaactattttaaacccaagcaataaaatggattttctaattca

SEQ ID NO: 2536 - DNA, 1290 bp, Homo sapiens
  source 1..1290: mol_type = unassigned DNA
ctaaaacctgccagcagtacttttgagtttttttttttgttttgttttactttagcatttattattcatggattgaagaaatcaaaatggctgaagataaagagacaaagcatggaggacacaagaatgggaggaaaggcggactctcaggaacttcattcttcacgtggtttatggtgattgcattgctgggcgtctggacatctgtagctgtcgtttggtttgatcttgttgactatgaggaagttctagccaaagcaaaggacttccgttataacttatcagaggtgcttcaaggaaaactaggaatctatgatgctgatggtgatggagattttgatgtggatgatgccaaagttttattagaaggacccagtggggtagccaagagaaaaactaaggctaaagttaaagaactcactaaagaagagctcaagaaggagaaagagaaacctgagtcaaggaaggaaagtaagaatgaagagagaaaaaaggggaagaaagaggatgtccgaaaggataagaaaattgctgatgcagacctatccaggaaggagtctcctaagggtaaaaaggacagagaaaaagagaaagtggacctagaaaaaagtgctaaaaccaaggaaaataggaaaaaatcaacaaatatgaaggatgtttctagtaaaatggcatcccgagacaaagatgacagaaaggaaagtagaagttctaccagatatgcacacttaacaaagggaaatacccagaaaagaaacggctaaagctctggcatcatcatcccagaacatggtcatgttccagattgcagtttgttacaaaaaagcatggaaaatgtaatattgctctgattggtgagggtgtgtaaattagccattgaatgtatcattggtgcttagcaagtaaattacctgaaatttaaatataccgtctcatacttctaaatgtaaaaacattttaaaaatgtcatagaatatgatgtaataacttctatttattgatcatgtattcagataaatgtatatgtatcatgaatttttatggattaatatattgaatactttcattgacgttaaataagaatattaagattttaaatgttatttctgtgcataatgccttgtaactttttcaagtatgctaaatactcagggagatggatttgctcgttgttttcttccctccttccccttcctgcttccctgtttttctctttcgtggacacctccccaggctcatgtgccaccaccttccctcctctccagccctcccagccctcccgcagccttt

SEQ ID NO: 2537 - DNA, 5292 bp, Homo sapiens
  source 1..5292: mol_type = unassigned DNA
ggggcgtggccgtcgggcggcgagccgcgcgctctcgccccgggagggagtcacaggttcgtacacgcgaggccgggcgcgcgcagccggcaggcgggtgaagtcttcccaggtgctgcaggcggtgctgaggcacagggtctgctgcaggagcagcggcccgaacccgctccagcggcccgccgccgccagcggttcccgcgtcgcgtgtgtacccccgcgcactgaaggaggtccgccagccctcaccagcccccgcggaccgtgcaatggcccagcgtaagaatgccaagagcagcggcaacagcagcagcagcggctccggcagcggtagcacgagtgcgggcagcagcagccccggggcccggagagagacaaagcatggaggacacaagaatgggaggaaaggcggactctcaggaacttcattcttcacgtggtttatggtgattgcattgctgggcgtctggacatctgtagctgtcgtttggtttgatcttgttgactatgaggaagttctaggaaaactaggaatctatgatgctgatggtgatggagattttgatgtggatgatgccaaagttttattaggacttaaagagagatctacttcagagccagcagtcccgccagaagaggctgagccacacactgagcccgaggagcaggttcctgtggaggcagaaccccagaatatcgaagatgaagcaaaagaacaaattcagtcccttctccatgaaatggtacacgcagaacatgttgagggagaagacttgcaacaagaagatggacccacaggagaaccacaacaagaggatgatgagtttcttatggcgactgatgtagatgatagatttgagaccctggaacctgaagtatctcatgaagaaaccgagcatagttaccacgtggaagagacagattccagtgaaccagtagtagaagatgaaagattgcaccatgatacagatgatgtaacataccaagtctatgaggaacaagcagtatatgaacctctagaaaatgaagggatagaaatcacagaagtaactgctccccctgaggataatcctgtagaagattcacaggtaattgtagaagaagtaagcatttttcctgtggaagaacagcaggaagtaccaccagaaacaaatagaaaaacagatgatccagaacaaaaagcaaaagttaagaaaaagaagcctaaacttttaaataaatttgataagactattaaagctgaacttgatgctgcagaaaaactccgtaaaaggggaaaaattgaggaagcagtgaatgcatttaaagaactagtacgcaaataccctcagagtccacgagcaagatatgggaaggcgcagtgtgaggatgatttggctgagaagaggagaagtaatgaggtgctacgtggagccatcgagacctaccaagaggtggccagcctacctgatgtccctgcagacctgctgaagctgagtttgaagcgtcgctcagacaggcaacaatttctaggtcatatgagaggttccctgcttaccctgcagagattagttcaactatttcccaatgatacttccttaaaaaatgaccttggcgtgggatacctcttgataggagataatgacaatgcaaagaaagtttatgaagaggtgctgagtgtgacacctaatgatggctttgctaaagtccattatggcttcatcctgaaggcacagaacaaaattgctgagagcatcccatatttaaaggaaggaatagaatccggagatcctggcactgatgatgggagattttatttccacctgggggatgccatgcagagggttgggaacaaagaggcatataagtggtatgagcttgggcacaagagaggacactttgcatctgtctggcaacgctcactctacaatgtgaatggactgaaagcacagccttggtggaccccaaaagaaacgggctacacagagttagtaaagtctttagaaagaaactggaagttaatccgagatgaaggccttgcagtgatggataaagccaaaggtctcttcctgcctgaggatgaaaacctgagggaaaaaggggactggagccagttcacgctgtggcagcaaggaagaagaaatgaaaatgcctgcaaaggagctcctaaaacctgtaccttactagaaaagttccccgagacaacaggatgcagaagaggacagatcaaatattccatcatgcaccccgggactcacgtgtggccgcacacagggcccacaaactgcaggctccgaatgcacctgggcttggtgattcccaaggaaggctgcaagattcgatgtgccaacgagaccaagacctgggaggaaggcaaggtgctcatctttgatgactcctttgagcacgaggtatggcaggatgcctcatctttccggctgatattcatcgtggatgtgtggcatccggaactgacaccacagcagagacgcagccttccagcaatttagcatgaattcatgcaagcttgggaaactctggagagaggctgcctttctggttccatctccttgggtgtgaggatagaatttcgaacaccaagagtcaattcccttgacttgcagcccgagtaattcaaagcctcctcctagggtcagaagacactaaagggaatatttgcctcgctgcaattcatttaggaaacaccctgctgtgtgtcatctcatgacagcactggtcttctgccagtatttaaggtgaacatttgatagcttctaccttaccagccaaagatattttttccacatagaataggtctaattcaatgtataatgagaacatatgtagaaactgtgaatggattgctttagtttgtaatttttctatgcagttatatttttctagtgtagctagactattttgtcatcatgtaccactacatttttgtttattttaatgacaagctgtataaatgctttacttctagctatttaatggtagcattactggggaactcagacttccctcttttaattcttcttagtaaaagatactcatgaaaaaagcagttttattttcctaacaaaaaagaaagagctcattatgtcagtgtctatgaactgtacccatcccaactctcaaatcgtttggttttttttatcttgattgagatcctcttctcactatgctagtggtggagatattgacaaaatcctatttctttcaaagaggaacttttcacaccgaaaaaagagcatggaattattttatattgttataaaaatcccagatgcaaatttttttaatgccaattattagagcttctggggaaaaagtatagttcacggaaataaaactatgttctttcagggttgggtggataggtggctgctagggtgtctggctcctggcggctttgccatccatgaggcaagggctgggaacacagtgtctttgcctatggtagatccatgtgaatgtcaggaagccagctcttcagtcttggagatgatttctgctacaattctgtagaaagattaaggatggcagagtaaaaggttaccaagaatgccaggatgtttttcttgggcgtaggaggtccagattactttcctttttgatgaaagagtttggaagactgtcccatctctctggcttgagaaatctctgccattttaaacatcactgtgaaatagcaattattatcatctgtatttagttttaacattacccacaacatagaaataataggtaaaaatcgtcttgcctactcattccaaagatgatcaagtcattaatctagcaaagtattcatgtatcagattttgtatattttgaatcaaagctaactaggaatgttagatataagaatgtaatgatattcatgcactgaattctaagccaatatgaacaaaaatgctgcatgaatggcacatataggtcaccaaagttcattcacaggtagaaaaaacttgtgctttcttttccatctaaaaacaaaaggagactttctttatctcatttaaagaacagctctttgaaattgaaattgaccctttttgcttgaccttaaggagattagcttccagtagatgagtttgcaaaatacttttcctgttcttttgttttgctggtattgaaaacatcccactaaatcagatgaagaggcatgggaggaaaaatatccaaattaattactaaaatcgagaagagaaggcaaactcttgaaaagtaaaaaggtgtttgtgaccttcagtatttattgaacagaggaaataactgacaagggcaatacaattcaatgttcatgtagtaacattcatgtcacttgttgaatttggttctcatatgtatattgcatacacataaattcaaactataagtcgtcatttttgagccatcatcttacattcatgtaatgaaattatggaagagagtaaaaactagctcttaacttagtaaatataatatggtatttaaaatcaggtcactacagtaaggttctaagtattgccaattgaaaagctagaaatggtattactgttgcaaagtgttgtcaataattgactccaatagcattgtaaatacttgtatcccacaactattttaaacccaagcaataaaatggattttctaattcacttcaattctttatttctcttacctatctatgtcttggtacataagaaaagtgtttccatcactgcattggtagaattatttcagtgttattatttttgtgatttcgtatgtctacacaaaaatgaattagtttaatttatattgtgatacagttgtttgagaaatatttttaattctgtttcaactttatttctccaagtgtataatataaaaattacttctgttattgttctctaccaataggggaaaaaattaaaacattagatccattgagaaagagatgatgtaataaataattaagattagtaataatattatcaggggtgattatgaccagttgaataatctctttcccttgaattatttagctaacaaattaactctcccaaatatttaaaataatgtaaaatcatattttactgcccattattaactaaaatatttttgtttgactttgagcaccaactggtaatactaataaatacccatgtcatgcagatggctgggcgaataagagatgtctaaaaatatgcactggtcttggaaaacatggcacaagtaaggatatcatatatgatgtctgtttattttatgtctgatttcttttgaatgagtagttggggactccatttctaaggagactaggtaaataaaatgacctttgacatttca

SEQ ID NO: 2538 - DNA, 2273 bp, Homo sapiens
  source 1..2273: mol_type = unassigned DNA
cctgccagcagtacttttgagtttttttttttgttttgttttactttagcatttattattcatggattgaagaaatcaaaatggctgaagataaagagacaaagcatggaggacacaagaatgggaggaaaggcggactctcaggaacttcattcttcacgtggtttatggtgattgcattgctgggcgtctggacatctgtagctgtcgtttggtttgatcttgttgactatgaggaagttctagccaaagcaaaggacttccgttataacttatcagaggtgcttcaaggaaaactaggaatctatgatgctgatggtgatggagattttgatgtggatgatgccaaagttttattaggacttaaagagagatctacttcagagccagcagtcccgccagaagaggctgagccacacactgagcccgaggagcaggttcctgtggaggcagaaccccagaatatcgaagatgaagcaaaagaacaaattcagtcccttctccatgaaatggtacacgcagaacatgttgagggagaagacttgcaacaagaagatggacccacaggagaaccacaacaagaggatgatgagtttcttatggcgactgatgtagatgatagatttgagaccctggaacctgaagtatctcatgaagaaaccgagcatagttaccacgtggaagagacagtttcacaagactgtaatcaggatatggaagagatgatgtctgagcaggaaaatccagattccagtgaaccagtagtagaagatgaaagattgcaccatgatacagatgatgtaacataccaagtctatgaggaacaagcagtatatgaacctctagaaaatgaagggatagaaatcacagaagtaactgctccccctgaggataatcctgtagaagattcacaggtaattgtagaagaagtaagcatttttcctgtggaagaacagcaggaagtaccaccagatacttaaagcttcaaaaagactgcccctaccaccacaggaggaccagcctaaccatacgctccaaaagatggctgtgatagatcttgtgaagcaattactgagcagatcaagatctttgggaaggaacactaaagatgttttgaatgaattatagtccactggcattttagtgtatttttttttctttttagaaacacacatttctaaaaatgtcatgttacattcctgcatgtcccttttgatagcattagtggatccattggatttcttttttctttttgtgagacagcttttagtcttacctgaatttatgtgtgtttttccgacagtggttaataattatattggtgatgtagcagcaattgtgttggcagggttttcatatattattagtaattaacactaactgttggactgacttgtgtacactgtgttaaacatgatttaaaagctattaagagtactttgtgttagcactcttaaaaacgctaacagagatcatcattagctgtgaagatttgagttgtatatacctgcactgatattcttatcaaaaatttctacattagctttaagtgttcagattaacacttttgaaatttttgtagcttttagctgattaattagaaaaatttaatatttcagtgaaagttttaaattatcatttatttatttttttaaatgagaggggaaagctgaaattccttgttaagacacaaggaaaaagaatggccctactattatcatgcaaaaatgctttgttggcacctcagattaatcatataatagctatagtctcttcagcatttgtttaaattttagaaaacctgtataaattactggtgcataacttaaagattattctgcctttggctaattgagtaattcccctccagcactagagaccgctcagtgctcttactagatgaactcagtaacgccttgagctgggttgattgaggatgtgtgaaaaatgtggtttattttgggctcagaaataattgctctgttgaaaataatcctttgtcagaaaagaaggtagctaccacatcattttgaaaggaccatgagcaactataagcaaagccataagaagtggtttgatcgatatattaggggtagctcttgattttgttaacattaagataaggtgactttttccccctgcttttaggattaaaatcaaagatacttctatatttttatcactatagatcatagttattatacaatgtagtgagtcctgcatgggtactcgatgtgtaatgaaacctgaaataataagataataagaaaagc

SEQ ID NO: 2539 - DNA, 1947 bp, Homo sapiens
  source 1..1947: mol_type = unassigned DNA
cctgccagcagtacttttgagtttttttttttgttttgttttactttagcatttattattcatggattgaagaaatcaaaatggctgaagataaagagacaaagcatggaggacacaagaatgggaggaaaggcggactctcaggaacttcattcttcacgtggtttatggtgattgcattgctgggcgtctggacatctgtagctgtcgtttggtttgatcttgttgactatgaggaagttctagccaaagcaaaggacttccgttataacttatcagaggtgcttcaaggaaaactaggaatctatgatgctgatggtgatggagattttgatgtggatgatgccaaagttttattaggacttaaagagagatctacttcagagccagcagtcccgccagaagaggctgagccacacactgagcccgaggagcaggttcctgtggaggcagaaccccagaatatcgaagatgaagcaaaagaacaaattcagtcccttctccatgaaatggtacacgcagaacatgttgagggagaagacttgcaacaagaagatggacccacaggagaaccacaacaagaggatgatgagtttcttatggcgactgatgtagatgatagatttgagaccctggaacctgaagtatctcatgaagaaaccgagcatagttaccacgtggaagagacagtttcacaagactgtaatcaggatatggaagagatgatgtctgagcaggaaaatccagattccagtgaaccagtagtagaagatgaaagattgcaccatgatacagatgatgtaacataccaagtctatgaggaacaagcagtatatgaacctctagaaaatgaagggatagaaatcacagaagtaactgctccccctgaggataatcctgtagaagattcacaggtaattgtagaagaagtaagcatttttcctgtggaagaacagcaggaagtaccaccagatacttaaagcttcaaaaagactgcccctaccaccacaggaggaccagcctaaccatacgctccaaaagatggctgtgatagatcttgtgaagcaattactgagcagatcaagatctttgggaaggaacactaaagatgttttgaatgaattatagtccactggcattttagtgtatttttttttctttttagaaacacacatttctaaaaatgtcatgttacattcctgcatgtcccttttgatagcattagtggatccattggatttcttttttctttttgtgagacagcttttagtcttacctgaatttatgtgtgtttttccgacagtggttaataattatattggtgatgtagcagcaattgtgttggcagggttttcatatattattagtaattaacactaactgttggactgacttgtgtacactgtgttaaacatgatttaaaagctattaagagtactttgtgttagcactcttaaaaacgctaacagagatcatcattagctgtgaagatttgagttgtatatacctgcactgatattcttatcaaaaatttctacattagctttaagtgttcagattaacacttttgaaatttttgtagcttttagctgattaattagaaaaatttaatatttcagtgaaagttttaaattatcatttatttatttttttaaatgagaggggaaagctgaaattccttgttaagacacaaggaaaaagaatggccctactattatcatgcaaaaatgctttgttggcacctcagattaatcatataatagctatagtctcttcagcatttgtttaaattttagaaaacctgtataaattactggtgcataacttaaagattattctgcctttggctaattgagtaattcccctccagcactagagaccgctcagtgctcttactagatgaactcagtaacgccttgagctgggttgattgaggatgtgtgaaaa

SEQ ID NO: 2540 - DNA, 2658 bp, Homo sapiens
  source 1..2658: mol_type = unassigned DNA
tgtgcctaaaacctgccagcagtacttttgagtttttttttttgttttgttttactttagcatttattattcatggattgaagaaatcaaaatggctgaagataaagagacaaagcatggaggacacaagaatgggaggaaaggcggactctcaggaacttcattcttcacgtggtttatggtgattgcattgctgggcgtctggacatctgtagctgtcgtttggtttgatcttgttgactatgaggaagttctagccaaagcaaaggacttccgttataacttatcagaggtgcttcaaggaaaactaggaatctatgatgctgatggtgatggagattttgatgtggatgatgccaaagttttattaggacttaaagagagatctacttcagagccagcagtcccgccagaagaggctgagccacacactgagcccgaggagcaggttcctgtggaggcagaaccccagaatatcgaagatgaagcaaaagaacaaattcagtcccttctccatgaaatggtacacgcagaacatgttgagggagaagacttgcaacaagaagatggacccacaggagaaccacaacaagaggatgatgagtttcttatggcgactgatgtagatgatagatttgagaccctggaacctgaagtatctcatgaagaaaccgagcatagttaccacgtggaagagacagtttcacaagactgtaatcaggatatggaagagatgatgtctgagcaggaaaatccagattccagtgaaccagtagtagaagatgaaagattgcaccatgatacagatgatgtaacataccaagtctatgaggaacaagtatatgaacctctagaaaatgaagggatagaaatcacagaagtaactgctccccctgaggataatcctgtagaagattcacaggtaattgtagaagaagtaagcatttttcctgtggaagaacagcaggaagtaccaccagatacttaaagcttcaaaaagactgcccctaccaccacaggaggaccagcctaaccatacgctccaaaagatggctgtgatagatcttgtgaagcaattactgagcagatcaagatctttgggaaggaacactaaagatgttttgaatgaattatagtccactggcattttagtgtatttttttttctttttagaaacacacatttctaaaaatgtcatgttacattcctgcatgtcccttttgatagcattagtggatccattggatttcttttttctttttgtgagacagcttttagtcttacctgaatttatgtgtgtttttccgacagtggttaataattatattggtgatgtagcagcaattgtgttggcagggttttcatatattattagtaattaacactaactgttggactgacttgtgtacactgtgttaaacatgatttaaaagctattaagagtactttgtgttagcactcttaaaaacgctaacagagatcatcattagctgtgaagatttgagttgtatatacctgcactgatattcttatcaaaaatttctacattagctttaagtgttcagattaacacttttgaaatttttgtagcttttagctgattaattagaaaaatttaatatttcagtgaaagttttaaattatcatttatttatttttttaaatgagaggggaaagctgaaattccttgttaagacacaaggaaaaagaatggccctactattatcatgcaaaaatgctttgttggcacctcagattaatcatataatagctatagtctcttcagcatttgtttaaattttagaaaacctgtataaattactggtgcataacttaaagattattctgcctttggctaattgagtaattcccctccagcactagagaccgctcagtgctcttactagatgaactcagtaacgccttgagctgggttgattgaggatgtgtgaaaagctcacagagcccgatgcctgctgctatttcacggcaatgagcctttttctttctacactgaagattttcttcttatttaatgtggtttattttgggctcagaaataattgctctgttgaaaataatcctttgtcagaaaagaaggtagctaccacatcattttgaaaggaccatgagcaactataagcaaagccataagaagtggtttgatcgatatattaggggtagctcttgattttgttaacattaagataaggtgactttttccccctgcttttaggattaaaatcaaagatacttctatatttttatcactatagatcatagttattatacaatgtagtgagtcctgcatgggtactcgatgtgtaatgaaacctgaaataataagataataagaaaagcaataattttctaaagctgtgctgtcggtgatacagagatgatactcaaattataataaaactcttcattttgtgaattatagaagctactttttataaagccatatttttttagggaaactaaggagtgacatagaactgatgaatgagtaaaagtaagttttgctggatttttgtagaactctggacgttgaggattcattatgctgtggttaactttaaatatttttgaattccaaatatctgaattaatgagccttgtctttacaaatatgtgccattgtgcaacatcggtgga

SEQ ID NO: 2541 - DNA, 2744 bp, Homo sapiens
  source 1..2744: mol_type = unassigned DNA
ccgggcgcgcgcagccggcaggcgggtgaagtcttcccaggtgctgcaggcggtgctgaggcacagggtctgctgcaggagcagcggcccgaacccgctccagcggcccgccgccgccagcggttcccgcgtcgcgtgtgtacccccgcgcactgaaggaggtccgccagccctcaccagcccccgcggaccgtgcaatggcccagcgtaagaatgccaagagcagcggcaacagcagcagcagcggctccggcagcggtagcacgagtgcgggcagcagcagccccggggcccggagagagacaaagcatggaggacacaagaatgggaggaaaggcggactctcaggaacttcattcttcacgtggtttatggtgattgcattgctgggcgtctggacatctgtagctgtcgtttggtttgatcttgttgactatgaggaagttctaggaaaactaggaatctatgatgctgatggtgatggagattttgatgtggatgatgccaaagttttattaggacttaaagagagatctacttcagagccagcagtcccgccagaagaggctgagccacacactgagcccgaggagcaggttcctgtggaggcagaaccccagaatatcgaagatgaagcaaaagaacaaattcagtcccttctccatgaaatggtacacgcagaacatgaaaccgagcatagttaccacgtggaagagacagtttcacaagactgtaatcaggatatggaagagatgatgtctgagcaggaaaatccagattccagtgaaccagtagtagaagatgaaagattgcaccatgatacagatgatgtaacataccaagtctatgaggaacaagcagtatatgaacctctagaaaatgaagggatagaaatcacagaagtaactgctccccctgaggataatcctgtagaagattcacaggtaattgtagaagaagtaagcatttttcctgtggaagaacagcaggaagtaccaccagatacttaaagcttcaaaaagactgcccctaccaccacaggaggaccagcctaaccatacgctccaaaagatggctgtgatagatcttgtgaagcaattactgagcagatcaagatctttgggaaggaacactaaagatgttttgaatgaattatagtccactggcattttagtgtatttttttttctttttagaaacacacatttctaaaaatgtcatgttacattcctgcatgtcccttttgatagcattagtggatccattggatttcttttttctttttgtgagacagcttttagtcttacctgaatttatgtgtgtttttccgacagtggttaataattatattggtgatgtagcagcaattgtgttggcagggttttcatatattattagtaattaacactaactgttggactgacttgtgtacactgtgttaaacatgatttaaaagctattaagagtactttgtgttagcactcttaaaaacgctaacagagatcatcattagctgtgaagatttgagttgtatatacctgcactgatattcttatcaaaaatttctacattagctttaagtgttcagattaacacttttgaaatttttgtagcttttagctgattaattagaaaaatttaatatttcagtgaaagttttaaattatcatttatttatttttttaaatgagaggggaaagctgaaattccttgttaagacacaaggaaaaagaatggccctactattatcatgcaaaaatgctttgttggcacctcagattaatcatataatagctatagtctcttcagcatttgtttaaattttagaaaacctgtataaattactggtgcataacttaaagattattctgcctttggctaattgagtaattcccctccagcactagagaccgctcagtgctcttactagatgaactcagtaacgccttgagctgggttgattgaggatgtgtgaaaagctcacagagcccgatgcctgctgctatttcacggcaatgagcctttttctttctacactgaagattttcttcttatttaatgtggtttattttgggctcagaaataattgctctgttgaaaataatcctttgtcagaaaagaaggtagctaccacatcattttgaaaggaccatgagcaactataagcaaagccataagaagtggtttgatcgatatattaggggtagctcttgattttgttaacattaagataaggtgactttttccccctgcttttaggattaaaatcaaagatacttctatatttttatcactatagatcatagttattatacaatgtagtgagtcctgcatgggtactcgatgtgtaatgaaacctgaaataataagataataagaaaagcaataattttctaaagctgtgctgtcggtgatacagagatgatactcaaattataataaaactcttcattttgtgaattatagaagctactttttataaagccatatttttttagggaaactaaggagtgacatagaactgatgaatgagtaaaagtaagttttgctggatttttgtagaactctggacgttgaggattcattatgctgtggttaactttaaatatttttgaattccaaatatctgaattaatgagccttgtctttacaaatatgtgccattgtgcaacatcggtggattttctaaaaataatgtaaatgtcttctattaaatgttgagtgcaataaaatacagaagaattc

SEQ ID NO: 2542 - DNA, 842 bp, Homo sapiens
  source 1..842: mol_type = unassigned DNA
catgcagtgtgcctaaaacctgccagcagtacttttgagtttttttttttgttttgttttactttagcatttattattcatggattgaagaaatcaaaatggctgaagataaagagacaaagcatggaggacacaagaatgggaggaaaggcggactctcaggaacttcattcttcacgtggtttatggtgattgcattgctgggcgtctggacatctgtagctgtcgtttggtttgatcttgttgactatgaggaagttctaggaaaactaggaatctatgatgctgatggtgatggagattttgatgtggatgatgccaaagttttattagaaggacccagtggggtagccaagagaaaaactaaggctaaagttaaagaactcactaaagaagagctcaagaaggagaaagagaaacctgagtcaaggaaggaaagtaagaatgaagagagaaaaaaggggaagaaagaggatgtccgaaaggataagaaaattgctgatgcagacctatccaggaaggagtctcctaagggtaaaaaggacagagaaaaagagaaagtggacctagaaaaaagtgctaaaaccaaggaaaataggaaaaaatcaacaaatatgaaggatgtttctagtaaaatggcatcccgagacaaagatgacagaaaggaaagtagaagttctaccagatatgcacacttaacaaagggaaatacccagaaaagaaacggctaaagctctggcatcatcatcccagaacatggtcatgttccagattgcagtttgttacaaaaaagcatggaaaatgtaatattgctctgattggtgagggtgtgtaaattagcc

SEQ ID NO: 2543 - DNA, 1258 bp, Homo sapiens
  source 1..1258: mol_type = unassigned DNA
cagtctcaagctctggtaggcaagtgcatgcagtgtgcctaaaacctgccagcagtacttttgagtttttttttttgttttgttttactttagcatttattattcatggattgaagaaatcaaaatggctgaagataaagagacaaagcatggaggacacaagaatgggaggaaaggcggactctcaggaacttcattcttcacgtggtttatggtgattgcattgctgggcgtctggacatctgtagctgtcgtttggtttgatcttgttgactatgaggaagttctagccaaagcaaaggacttccgttataacttatcagaggtgcttcaaggaaaactaggaatctatgatgctgatggtgatggagattttgatgtggatgatgccaaagttttattaggacttaaagagagatctacttcagagccagcagtcccgccagaagaggctgagccacacactgagcccgaggagcaggttcctgtggaggcagaaccccagaatatcgaagatgaagcaaaagaacaaattcagtcccttctccatgaaatggtacacgcagaacatgaaaccgagcatagttaccacgtggaagagacagtttcacaagactgtaatcaggatatggaagagatgatgtctgagcaggaaaatccagattccagtgaaccagtagtagaagatgaaagattgcaccatgatacagatgatgtaacataccaagtctatgaggaacaagcagtatatgaacctctagaaaatgaagggatagaaatcacagaagtaactgctccccctgaggataatcctgtagaagattcacaggtaattgtagaagaagtaagcatttttcctgtggaagaacagcaggaagtaccaccagatacttaaagcttcaaaaagactgcccctaccaccacaggaggaccagcctaaccatacgctccaaaagatggctgtgatagatcttgtgaagcaattactgagcagatcaagatctttgggaaggaacactaaagatgttttgaatgaattatagtccactggcattttagtgtatttttttttctttttagaaacacacatttctaaaaatgtcatgttacattcctgcatgtcccttttgatagcattagtggatccattggatttcttttttctttttgtgagacagcttttagtcttacctgaatttatgtgtgtttttccgacagtggttaataattatattggtgatgtagcagcaattgtgtt

SEQ ID NO: 2544 - DNA, 5153 bp, Homo sapiens
  source 1..5153: mol_type = unassigned DNA
tttcagttctagaggcccttacagtgcagggattggccagtctcaagctctggtaggcaagtgcatgcagtgtgcctaaaacctgccagcagtacttttgagtttttttttttgttttgttttactttagcatttattattcatggattgaagaaatcaaaatggctgaagataaagagacaaagcatggaggacacaagaatgggaggaaaggcggactctcaggaacttcattcttcacgtggtttatggtgattgcattgctgggcgtctggacatctgtagctgtcgtttggtttgatcttgttgactatgaggaagttctaggaaaactaggaatctatgatgctgatggtgatggagattttgatgtggatgatgccaaagttttattaggacttaaagagagatctacttcagagccagcagtcccgccagaagaggctgagccacacactgagcccgaggagcaggttcctgtggaggcagaaccccagaatatcgaagatgaagcaaaagaacaaattcagtcccttctccatgaaatggtacacgcagaacatgttgagggagaagacttgcaacaagaagatggacccacaggagaaccacaacaagaggatgatgagtttcttatggcgactgatgtagatgatagatttgagaccctggaacctgaagtatctcatgaagaaaccgagcatagttaccacgtggaagagacagtttcacaagactgtaatcaggatatggaagagatgatgtctgagcaggaaaatccagattccagtgaaccagtagtagaagatgaaagattgcaccatgatacagatgatgtaacataccaagtctatgaggaacaagcagtatatgaacctctagaaaatgaagggatagaaatcacagaagtaactgctccccctgaggataatcctgtagaagattcacaggtaattgtagaagaagtaagcatttttcctgtggaagaacagcaggaagtaccaccagaaacaaatagaaaaacagatgatccagaacaaaaagcaaaagttaagaaaaagaagcctaaacttttaaataaatttgataagactattaaagctgaacttgatgctgcagaaaaactccgtaaaaggggaaaaattgaggaagcagtgaatgcatttaaagaactagtacgcaaataccctcagagtccacgagcaagatatgggaaggcgcagtgtgaggatgatttggctgagaagaggagaagtaatgaggtgctacgtggagccatcgagacctaccaagaggtggccagcctacctgatgtccctgcagacctgctgaagctgagtttgaagcgtcgctcagacaggcaacaatttctaggtcatatgagaggttccctgcttaccctgcagagattagttcaactatttcccaatgatacttccttaaaaaatgaccttggcgtgggatacctcttgataggagataatgacaatgcaaagaaagtttatgaagaggtgctgagtgtgacacctaatgatggctttgctaaagtccattatggcttcatcctgaaggcacagaacaaaattgctgagagcatcccatatttaaaggaaggaatagaatccggagatcctggcactgatgatgggagattttatttccacctgggggatgccatgcagagggttgggaacaaagaggcatataagtggtatgagcttgggcacaagagaggacactttgcatctgtctggcaacgctcactctacaatgtgaatggactgaaagcacagccttggtggaccccaaaagaaacgggctacacagagttagtaaagtctttagaaagaaactggaagttaatccgagatgaaggccttgcagtgatggataaagccaaaggtctcttcctgcctgaggatgaaaacctgagggaaaaaggggactggagccagttcacgctgtggcagcaaggaagaagaaatgaaaatgcctgcaaaggagctcctaaaacctgtaccttactagaaaagttccccgagacaacaggatgcagaagaggacagatcaaatattccatcatgcaccccgggactcacgtgtggccgcacacagggcccacaaactgcaggctccgaatgcacctgggcttggtgattcccaaggaaggctgcaagattcgatgtgccaacgagaccaagacctgggaggaaggcaaggtgctcatctttgatgactcctttgagcacgaggtatggcaggatgcctcatctttccggctgatattcatcgtggatgtgtggcatccggaactgacaccacagcagagacgcagccttccagcaatttagcatgaattcatgcaagcttgggaaactctggagagaggctgcctttctggttccatctccttgggtgtgaggatagaatttcgaacaccaagagtcaattcccttgacttgcagcccgagtaattcaaagcctcctcctagggtcagaagacactaaagggaatatttgcctcgctgcaattcatttaggaaacaccctgctgtgtgtcatctcatgacagcactggtcttctgccagtatttaaggtgaacatttgatagcttctaccttaccagccaaagatattttttccacatagaataggtctaattcaatgtataatgagaacatatgtagaaactgtgaatggattgctttagtttgtaatttttctatgcagttatatttttctagtgtagctagactattttgtcatcatgtaccactacatttttgtttattttaatgacaagctgtataaatgctttacttctagctatttaatggtagcattactggggaactcagacttccctcttttaattcttcttagtaaaagatactcatgaaaaaagcagttttattttcctaacaaaaaagaaagagctcattatgtcagtgtctatgaactgtacccatcccaactctcaaatcgtttggttttttttatcttgattgagatcctcttctcactatgctagtggtggagatattgacaaaatcctatttctttcaaagaggaacttttcacaccgaaaaaagagcatggaattattttatattgttataaaaatcccagatgcaaatttttttaatgccaattattagagcttctggggaaaaagtatagttcacggaaataaaactatgttctttcagggttgggtggataggtggctgctagggtgtctggctcctggcggctttgccatccatgaggcaagggctgggaacacagtgtctttgcctatggtagatccatgtgaatgtcaggaagccagctcttcagtcttggagatgatttctgctacaattctgtagaaagattaaggatggcagagtaaaaggttaccaagaatgccaggatgtttttcttgggcgtaggaggtccagattactttcctttttgatgaaagagtttggaagactgtcccatctctctggcttgagaaatctctgccattttaaacatcactgtgaaatagcaattattatcatctgtatttagttttaacattacccacaacatagaaataataggtaaaaatcgtcttgcctactcattccaaagatgatcaagtcattaatctagcaaagtattcatgtatcagattttgtatattttgaatcaaagctaactaggaatgttagatataagaatgtaatgatattcatgcactgaattctaagccaatatgaacaaaaatgctgcatgaatggcacatataggtcaccaaagttcattcacaggtagaaaaaacttgtgctttcttttccatctaaaaacaaaaggagactttctttatctcatttaaagaacagctctttgaaattgaaattgaccctttttgcttgaccttaaggagattagcttccagtagatgagtttgcaaaatacttttcctgttcttttgttttgctggtattgaaaacatcccactaaatcagatgaagaggcatgggaggaaaaatatccaaattaattactaaaatcgagaagagaaggcaaactcttgaaaagtaaaaaggtgtttgtgaccttcagtatttattgaacagaggaaataactgacaagggcaatacaattcaatgttcatgtagtaacattcatgtcacttgttgaatttggttctcatatgtatattgcatacacataaattcaaactataagtcgtcatttttgagccatcatcttacattcatgtaatgaaattatggaagagagtaaaaactagctcttaacttagtaaatataatatggtatttaaaatcaggtcactacagtaaggttctaagtattgccaattgaaaagctagaaatggtattactgttgcaaagtgttgtcaataattgactccaatagcattgtaaatacttgtatcccacaactattttaaacccaagcaataaaatggattttctaattcacttcaattctttatttctcttacctatctatgtcttggtacataagaaaagtgtttccatcactgcattggtagaattatttcagtgttattatttttgtgatttcgtatgtctacacaaaaatgaattagtttaatttatattgtgatacagttgtttgagaaatatttttaattctgtttcaactttatttctccaagtgtataatataaaaattacttctgttattgttctctaccaataggggaaaaaattaaaacattagatccattgagaaagagatgatgtaataaataattaagattagtaataatattatcaggggtgattatgaccagttgaataatctctttcccttgaattatttagctaacaaattaactctcccaaatatttaaaataatgtaaaatcatattttactgcccattattaactaaaatatttttgtttgactttgagcaccaactggtaatactaataaatacccatgtcatgcagatggctgggcgaataagagatgtctaaaaatatgcactggtcttggaaaacatggcacaagtaaggatatcatatatgatgtctgtttattttatgtctgatttcttttgaatgagtagttggggactccatttctaaggagactaggtaaataaaatgacctttgacatttc

SEQ ID NO: 2545 - DNA, 2172 bp, Homo sapiens
  source 1..2172: mol_type = unassigned DNA
gcagcagttgagtccatgtaagatgattgtgcacgtgtgtgtgtgtgtgtgtgtgtgtgtgtgtgtcctcactcacttaaaaaagaccatttctgtgcattctttatgctggaaccctcctctgcctccctctccaggaaatcccataggatcccatacctgctttagaatgtgtgtgagacacttcccagtgcctggcatgtggtaggagctcagtacatgtaaactgttttcctttgaccactcaaagtagtcacttgttggggaggccaatggcggcttccccggtctctgagctgatgggcgtctggtccctgcctccccttccttcactggctgatgacaaatacctgaatgtcatcacatcctccgtgtcctcatctgttattctggaacacaggccagggagggtacagggtagtcccccttcaacagaggctggcctttcttgggatgtgggctggctggtgttggtccaaggatggatgcagagggtgaggcacccatcctgctagtccggccggatgctggcaggagggcggggtgaggaggggcggagcttccagaacaaaggagaatggggagcccaggggccagcctaggcatcaaaaaggctctgcagagtgaacaggccacagcactgcctgcctctgccccagcagtcagccagccgaccgcgcctgctccctcctgcttgcccaaggccgggcaagtcatccccactctgcttcgagaggccccgttttccagcgtgattgcgccgacactgctctgtgggtttctcttcttggcgtgggttgctgctgaggttccagaggagagcagcaggatggccgggagcggagccaggagtgaggaaggccgccggcagcatgccttcgtcccggaaccttttgatggggccaatgtcgtcccaaacctctggctgcacagctttgaagtcatcaatgacctcaaccattgggaccatatcaccaagctaaggttcctgaaagagtccctcagaggagaggccctgggtgtctacaataggctcagtccccaggaccagggagactatgggactgtgaaagaggccctcctgaaggcctttggggtccctggggctgcccccagccacctgcccaaagagatcgtctttgccaacagcatgggtaagggctactatctcaaggggaagattggcaaagtgcccgtgaggttcctggtggactctggggcccaggtctctgtggtccacccaaacttgtgggaggaggtcactgatggcgatctggacaccctgcagccctttgagaatgtggtaaaggtggccaatggtgctgaaatgaagatcctgggtgtctgggatacagcggtgtccctaggcaagctgaagctgaaggcacagttcctagtggccaatgcgagtgccgaggaagccatcattggcactgatgtgctccaggaccacaatgctatcctggactttgagcaccgcacatgcaccctgaaagggaagaagtttcgccttctgcctgtgggagggtccctggaagatgagtttgacctggagctcatagaggaggacccctcctcagaagaagggcggcaggagctatcccactgagaagccaccttttctttaacctcctaaatattggtgggaagacccaccgctgtggggggggttgcatatcctcatgggggtcactgggcttggccagtctgcttatcaactcttgctcttctctcccctttgcctccctctgcaggggccttaatctgcccctggtaggggaggcttccactgaacaggcacaggtgagggagagcaggctggcttagagggacagggtccccatggtcatcaagctgctgttgatgacaaagactcaaaggctggaagagctcccaaggaagctagaaatgcttgtctttgaaagaactgtgggaccccttcagattccctgaggtatggcttggtcactctcaggtcctcaaagcctgtcttagttgggctgggtcctagctgcagggtctttgtgagggtcacagttgctctgggacacctccctgaagagcctttccacctgtacaatcgtattttctttctgtcatttgctttgaagcccattgtgccttatgccaataattcaattgctgcaaacaccaataaagattgattcatgg

SEQ ID NO: 2546 - DNA, 1300 bp, Homo sapiens
  source 1..1300: mol_type = unassigned DNA
cggagtgacagccccacgggccacgcagcaagcagaagatccccgggagtcaccctcaaccctctggggccacgtgggcccatgaataccagcctgtctgcgagttagacgccagtcctggtggcccgggaagcccagatccgcatcagcggttctgcaccccacaccagcatgtgctcactgcctgtgccccgggagcccctgcgtcgcgtggctgtgactgggggcacgcatggcaacgagatgtcgggcgtctacctggcccggcactggctgcatgcccccgcagagctgcagagagccagcttctccgctgtgcctgtgctggccaacccggcagccacatccggctgccgccgctacgtggaccatgacctcaaccgcaccttcaccagcagcttcctcaattccaggcccaccccggacgacccatatgaggtgacaagagcccgagagctgaaccagctgctggggcccaaggcctcgggccaggcctttgactttgtccttgacctgcacaacaccacggccaacatgggcacctgcttaatcgcgaagtcctcccacgaagtctttgccatgcacctgtgccgccatctgcagctgcagtaccccgagctgtcctgccaggtcttcctgtaccagcggtctggggaggagagctacaacctggactctgtggccaaaaatggactgggtctggagctgggcccccagccacagggtgtgctgcgggctgacattttctcaaggatgaggaccctggtggccacagttctggacttcatcgaactcttcaaccagggtacggcctttcctgcctttgagatggaagcctatagacccgtgggcgtcgtggacttcccccgcaccgaggccgggcacctggcaggcactgtgcatcctcagctgcaggaccgagacttccagccactgcagcctggtgctcccatcttccagatgttcagtggggaggacctgctctatgagggagagtccacggtgtaccccgtgttcattaacgaggctgcctactatgagaagggcgttgcctttgtccagactgagaagttcacattcaccgtgcctgccatgcccgcgctgacccctgccccgagcccagcttcctaacccaagacacacctccccaacctcagtcttcccatctgaacgatgggtcctgaggcacagctctgagcacagaggtcccttctgccacctaccatgcaccatgttccttgccaggcctccccaacccctggcctcaatttccctttctataaaatggaagatgtccaga

SEQ ID NO: 2547 - DNA, 2107 bp, Homo sapiens
  source 1..2107: mol_type = unassigned DNA
agggacgcctgagcgaacccccgagagagcgggcgtgggcgccaggcgggcggggcactggggattaattgttcggcgatcgctggctgccgggacttttctcgcgctggtctcttcggtggtcagggatggcgcggaagtcgaacttgcctgtgcttctcgtgccgtttctgctctgccaggccctagtgcgctgctccagccctctgcccctggtcgtcaacacttggccctttaagaatgcaaccgaagcagcgtggagggcattagcatctggaggctctgccctggatgcagtggagagcggctgtgccatgtgtgagagagagcagtgtgacggctctgtaggctttggaggaagtcctgatgaacttggagaaaccacactagatgccatgatcatggatggcactactatggatgtaggagcagtaggagatctcagacgaattaaaaatgctattggtgtggcacggaaagtactggaacatacaacacacacacttttagtaggagagtcagccaccacatttgctcaaagtatggggtttatcaatgaagacttatctaccactgcttctcaagctcttcattcagattggcttgctcggaattgccagccaaattattggaggaatgttataccagatccctcaaaatactgcggaccctacaaaccacctggtatcttaaagcaggatattcctatccataaagaaacagaagatgatcgtggtcatgacactattggcatggttgtaatccataagacaggacatattgctgctggtacatctacaaatggtataaaattcaaaatacatggccgtgtaggagactcaccaatacctggagctggagcctatgctgacgatactgcaggggcagccgcagccactgggaatggtgatatattgatgcgcttcctgccaagctaccaagctgtagaatacatgagaagaggagaagatccaaccatagcttgccaaaaagtgatttcaagaatccagaagcattttccagaattctttggggctgttatatgtgccaatgtgactggaagttacggtgctgcttgcaataaactttcaacatttactcagtttagtttcatggtttataattccgaaaaaaatcagccaactgaggaaaaagtggactgcatctaatccatctttactgtcaacatctgtatttaaagaagaaagaaacaaaggctgaaaaggctgctcactctcatcatctagtgttcctcatgtgttctaaagtctttttgtaaaataaacacaaaaataaatttatgttgaattggcactttctatatctgaaattgtattatctatttttatttaacctttcttatattatctgaagatgaatatgtatgtggctgtattttgtatatatttaagttttaagtgacacttggatttctgatcagtgttgcaaaaaattgctactttgagatttatttccacagtgatatattaaacccaaaaggaatcatcatatttggatgcttaaaatagagtatacaagttttttagacccaaagaaaaaaacagcagagtctcagcatgatcagtcctgattgaatttcattatgtcacagtgatgcatgtcttagcactgattattggttttacttaatattccctaaaaacttgaggaaggaagatgatagaacatgagatactctttgttttgtacatactagaaaatacagctatcttctgatgagcaattgtgttgattttctttgcttttttcctcttatggagctctcagtgtgtgaaagttctaaagccacaagaatcaatgatgttttagctgctaatatttagtattgatcgtttcttttaaaaatgatttggggaacttgatctgtactgtaattttactaattccttgtgcagaggtgggtatggcaattagaagtcaagaaatgggttgtttagcttggtttgtttccctaacttctgattaactctctgtatgacaactctacagaagttgtgcgcgtgctttctcagcagcatttttccttcaaaatcatctttttaatcaacagtcattaataaatgtacatgtacgatattcaaacttt

SEQ ID NO: 2548 - DNA, 3237 bp, Homo sapiens
  source 1..3237: mol_type = unassigned DNA
tagcgggcggagttgaagggcgcttggaccccagcggcgatctgtgtttgggttcgcgctctgggagaattttggctttgctcgccttcctctttcagaagactcgaaatcggccagcaggtctgcgagatttgaaacgcgactgttactccttgttttccggttctggccgcgggagcctctcgagaagcgtggaaagaggagaagggcgtataccttgtgaccgcctctggttgtcttgggctcgcgcctggcgccgctacgtggagtcgctctctcgtcgtcacttttggctgccgacttgttgagtagaagtgcagactgatgctttaagactcagggagaggtctttcccttatctccaccccagcaagcaccccagagaccttggagatttgtcttgtttctagacacgtgtactccaatgttgtgcggaggaggccttaaatattcgagaagagagtgggaactcctggaattttaagggatttctgtgtatttccaaaactgacttttaactaccggcagcgtgggatttcgtgattgtttttcgccatcgtgtggctccaacatgtacttcccttcttggttaagtcagctgtacaggggtttatccagacccatcagaaggaccacccaaccgatctggggttctctctacagaagtctgttgcagagttcacagaggagaattccagaattcagtagctttgttgtccggaccaacacatgtggagagttgcgttcgtctcacttaggccaagaagtcaccttgtgtggatggattcagtaccgaaggcaaaacacattcttggtcctaagagatttcgatgggcttgttcaagttatcattccccaggatgagtcggcagcctctgtgaagaagattttatgtgaagcccctgtggaatctgtggtgcaagtgtctggtacagtcatttcccgtcctgcaggacaagagaatccaaaaatgccaacaggtgagattgaaatcaaagttaaaacagctgagcttctgaatgcctgcaagaagctgccctttgaaattaagaacttcgtgaagaaaacagaggctcttcggttgcagtatcgctacttagacttgcgtagtttccaaatgcagtataacctgcgactgaggtcccagatggtcatgaaaatgcgggaatatctctgtaatctgcatgggtttgtggatatagaaacccccacattgtttaagaggaccccagggggtgccaaagagtttttagtaccatccagggaacctggaaagttttattctctccctcagagtcctcaacagtttaagcaacttctgatggttggcggtttagacagatattttcaggttgcccgatgttatcgagatgaaggttcaagaccagacagacagcctgagtttactcagattgacatagagatgtcatttgtagaccagactgggatccagagtttaattgagggtttgctccagtattcctggcccaatgacaaagatcctgtggttgttccttttcctactatgacttttgctgaggtgctggccacctatggaactgataaacctgacactcgctttggaatgaagattatagatatcagtgatgtgtttagaaacacagagattggatttcttcaagatgcacttagtaagccccatggaactgtgaaagccatatgtatccctgaaggagcaaaatacttaaaaaggaaagacattgaatccattagaaactttgcagctgaccattttaatcaggaaatcttacctgtattccttaacgccaatagaaactggaattctccagttgctaatttcataatggagtcacaaagactggaattaatcagactaatggagacccaagaggaagatgtggtcctactaactgctggagagcacaataaagcatgctctttgttaggaaaattacgactggaatgtgctgaccttctagaaacaagaggagtggtgctccgtgaccccactctgttctctttcctttgggtggtagatttcccactcttcctgcccaaggaggaaaatcccagagagctggaatcggcccaccacccatttactgctccccaccccagtgacatacatctcctgtacactgagcccaaaaaggaggatgtgaaaatgctctcccatctgctccaggctttagattatggggcaccccctcatggaggaattgccttagggttagacagactgatatgccttgtcactggatctccaagcatcagagatgtcatagccttcccaaagtccttccggggacatgacctcatgagcaataccccagattctgtccctcctgaggaactgaagccctatcatatccgagtctccaagccaacagactccaaagcagaaagagctcattgaatcatgcataccatgcagaaagttgagcttttaggttttgtcctctttgcttccccaaggctaaagtcagatctagagttctgccacaggtctaacaatcaagtctttagatggaaggaatccaggcaacattcttcaccacaacgaagaaacagataaaagatacccaattttgacttgatttcatgcatcatttggattttttttggttaggactttttttgaagttcctttttacttaggtgtgaaagatggttctttgttgaaataatatagtggtttagtgttttcaaatcatgtttctcatacccagatagtagattattcacttaggacagaggtaatcaaattatgtgtgaaatgtaggaaaatgcttgcccctgtaaactagtgagttgatggagcatttgcttcatcatcctcatcaagagaatcatataaattaagctttataatgacatttcaaccatcaacataatatagtgaggagtagcataatattttttaataatgcagaaaacatcactgaaatgagagtcacaaatttttcttcagtgtttcagcctgagtaagttacataaacctcgcttagcctcccttcctgctaatgtgtaaaatacatacttgccctggctacctcaccgggctgttattgctggaatcagaggagataacatatatggaagataaagtgaataaaagtactttgaaaaactataaagcattccacaaatatgagatgatggtattatccatccataaataggtagatatatctctattttatagtttcagattaaacaaaactgatatcaatagtaaaagtcattttacttatc

SEQ ID NO: 2549 - DNA, 3506 bp, Homo sapiens
  source 1..3506: mol_type = unassigned DNA
cacttaaccactatcgtcaacctttccaatcgtgctcggttgctcctcagttttcctaccggtgcgaagctttctctcaaatttccgcccgtagtaggcatggcggcggcacctcaccactgattcgttgaattccttcccggtaatcttgggcactagcgggcggagttgaagggcgcttggaccccagcggcgatctgtgtttgggttcgcgctctgggagaattttggctttgctcgccttcctctttcagaagactcgaaatcggccagcaggtctgcgagatttgaaacgcgactgttactccttgttttccggttctggccgcgggagcctctcgagaagcgtggaaagaggagaagggcgtataccttgtgaccgcctctggttgtcttgggctcgcgcctggcgccgctacgtggagtcgctctctcgtcgtcacttttggctgccgacttgttgagtagaagtgcagactgatgctttaagactcagggagaggtctttcccttatctccaccccagcaagcaccccagagaccttggagatttgtcttgtttctagacacgtgtactccaatgttgtgcggaggaggccttaaatattcgagaagagagtgggaactcctggaattttaagggatttctgtgtatttccaaaactgacttttaactaccggcagcgtgggatttcgtgattgtttttcgccatcgtgtggctccaacatgtacttcccttcttggttaagtcagctgtacaggggtttatccagacccatcagaaggaccacccaaccgatctggggttctctctacagaagtctgttgcagagttcacagaggagaattccagaattcagtagctttgttgtccggaccaacacatgtggagagttgcgttcgtctcacttaggccaagaagtcaccttgtgtggatggattcagtaccgaaggcaaaacacattcttggtcctaagagatttcgatgggcttgttcaagttatcattccccaggatgagtcggcagcctctgtgaagaagattttatgtgaagcccctgtggaatctgtggtgcaagtgtctggtacagtcatttcccgtcctgcaggacaagagaatccaaaaatgccaacaggtgagattgaaatcaaagttaaaacagctgagcttctgaatgcctgcaagaagctgccctttgaaattaagaacttcgtgaagaaaacagaggctcttcggttgcagtatcgctacttagacttgcgtagtttccaaatgcagtataacctgcgactgaggtcccagatggtcatgaaaatgcgggaatatctctgtaatctgcatgggtttgtggatatagaaacccccacattgtttaagaggaccccagggggtgccaaagagtttttagtaccatccagggaacctggaaagttttattctctccctcagagtcctcaacagtttaagcaacttctgatggttggcggtttagacagatattttcaggttgcccgatgttatcgagatgaaggttcaagaccagacagacagcctgagtttactcagattgacatagagatgtcatttgtagaccagactgggatccagagtttaattgagggtttgctccagtattcctggcccaatgacaaagatcctgtggttgttccttttcctactatgacttttgctgaggtgctggccacctatggaactgataaacctgacactcgctttggaatgaagattatagatatcagtgatgtgtttagaaacacagagattggatttcttcaagatgcacttagtaagccccatggaactgtgaaagccatatgtatccctgaaggagcaaaatacttaaaaaggaaagacattgaatccattagaaactttgcagctgaccattttaatcaggaaatcttacctgtattccttaacgccaatagaaactggaattctccagttgctaatttcataatggagtcacaaagactggaattaatcagactaatggagacccaagaggaagatgtggtcctactaactgctggagagcacaataaagcatgctctttgttaggaaaattacgactggaatgtgctgaccttctagaaacaagaggagtggtgctccgtgaccccactctgttctctttcctttgggtggtagatttcccactcttcctgcccaaggaggaaaatcccagagagctggaatcggcccaccacccatttactgctccccaccccagtgacatacatctcctgtacactgagcccaaaaaggcccgtagccaacactatgacttggttttaaatggcaatgaaataggaggtggttcaattcgaattcacaatgcagagctgcagcgttatatcctggcaaccttactaaaggaggatgtgaaaatgctctcccatctgctccaggctttagattatggggcaccccctcatggaggaattgccttagggttagacagactgatatgccttgtcactggatctccaagcatcagagatgtcatagccttcccaaagtccttccggggacatgacctcatgagcaataccccagattctgtccctcctgaggaactgaagccctatcatatccgagtctccaagccaacagactccaaagcagaaagagctcattgaatcatgcataccatgcagaaagttgagcttttaggttttgtcctctttgcttccccaaggctaaagtcagatctagagttctgccacaggtctaacaatcaagtctttagatggaaggaatccaggcaacattcttcaccacaacgaagaaacagataaaagatacccaattttgacttgatttcatgcatcatttggattttttttggttaggactttttttgaagttcctttttacttaggtgtgaaagatggttctttgttgaaataatatagtggtttagtgttttcaaatcatgtttctcatacccagatagtagattattcacttaggacagaggtaatcaaattatgtgtgaaatgtaggaaaatgcttgcccctgtaaactagtgagttgatggagcatttgcttcatcatcctcatcaagagaatcatataaattaagctttataatgacatttcaaccatcaacataatatagtgaggagtagcataatattttttaataatgcagaaaacatcactgaaatgagagtcacaaatttttcttcagtgtttcagcctgagtaagttacataaacctcgcttagcctcccttcctgctaatgtgtaaaatacatacttgccctggctacctcaccgggctgttattgctggaatcagaggagataacatatatggaagataaagtgaataaaagtactttgaaaaactataaagcattccacaaatatgagatgatggtattatccatccataaataggtagatatatctctattttatagtttcagattaaacaaaactgatatcaatagtaaaagtcattttacttatcaa

SEQ ID NO: 2550 - DNA, 2470 bp, Homo sapiens
  source 1..2470: mol_type = unassigned DNA
agtactaacatggactaatctgtgggagcagtttattccagtatcacccagggtgcagccacaccaggactgtgttgaagggtgttttttttcttttaaatgtaatacctcctcatcttttcttcttacacagtgtctgagaacatttacattatagataagtagtacatggtggataacttctacttttaggaggactactctcttctgacagtcctagactggtcttctacactaagacaccatgaaggagtatgtgctcctattattcctggctttgtgctctgccaaacccttctttagcccttcacacatcgcactgaagaatatgatgctgaaggatatggaagacacagatgatgatgatgatgatgatgatgatgatgatgatgatgatgaggacaactctctttttccaacaagagagccaagaagccatttttttccatttgatctgtttccaatgtgtccatttggatgtcagtgctattcacgagttgtacattgctcagatttaggtttgacctcagtcccaaccaacattccatttgatactcgaatgcttgatcttcaaaacaataaaattaaggaaatcaaagaaaatgattttaaaggactcacttcactttatggtctgatcctgaacaacaacaagctaacgaagattcacccaaaagcctttctaaccacaaagaagttgcgaaggctgtatctgtcccacaatcaactaagtgaaataccacttaatcttcccaaatcattagcagaactcagaattcatgaaaataaagttaagaaaatacaaaaggacacattcaaaggaatgaatgctttacacgttttggaaatgagtgcaaaccctcttgataataatgggatagagccaggggcatttgaaggggtgacggtgttccatatcagaattgcagaagcaaaactgacctcagttcctaaaggcttaccaccaactttattggagcttcacttagattataataaaatttcaacagtggaacttgaggattttaaacgatacaaagaactacaaaggctgggcctaggaaacaacaaaatcacagatatcgaaaatgggagtcttgctaacataccacgtgtgagagaaatacatttggaaaacaataaactaaaaaaaatcccttcaggattaccagagttgaaatacctccagataatcttccttcattctaattcaattgcaagagtgggagtaaatgacttctgtccaacagtgccaaagatgaagaaatctttatacagtgcaataagtttattcaacaacccggtgaaatactgggaaatgcaacctgcaacatttcgttgtgttttgagcagaatgagcgttcagcttgggaactttggaatgtaataattagtaattggtaatgtccatttaatataagattcaaaaatccctacatttggaatacttgaactctattaataatggtagtattatatatacaagcaaatatctattctcaagtggtaagtccactgacttattttatgacaagaaatttcaacggaattttgccaaactattgatacataagggttgagagaaacaagcatctattgcagtttctttttgcgtacaaatgatcttacataaatctcatgcttgaccattcctttcttcataacaaaaaagtaagatattcggtatttaacactttgttatcaagcatattttaaaaagaactgtactgtaaatggaatgcttgacttagcaaaatttgtgctctttcatttgctgttagaaaaacagaattaacaaagacagtaatgtgaagagtgcattacactattcttattctttagtaacttgggtagtactgtaatatttttaatcatcttaaagtatgatttgatataatcttattgaaattaccttatcatgtcttagagcccgtctttatgtttaaaactaatttcttaaaataaagccttcagtaaatgttcattaccaacttgataaatgctactcataagagctggtttggggctatagcatatgcttttttttttttaattattacctgatttaaaaatctctgtaaaaacgtgtagtgtttcataaaatctgtaactcgcattttaatgatccgctattataagcttttaatagcatgaaaattgttaggctatataacattgccacttcaactctaaggaatatttttgagatatccctttggaagaccttgcttggaagagcctggacactaacaattctacaccaaattgtctcttcaaatacgtatggactggataactctgagaaacacatctagtataactgaataagcagagcatcaaattaaacagacagaaaccgaaagctctatataaatgctcagagttctttatgtatttcttattggcattcaacatatgtaaaatcagaaaacagggaaattttcattaaaaatattggtttgaaataaaa

SEQ ID NO: 2551 - DNA, 973 bp, Homo sapiens
  source 1..973: mol_type = unassigned DNA
agtactaacatggactaatctgtgggagcagtttattccagtatcacccagggtgcagccacaccaggactgtgttgaagggtgttttttttcttttaaatgtaatacctcctcatcttttcttcttacacagtgtctgagaacatttacattatagataagtagtacatggtggataacttctacttttaggaggactactctcttctgacagtcctagactggtcttctacactaagacaccatgaaggagtatgtgctcctattattcctggctttgtgctctgccaaacccttctttagcccttcacacatcgcactgaagaatatgatgctgaaggatatggaagacacagatgatgatgatgatgatgatgatgatgatgatgatgatgatgaggacaactctctttttccaacaagagagccaagaagccatttttttccatttgatctgtttccaatgtgtccatttggatgtcagtgctattcacgagttgtacattgctcagatttaggtttgacctcagtcccaaccaacattccatttgatactcgaatgcttgatcttcaaaacaataaaattaaggaaatcaaagaaaatgattttaaaggactcacttcactttatggtctgatcctgaacaacaacaagctaacgaagattcacccaaaagcctttctaaccacaaagaagttgcgaaggctgtatctgtcccacaatcaactaagtgaaataccacttaatcttcccaaatcattagcagaactcagaattcatgaaaataaagttaagaaaatacaaaaggacacattcaaaggaatgaatgctttacacgttttggaaatgagtgcaaaccctcttgataataatgggatagagccaggggcatttgaaggggtgacggtgttccatatcagaattgcagaagcaaaactgacctcagttcctaaagtaaatctgccacaattt

SEQ ID NO: 2552 - DNA, 568 bp, Homo sapiens
  source 1..568: mol_type = unassigned DNA
agtactaacatggactaatctgtgggagcagtttattccagtatcacccagggtgcagccacaccaggactgtgttgaagggtgttttttttcttttaaatgtaatacctcctcatcttttcttcttacacagtgtctgagaacatttacattatagataagtagtacatggtggataacttctacttttaggaggactactctcttctgacagtcctagactggtcttctacactaagacaccatgaaggagtatgtgctcctattattcctggctttgtgctctgccaaacccttctttagcccttcacacatcgcactgaagaatatgatgctgaaggatatggaagacacagatgatgatgatgatgatgatgatgatgatgatgatgatgatgaggacaactctctttttccaacaagagagccaagaagccatttttttccatttgatctgtttccaatgtgtccatttggatgtcagtgctattcacgagttgtacattgctcagatttaggtttgacctcagtcccaaccaacattccattgatactcgaatgcttgatc

SEQ ID NO: 2553 - DNA, 2237 bp, Homo sapiens
  source 1..2237: mol_type = unassigned DNA
agtactaacatggactaatctgtgggagcagtttattccagtatcacccagggtgcagccacaccaggactgtgttgaagggtgttttttttcttttaaatgtaatacctcctcatcttttcttcttacacagtgtctgagaacatttacattatagataagtagtacatggtggataacttctacttttaggaggactactctcttctgacagtcctagactggtcttctacactaagacaccatgaaggagtatgtgctcctattattcctggctttgtgctctgccaaacccttctttagcccttcacacatcgcactgaagaatatgatgctgaaggatatggaagacacagatgatgatgatgatgatgatgatgatgatgatgatgatgatgaggacaactctctttttccaacaagagagccaagaagccatttttttccatttgatctgtttccaatgtgtccatttggatgtcagtgctattcacgagttgtacattgctcagatttaggtttgacctcagtcccaaccaacattccatttgatactcgaatgcttgatcttcaaaacaataaaattaaggaaatcaaagaaaatgattttaaaggactcacttcactttatggtctgatcctgaacaacaacaagctaacgaagattcacccaaaagcctttctaaccacaaagaagttgcgaaggctgtatctgtcccacaatcaactaagtgaaataccacttaatcttcccaaatcattagcagaactcagaattcatgaaaataaagttaagaaaatacaaaaggacacattcaaaggaatgaatgctttacacgttttggaaatgagtgcaaaccctcttgataataatgggatagagccaggggcatttgaaggggtgacggtgttccatatcagaattgcagaagcaaaactgacctcagttcctaaagataatcttccttcattctaattcaattgcaagagtgggagtaaatgacttctgtccaacagtgccaaagatgaagaaatctttatacagtgcaataagtttattcaacaacccggtgaaatactgggaaatgcaacctgcaacatttcgttgtgttttgagcagaatgagcgttcagcttgggaactttggaatgtaataattagtaattggtaatgtccatttaatataagattcaaaaatccctacatttggaatacttgaactctattaataatggtagtattatatatacaagcaaatatctattctcaagtggtaagtccactgacttattttatgacaagaaatttcaacggaattttgccaaactattgatacataagggttgagagaaacaagcatctattgcagtttctttttgcgtacaaatgatcttacataaatctcatgcttgaccattcctttcttcataacaaaaaagtaagatattcggtatttaacactttgttatcaagcatattttaaaaagaactgtactgtaaatggaatgcttgacttagcaaaatttgtgctctttcatttgctgttagaaaaacagaattaacaaagacagtaatgtgaagagtgcattacactattcttattctttagtaacttgggtagtactgtaatatttttaatcatcttaaagtatgatttgatataatcttattgaaattaccttatcatgtcttagagcccgtctttatgtttaaaactaatttcttaaaataaagccttcagtaaatgttcattaccaacttgataaatgctactcataagagctggtttggggctatagcatatgcttttttttttttaattattacctgatttaaaaatctctgtaaaaacgtgtagtgtttcataaaatctgtaactcgcattttaatgatccgctattataagcttttaatagcatgaaaattgttaggctatataacattgccacttcaactctaaggaatatttttgagatatccctttggaagaccttgcttggaagagcctggacactaacaattctacaccaaattgtctcttcaaatacgtatggactggataactctgagaaacacatctagtataactgaataagcagagcatcaaattaaacagacagaaaccgaaagctctatataaatgctcagagttctttatgtatttcttattggcattcaacatatgtaaaatcagaaaacagggaaattttcattaaaaatattggtttgaaataaaa

SEQ ID NO: 2554 - DNA, 7116 bp, Homo sapiens
  source 1..7116: mol_type = unassigned DNA
ggccggggctcaagatggctttagccgggctctgcgccctgctcgcctgctgctgggggccggcggcggtgctggccacggccgccggcgacgtggatccatccaaggagctggagtgcaagctcaaaagcatcacggtgtcggcactgcccttcctgcgcgagaacgacctgagcatcatgcacagcccctcggcctcggagcccaagctcctcttctcggtgcgcaacgacttcccgggagaaatggtcgtggtggacgacctggagaacacggagctgccctacttcgtgctggagatctcagggaacacagaggatatccctttggtgcgctggaggcagcagtggctggagaatggcactttgctttttcacattcatcaccaagatggtgccccaagccttcctggacaagaccccactgaagaaccccaacatgagtcggcagaagaggagctgaggatcctccacatctcagtcatgggtggcatgatcgctctgctgctgtccatcttgtgcctggtgatgatcctgtatactcgccggcgctggtgcaaacgccgccgggtcccgcagccccagaagagtgccagtgctgaggcagccaatgagattcactacattccttctgtgctgatcggcgggcacggacgggagagcctgcgcaatgcccgcgtgcagggccacaactccagtggcaccctgagcatccgggagacacctatcctggacggctatgagtatgacatcactgatctgcgccaccatctgcagagggagtgcatgaacggaggggaggactttgccagccaggtcacgcgcaccctcgactccctgcagggctgcaatgaaaagtcggggatggacctcacaccaggaagtgacaatgccaagctgtcactgatgaacaagtataaagataatattatagccactagccctgtggactccaaccaccagcaagccacccttctctctcacacctccagcagccagagaaagcggatcaacaacaaagcaagagctggttccgccttcttgaaccctgaaggggattctggcacagaggcagaaaacgacccccagctgaccttttacacggatccttcaaggagcaggaggcgtagtagagtgggttctccccgaagtcctgtgaataagaccaccttgaccctgatcagcatcaccagctgtgtgattggcctcgtgtgctcctctcacgtcaactgccctctcgttgtcaagatcaccctgcatgtccctgagcacctgattgctgatgggagccgcttcatcttgctggaggggagccagctggatgccagtgactggctgaaccctgcccaagtggttctcttctctcagcagaactccagcggaccctgggccatggacctctgtgcccggcggctcctggacccctgtgaacaccaatgtgaccccgaaactggggaatgcctctgctatgaaggctacatgaaggatccagtacataagcacctttgcattcggaacgaatgggggacaaaccaggggccatggccttacacaatatttcagcgaggctttgacctggttttgggagagcagccctctgataaaatatttagattcacctacactcttggggagggcatgtggttgcccctcagcaagagctttgtgattccaccagccgaactggccatcaatccatcagcaaagtgcaagacggacatgactgtgatggaggatgctgtggaggtcagagaggagctgatgacttcatcctccttcgacagcctggaggttctcttagattcctttgggccggtgcgcgactgcagcaaagataacgggggctgcagtaagaatttccgctgtatttcagatcgcaagctggactccactggttgcgtgtgcccatctggactcagtcccatgaaggacagctctggctgctatgaccgccacatcggggtggactgttccgacggcttcaacggcggctgtgagcagctgtgcctccagcagatggcgcccttcccggacgaccccaccttgtataacatcctcatgttctgtgggtgcatcgaggactacaagcttggtgtggatggacgctcttgccaactcatcacggagacctgtccagagggaagtgactgtggggaaagcagggagcttcccatgaaccagaccctctttggggagatgttctttggttacaacaaccattccaaggaagtggctgccggacaggtgctgaaaggaacattcaggcaaaacaactttgctcgtggtttagaccagcaactgccagatggtcttgtggtggccactgtgcccctggagaatcaatgcctagaggagatctcggagcccacccctgaccctgacttcctgactgggatggtgaacttcagtgaagtgtctgggtaccctgtgctgcagcactggaaggtccggtctgtgatgtaccacatcaaactcaaccaagtggccatctctcaggccctcagcaatgctctccactcgctggatggggctacatctcgtgcagattttgtggcgctgttggaccagttcggcaaccattacatccaggaagctatctacggctttgaggagtcctgttctatctggtacccaaacaagcaggtccagcggcgactctggctggagtatgaagacatcagtaaaggcaactccccatcagatgagtctgaggagcgggaaagagaccccaaggtgctgacattcccagaatacatcaccagcttgtcagactccggcaccaagcacatggcggctggagtccgcatggagtgccacagcaagggacgatgcccctcgtcctgccccctgtgtcatgtgacatccagccctgacacccctgctgagccggttctgctggaggtgaccaaagcagcccccatctatgaactagtgaccaacaaccagacccagaggctcttgcaggaggctaccatgagctctctctggtgctcagggactggagatgtcatcgaggactggtgtcgatgtgactccactgcttttggagctgatggactccccacctgtgcgcctctcccacagcctgtgctgagactctccacggttcacgagcccagcagcactcttgtggtcctggagtgggaacactcagagccaccaatcggggtgcagattgtagattacctcctccgtcaagagaaagtcactgacaggatggaccactccaaagtggagacagaaacagtgctgagctttgtggacgacatcatctctggagcaaagtctccttgtgcaatgccatctcaggtgccggacaagcagctcaccaccatctctctgatcatacgatgcctggaacctgacaccatttacatgttcacgctgtggggagtggacaacacaggacggcgctccaggccaagcgacgtgatcgtgaagaccccatgccccgtggtggatgatgtcaaggctcaagaaatagcagacaagatctacaatctcttcaatggctacactagtgggaaggagcagcagaccgcctacaacaccctcctggatctgggttcccccaccttacaccgggtcctctaccactataaccagcactatgagagttttggggaattcacctggcgatgtgaggatgagttaggtcccaggaaagctggtctcatcctttcccagcttggggacctcagcagttggtgcaatggactccttcaggaacccaagataagcttgcggcgcagctcactcaagtacctggggtgccgctacagcgagatcaaaccctacggacttgactgggcggagctcagccgggacctcaggaagacgtgtgaggagcagaccctgagtatcccctacaacgactatggggacagcaaagagatctagcaccataaggccagggagctgctgccagaatgaagtaggaaagaggagggatccatctgggttggtctgtggatttttaatattttttaatggaacatgaaaacctccacagcaacatcgaaaccagggagaaagtgatccttgctccctgcagaacttcttcagtatgatgttctccatctgcatgattgggaaatctgccagccagtggcttcatgcagtgccatatttctttagaggattactttggggtttgctttgccattaatttgttccattcatttttttttccctgagaagtttaccaaaatgctcaagagctctgccgtgctccccatgaaaagtctattaagtaggcaccctgtgctcactcagttcctaaatccattgcaactgggagcagaggtgaggccagaaagttgttaggcctgccgcaggccccaccctcaagcattcctcaggaagcgtctcactctgggagccttggccctgctcacagagagagacaatagaaaattgaggaaggtggcccttgtctgtgtctcctggttttcttcctaggccttgctatcactatttccatacccgaaaggtgaaaccagctttcattataggccccagtgggccacttgggttttgagatccttccttattttaagccaggactgggattaaatctccctctgtcagatctctgtcccttcctctgaacaacatgatctttgagagggaacaagatgccatctgtcaactgcaccttcagaaaagtctacctgggagactagttagcagtccacattcaagaggagacttggagtttattgttttttaaaaaaaccatgcttcctttggatagacttctccagcctaccaatatatatccatgtgcctggattatctttaacccccacacctcttaccttggacaggtaaggcttggccgatgtctgattgggaccaggaggggtcaacactttcatatcagtgttacagtgaactaaagctattattgatcacaaaaaacttctgttcatccccaccttgctaaatttgcttgtgttgctagttttgcaaatcgtttctctgatgaccataagcaggaggattccaccatggtcactgcccatccagtcacagggattctgtgtagggaagcaccactgattgcagttaacatctagagtgttgtttccatcccactgcccaagcattggcatggtcatgaatggtggcccagccaacaggaagcccagcctttcagaaagagcctggcaaggccctgttgactagcaatggccttagctgtcccacacaactcagtggcctgaacacacaccttcagccaccatgcctttgaccagggctcctcatctggaaacatatgagaaaggtcagcaaacagatgcaagacctataaggctagtcattgagctatattggttttttttctaaatagtagtagtgacagataacatttattgagtgcttgctgtatgccaggcgctgatgtaagcactttaggtatcattgaattctcacagcaactcctgaggaaagtgctattcttgtctccattttagtgttgaggaaaacgaggcaaagagaggttatacaacttgcctcaaatcccttgtgcactgtaactcacactgagtttcagtgtgatttcaggctgttggtctccagggcacaggatcttagctactctgggatacccagttctgttttcagtatcatctggcacacaactgtccaagctctcagccccacagggaacctgcccagagagctttacctttcccaagcatctgtggcatggacatgtcctctgtgcagtggaaggaggaggggcgaaagtacgcccttagcctttggagctagagcacccttgggacccctagttccactgcacatggccctcctccccaccctcatgactgggaaggaagcctgtgatgaggctgagataaagcacagggtggtttcactctcctctctccttctttccaaacactgaaggatttatttcaaactctctaatgcacctgcctcagagattcccctactttcaaagcaaagatcagcagaaaaattggctgtcccacctgtggcaaatgctggagcctcagttaaagtgcctcaaggggcaaatatttcaccattgccagagaagatgtgacaggccaatcagacagggcccagagcatctctttgctgctactgttttgccatccttctattcatatctgtgcagaacacggtgttttaagcttgagtgaaaggagggtgaggctgccgatgccttcctgcccagaagtggatgatgtgggagttgacaggccagggagagggtgaagcaggtatcagagtcactcctctgtaccctctccttctgtttttattttaggcacactatcttcctctctcctatctttccctcagtctcccaagttcctctaccttctttatctttgtcttttacttcttctttctgtgaccctccttttttggcctcctctttccccaagactttcttcctcctgtttctcgttgagttctccccactgaatgtgtgtatgtatgtacacacacacacacgtgtgcacacacaatgcacacaactcctatgactggctcctacttacattcaagttaaaaaggctgatatgaacagggcaggggaaaatcttaggatggttgtacaattgactggaggattttttccccttggaagacactattgatctcaacctgctgacttttcctaatgcttacctgaaggaacccatcctggctagaaagggtgatggtactggaccggtattcaaccttgagttttcaagctgccaaacaggtcttaagggaggtgcttatatcccaccaacactctcccagctcccatgtccccaagacctctggagtttcctcttgaatgtacatgaaccactgtaatagcattagacttttaattgagtgtgcaatcgttttccatggagtttggtccgttcattattttttagttaactacacttcttgatattcaaatgttctattaaaaaaactgagtatgaagaaaaacactttactactgcagaaggaagaaagaatataatatgaccatcttcaggtataacagtgttgtttaaaagagaattattgtatgattataaaagatgaaataattaactgaataataaaacaaagctattagtaagca

SEQ ID NO: 2555 - DNA, 7122 bp, Homo sapiens
  source 1..7122: mol_type = unassigned DNA
ggccggggctcaagatggctttagccgggctctgcgccctgctcgcctgctgctgggggccggcggcggtgctggccacggccgccggcgacgtggatccatccaaggagctggagtgcaagctcaaaagcatcacggtgtcggcactgcccttcctgcgcgagaacgacctgagcatcatgcacagcccctcggcctcggagcccaagctcctcttctcggtgcgcaacgacttcccgggagaaatggtcgtggtggacgacctggagaacacggagctgccctacttcgtgctggagatctcagggaacacagaggatatccctttggtgcgctggaggcagcagtggctggagaatggcactttgctttttcacattcatcaccaagatggtgccccaagccttcctggacaagaccccactgaagaaccccaacatgagtcggcagaagaggagctgaggatcctccacatctcagtcatgggtggcatgatcgctctgctgctgtccatcttgtgcctggtgatgatcctgtatactcgccggcgctggtgcaaacgccgccgggtcccgcagccccagaagagtgccagtgctgaggcagccaatgagattcactacattccttctgtgctgatcggcgggcacggacgggagagcctgcgcaatgcccgcgtgcagggccacaactccagtggcaccctgagcatccgggagacacctatcctggacggctatgagtatgacatcactgatctgcgccaccatctgcagagggagtgcatgaacggaggggaggactttgccagccaggtcacgcgcaccctcgactccctgcagggctgcaatgaaaagtcggggatggacctcacaccaggaagtgacaatgccaagctgtcactgatgaacaagtataaagataatattatagccactagccctgtggactccaaccaccagcaagccacccttctctctcacacctccagcagccagagaaagcggatcaacaacaaagcaagagctggttccgccttcttgaaccctgaaggggattctggcacagaggcagaaaacgacccccagctgaccttttacacggatccttcaaggagcaggaggcgtagtagagtgggttctccccgaagtcctgtgaataagaccaccttgaccctgatcagcatcaccagctgtgtgattggcctcgtgtgctcctctcacgtcaactgccctctcgttgtcaagatcaccctgcatgtccctgagcacctgattgctgatgggagccgcttcatcttgctggaggggagccagctggatgccagtgactggctgaaccctgcccaagtggttctcttctctcagcagaactccagcggaccctgggccatggacctctgtgcccggcggctcctggacccctgtgaacaccaatgtgaccccgaaactggtaggcgggagcaccgggcagcgggggaatgcctctgctatgaaggctacatgaaggatccagtacataagcacctttgcattcggaacgaatgggggacaaaccaggggccatggccttacacaatatttcagcgaggctttgacctggttttgggagagcagccctctgataaaatatttagattcacctacactcttggggagggcatgtggttgcccctcagcaagagctttgtgattccaccagccgaactggccatcaatccatcagcaaagtgcaagacggacatgactgtgatggaggatgctgtggaggtcagagaggagctgatgacttcatcctccttcgacagcctggaggttctcttagattcctttgggccggtgcgcgactgcagcaaagataacgggggctgcagtaagaatttccgctgtatttcagatcgcaagctggactccactggttgcgtgtgcccatctggactcagtcccatgaaggacagctctggctgctatgaccgccacatcggggtggactgttccgacggcttcaacggcggctgtgagcagctgtgcctccagcagatggcgcccttcccggacgaccccaccttgtataacatcctcatgttctgtgggtgcatcgaggactacaagcttggtgtggatggacgctcttgccaactcatcacggagacctgtccagagggaagtgactgtggggaaagcagggagcttcccatgaaccagaccctctttggggagatgttctttggttacaacaaccattccaaggaagtggctgccggacaggtgctgaaaggaacattcaggcaaaacaactttgctcgtggtttagaccagcaactgccagatggtcttgtggtggccactgtgcccctggagaatcaatgcctagaggagatctcggagcccacccctgaccctgacttcctgactgggatggtgaacttcagtgaagtgtctgggtaccctgtgctgcagcactggaaggtccggtctgtgatgtaccacatcaaactcaaccaagtggccatctctcaggccctcagcaatgctctccactcgctggatggggctacatctcgtgcagattttgtggcgctgttggaccagttcggcaaccattacatccaggaagctatctacggctttgaggagtcctgttctatctggtacccaaacaagcaggtccagcggcgactctggctggagtatgaagacatcagtaaaggcaactccccatcagatgagtctgaggagcgggaaagagaccccaaggtgctgacattcccagaatacatcaccagcttgtcagactccggcaccaagcacatggcggctggagtccgcatggagtgccacagcaagggacgatgcccctcgtcctgccccctgtgtcatgtgacatccagccctgacacccctgctgagccggttctgctggaggtgaccaaagcagcccccatctatgaactagtgaccaacaaccagacccagaggctcttgcaggaggctaccatgagctctctctggtgctcagggactggagatgtcatcgaggactggtgtcgatgtgactccactgcttttggagctgatggactccccacctgtgcgcctctcccacagcctgtgctgagactctccacggttcacgagcccagcagcactcttgtggtcctggagtgggaacactcagagccaccaatcggggtgcagattgtagattacctcctccgtcaagagaaagtcactgacaggatggaccactccaaagtggagacagaaacagtgctgagctttgtggacgacatcatctctggagcaaagtctccttgtgcaatgccatctcaggtgccggacaagcagctcaccaccatctctctgatcatacgatgcctggaacctgacaccatttacatgttcacgctgtggggagtggacaacacaggacggcgctccaggccaagcgacgtgatcgtgaagaccccatgccccgtggtggatgatgtcaaggctcaagaaatagcagacaagatctacaatctcttcaatggctacactagtgggaaggagcagcagaccgcctacaacaccctcctggatctgggttcccccaccttacaccgggtcctctaccactataaccagcactatgagagttttggggaattcacctggcgatgtgaggatgagttaggtcccaggaaagctggtctcatcctttcccagcttggggacctcagcagttggtgcaatggactccttcaggaacccaagataagcttgcggcgcagctcactcaagtacctggggtgccgctacagcgagatcaaaccctacggacttgactgggcggagctcagccgggacctcaggaagacgtgtgaggagcagaccctgagtatcccctacaacgactatggggacagcaaagagatctagcaccataaggccagggagctgctgccagaatgaagtaggaaagaggagggatccatctgggttggtctgtggatttttaatattttttaatggaacatgaaaacctccacagcaacatcgaaaccagggagaaagtgatccttgctccctgcagaacttcttcagtatgatgttctccatctgcatgattgggaaatctgccagccagtggcttcatgcagtgccatatttctttagaggattactttggggtttgctttgccattaatttgttccattcatttttttttccctgagaagtttaccaaaatgctcaagagctctgccgtgctccccatgaaaagtctattaagtaggcaccctgtgctcactcagttcctaaatccattgcaactgggagcagaggtgaggccagaaagttgttaggcctgccgcaggccccaccctcaagcattcctcaggaagcgtctcactctgggagccttggccctgctcacagagagagacaatagaaaattgaggaaggtggcccttgtctgtgtctcctggttttcttcctaggccttgctatcactatttccatacccgaaaggtgaaaccagctttcattataggccccagtgggccacttgggttttgagatccttccttattttaagccaggactgggattaaatctccctctgtcagatctctgtcccttcctctgaacaacatgatctttgagagggaacaagatgccatctgtcaactgcaccttcagaaaagtctacctgggagactagttagcagtccacattcaagaggagacttggagtttattgttttttaaaaaaaccatgcttcctttggatagacttctccagcctaccaatatatatccatgtgcctggattatctttaacccccacacctcttaccttggacaggtaaggcttggccgatgtctgattgggaccaggaggggtcaacactttcatatcagtgttacagtgaactaaagctattattgatcacaaaaaacttctgttcatccccaccttgctaaatttgcttgtgttgctagttttgcaaatcgtttctctgatgaccataagcaggaggattccaccatggtcactgcccatccagtcacagggattctgtgtagggaagcaccactgattgcagttaacatctagagtgttgtttccatcccactgcccaagcattggcatggtcatgaatggtggcccagccaacaggaagcccagcctttcagaaagagcctggcaaggccctgttgactagcaatggccttagctgtcccacacaactcagtggcctgaacacacaccttcagccaccatgcctttgaccagggctcctcatctggaaacatatgagaaaggtcagcaaacagatgcaagacctataaggctagtcattgagctatattggttttttttctaaatagtagtagtgacagataacatttattgagtgcttgctgtatgccaggcgctgatgtaagcactttaggtatcattgaattctcacagcaactcctgaggaaagtgctattcttgtctccattttagtgttgaggaaaacgaggcaaagagaggttatacaacttgcctcaaatcccttgtgcactgtaactcacactgagtttcagtgtgatttcaggctgttggtctccagggcacaggatcttagctactctgggatacccagttctgttttcagtatcatctggcacacaactgtccaagctctcagccccacagggaacctgcccagagagctttacctttcccaagcatctgtggcatggacatgtcctctgtgcagtggaaggaggaggggcgaaagtacgcccttagcctttggagctagagcacccttgggacccctagttccactgcacatggccctcctccccaccctcatgactgggaaggaagcctgtgatgaggctgagataaagcacagggtggtttcactctcctctctccttctttccaaacactgaaggatttatttcaaactctctaatgcacctgcctcagagattcccctactttcaaagcaaagatcagcagaaaaattggctgtcccacctgtggcaaatgctggagcctcagttaaagtgcctcaaggggcaaatatttcaccattgccagagaagatgtgacaggccaatcagacagggcccagagcatctctttgctgctactgttttgccatccttctattcatatctgtgcagaacacggtgttttaagcttgagtgaaaggagggtgaggctgccgatgccttcctgcccagaagtggatgatgtgggagttgacaggccagggagagggtgaagcaggtatcagagtcactcctctgtaccctctccttctgtttttattttaggcacactatcttcctctctcctatctttccctcagtctcccaagttcctctaccttctttatctttgtcttttacttcttctttctgtgaccctccttttttggcctcctctttccccaagactttcttcctcctgtttctcgttgagttctccccactgaatgtgtgtatgtatgtacacacacacacacgtgtgcacacacaatgcacacaactcctatgactggctcctacttacattcaagttaaaaaggctgatatgaacagggcaggggaaaatcttaggatggttgtacaattgactggaggattttttccccttggaagacactattgatctcaacctgctgacttttcctaatgcttacctgaaggaacccatcctggctagaaagggtgatggtactggaccggtattcaaccttgagttttcaagctgccaaacaggtcttaagggaggtgcttatatcccaccaacactctcccagctcccatgtccccaagacctctggagtttcctcttgaatgtacatgaaccactgtaatagcattagacttttaattgagtgtgcaatcgttttccatggagtttggtccgttcattattttttagttaactacacttcttgatattcaaatgttctattaaaaaaactgagtatgaagaaaaacactttactactgcagaaggaagaaagaatataatatgaccatcttcaggtataacagtgttgtttaaaagagaattattgtatgattataaaagatgaaataattaactgaataataaaa

SEQ ID NO: 2556 - DNA, 3685 bp, Homo sapiens
  source 1..3685: mol_type = unassigned DNA
gctcaagatggctttagccgggctctgcgccctgctcgcctgctgctgggggccggcggcggtgctggccacggccgccggcgacgtggatccatccaaggagctggagtgcaagctcaaaagcatcacggtgtcggcactgcccttcctgcgcgagaacgacctgagcatcatgcacagcccctcggcctcggagcccaagctcctcttctcggtgcgcaacgacttcccgggagaaatggtcgtggtggacgacctggagaacacggagctgccctacttcgtgctggagatctcagggaacacagaggatatccctttggtgcgctggaggcagcagtggctggagaatggcactttgctttttcacattcatcaccaagatggtgccccaagccttcctggacaagaccccactgaagaaccccaacatgagtcggcagaagaggagctgaggatcctccacatctcagtcatgggtggcatgatcgctctgctgctgtccatcttgtgcctggtgatgatcctgtatactcgccggcgctggtgcaaacgccgccgggtcccgcagccccagaagagtgccagtgctgaggcagccaatgagattcactacattccttctgtgctgatcggcgggcacggacgggagagcctgcgcaatgcccgcgtgcagggccacaactccagtggcaccctgagcatccgggagacacctatcctggacggctatgagtatgacatcactgatctgcgccaccatctgcagagggagtgcatgaacggaggggaggactttgccagccaggtcacgcgcaccctcgactccctgcagggctgcaatgaaaagtcggggatggacctcacaccaggaagtgacaatgccaagctgtcactgatgaacaagtataaagataatattatagccactagccctgtggactccaaccaccagcaagccacccttctctctcacacctccagcagccagagaaagcggatcaacaacaaagcaagagctggttccgccttcttgaaccctgaaggggattctggcacagaggcagaaaacgacccccagctgaccttttacacggatccttcaaggagcaggaggcgtagtagagtgggttctccccgaagtcctgtgaataagaccaccttgaccctgatcagcatcaccagctgtgtgattggcctcgtgtgctcctctcacgtcaactgccctctcgttgtcaagatcaccctgcatgtccctgagcacctgattgctgatgggagccgcttcatcttgctggaggggagccagctggatgccagtgactggctgaaccctgcccaagtggttctcttctctcagcagaactccagcggaccctgggccatggacctctgtgcccggcggctcctggacccctgtgaacaccaatgtgaccccgaaactggggaatgcctctgctatgaaggctacatgaaggatccagtacataagcacctttgcattcggaacgaatgggggacaaaccaggggccatggccttacacaatatttcagcgaggctttgacctggttttgggagagcagccctctgataaaatatttagattcacctacactcttggggagggcatgtggttgcccctcagcaagagctttgtgattccaccagccgaactggccatcaatccatcagcaaagtgcaagacggacatgactgtgatggaggatgctgtggaggtcagagaggagctgatgacttcatcctccttcgacagcctggaggttctcttagattcctttgggccggtgcgcgactgcagcaaagataacgggggctgcagtaagaatttccgctgtatttcagatcgcaagctggactccactggttgcgtgtgcccatctggactcagtcccatgaaggacagctctggctgctatgaccgccacatcggggtggactgttccgacggcttcaacggcggctgtgagcagctgtgcctccagcagatggcgcccttcccggacgaccccaccttgtataacatcctcatgttctgtgggtgcatcgaggactacaagcttggtgtggatggacgctcttgccaactcatcacggagacctgtccagagggaagtgactgtggggaaagcagggagcttcccatgaaccagaccctctttggggagatgttctttggttacaacaaccattccaaggaagtggctgccggacaggtgctgaaaggaacattcaggcaaaacaactttgctcgtggtttagaccagcaactgccagatggtcttgtggtggccactgtgcccctggagaatcaatgcctagaggagatctcggagcccacccctgaccctgacttcctgactgggatggtgaacttcagtgaagtgtctgggtaccctgtgctgcagcactggaaggtccggtctgtgatgtaccacatcaaactcaaccaagtggccatctctcaggccctcagcaatgctctccactcgctggatggggctacatctcgtgcagattttgtggcgctgttggaccagttcggcaaccattacatccaggaagctatctacggctttgaggagtcctgttctatctggtacccaaacaagcaggtccagcggcgactctggctggagtatgaagacatcagtaaaggcaactccccatcagatgagtctgaggagcgggaaagagaccccaaggtgctgacattcccagaatacatcaccagcttgtcagactccggcaccaagcacatggcggctggagtccgcatggagtgccacagcaagggacgatgcccctcgtcctgccccctgtgtcatgtgacatccagccctgacacccctgctgagccggttctgctggaggtgaccaaagcagcccccatctatgaactagtgaccaacaaccagacccagaggctcttgcaggaggctaccatgagctctctctggtgctcagggactggagatgtcatcgaggactggtgtcgatgtgactccactgcttttggagctgatggactccccacctgtgcgcctctcccacagcctgtgctgagactctccacggttcacgagcccagcagcactcttgtggtcctggagtgggaacactcagagccaccaatcggggtgcagattgtagattacctcctccgtcaagagaaagtcactgacaggatggaccactccaaagtggagacagaaacagtgctgagctttgtggacgacatcatctctggagcaaagtctccttgtgcaatgccatctcaggtgccggacaagcagctcaccaccatctctctgatcatacgatgcctggaacctgacaccatttacatgttcacgctgtggggagtggacaacacaggacggcgctccaggccaagcgacgtgatcgtgaagaccccatgccccgtggtggatgatgtcaaggctcaagaaatagcagacaagatctacaatctcttcaatggctacactagtgggaaggagcagcagaccgcctacaacaccctcctggatctgggttcccccaccttacaccgggtcctctaccactataaccagcactatgagagttttggggaattcacctggcgatgtgaggatgagttaggtcccaggtaatcaataaactaagtcaacccttttaaa

SEQ ID NO: 2557 - DNA, 3852 bp, Homo sapiens
  source 1..3852: mol_type = unassigned DNA
catcagagcttaaacccaggactctgcaagcggcatctcattccggggtccagggctctcccggctctccatcccctccctaacctcccccgcctcccgcgctcgctccctcgctccctccccgctcgcttcctcccccaccatcgcagcgctaggaggaaggcggccggggctcaagatggctttagccgggctctgcgccctgctcgcctgctgctgggggccggcggcggtgctggccacggccgccggcgacgtggatccatccaaggagctggagtgcaagctcaaaagcatcacggtgtcggcactgcccttcctgcgcgagaacgacctgagcatcatgcacagcccctcggcctcggagcccaagctcctcttctcggtgcgcaacgacttcccgggagaaatggtcgtggtggacgacctggagaacacggagctgccctacttcgtgctggagatctcagggaacacagaggatatccctttggtgcgctggaggcagcagtggctggagaatggcactttgctttttcacattcatcaccaagatggtgccccaagccttcctggacaagaccccactgaagaaccccaacatgagtcggcagaagaggagctgaggatcctccacatctcagtcatgggtggcatgatcgctctgctgctgtccatcttgtgcctggtgatgatcctgtatactcgccggcgctggtgcaaacgccgccgggtcccgcagccccagaagagtgccagtgctgaggcagccaatgagattcactacattccttctgtgctgatcggcgggcacggacgggagagcctgcgcaatgcccgcgtgcagggccacaactccagtggcaccctgagcatccgggagacacctatcctggacggctatgagtatgacatcactgatctgcgccaccatctgcagagggagtgcatgaacggaggggaggactttgccagccaggtcacgcgcaccctcgactccctgcagggctgcaatgaaaagtcggggatggacctcacaccaggaagtgacaatgccaagctgtcactgatgaacaagtataaagataatattatagccactagccctgtggactccaaccaccagcaagccacccttctctctcacacctccagcagccagagaaagcggatcaacaacaaagcaagagctggttccgccttcttgaaccctgaaggggattctggcacagaggcagaaaacgacccccagctgaccttttacacggatccttcaaggagcaggaggcgtagtagagtgggttctccccgaagtcctgtgaataagaccaccttgaccctgatcagcatcaccagctgtgtgattggcctcgtgtgctcctctcacgtcaactgccctctcgttgtcaagatcaccctgcatgtccctgagcacctgattgctgatgggagccgcttcatcttgctggaggggagccagctggatgccagtgactggctgaaccctgcccaagtggttctcttctctcagcagaactccagcggaccctgggccatggacctctgtgcccggcggctcctggacccctgtgaacaccaatgtgaccccgaaactggggaatgcctctgctatgaaggctacatgaaggatccagtacataagcacctttgcattcggaacgaatgggggacaaaccaggggccatggccttacacaatatttcagcgaggctttgacctggttttgggagagcagccctctgataaaatatttagattcacctacactcttggggagggcatgtggttgcccctcagcaagagctttgtgattccaccagccgaactggccatcaatccatcagcaaagtgcaagacggacatgactgtgatggaggatgctgtggaggtcagagaggagctgatgacttcatcctccttcgacagcctggaggttctcttagattcctttgggccggtgcgcgactgcagcaaagataacgggggctgcagtaagaatttccgctgtatttcagatcgcaagctggactccactggttgcgtgtgcccatctggactcagtcccatgaaggacagctctggctgctatgaccgccacatcggggtggactgttccgacggcttcaacggcggctgtgagcagctgtgcctccagcagatggcgcccttcccggacgaccccaccttgtataacatcctcatgttctgtgggtgcatcgaggactacaagcttggtgtggatggacgctcttgccaactcatcacggagacctgtccagagggaagtgactgtggggaaagcagggagcttcccatgaaccagaccctctttggggagatgttctttggttacaacaaccattccaaggaagtggctgccggacaggtgctgaaaggaacattcaggcaaaacaactttgctcgtggtttagaccagcaactgccagatggtcttgtggtggccactgtgcccctggagaatcaatgcctagaggagatctcggagcccacccctgaccctgacttcctgactgggatggtgaacttcagtgaagtgtctgggtaccctgtgctgcagcactggaaggtccggtctgtgatgtaccacatcaaactcaaccaagtggccatctctcaggccctcagcaatgctctccactcgctggatggggctacatctcgtgcagattttgtggcgctgttggaccagttcggcaaccattacatccaggaagctatctacggctttgaggagtcctgttctatctggtacccaaacaagcaggtccagcggcgactctggctggagtatgaagacatcagtaaaggcaactccccatcagatgagtctgaggagcgggaaagagaccccaaggtgctgacattcccagaatacatcaccagcttgtcagactccggcaccaagcacatggcggctggagtccgcatggagtgccacagcaagggacgatgcccctcgtcctgccccctgtgtcatgtgacatccagccctgacacccctgctgagccggttctgctggaggtgaccaaagcagcccccatctatgaactagtgaccaacaaccagacccagaggctcttgcaggaggctaccatgagctctctctggtgctcagggactggagatgtcatcgaggactggtgtcgatgtgactccactgcttttggagctgatggactccccacctgtgcgcctctcccacagcctgtgctgagactctccacggttcacgagcccagcagcactcttgtggtcctggagtgggaacactcagagccaccaatcggggtgcagattgtagattacctcctccgtcaagagaaagtcactgacaggatggaccactccaaagtggagacagaaacagtgctgagctttgtggacgacatcatctctggagcaaagtctccttgtgcaatgccatctcaggtgccggacaagcagctcaccaccatctctctgatcatacgatgcctggaacctgacaccatttacatgttcacgctgtggggagtggacaacacaggacggcgctccaggccaagcgacgtgatcgtgaagaccccatgccccgtggtggatgatgtcaaggctcaagaaatagcagacaagatctacaatctcttcaatggctacactagtgggaaggagcagcagaccgcctacaacaccctcctggatctgggttcccccaccttacaccgggtcctctaccactataaccagcactatgagagttttggggaattcacctggcgatgtgaggatgagttaggtcccaggaatcaataaactaagtcaaccctttt

SEQ ID NO: 2558 - DNA, 2356 bp, Homo sapiens
  source 1..2356: mol_type = unassigned DNA
ccaagcgcgcggggcaaggcggccctgcaggggtgagctttcctctgagaacccggggccttagcgacacgtaatccagttttccgtctccttggtgcagatgaagaaaccgacgcccatgggcgaaagggacctgctcaagttcactcagtaagtcaggagataagccagaatgcgtatctgactccagtctcaatgtctaccccttcacaaaacggtagcctccagggtagtcctcagcaaagcgttggcaccttactgaatctgtttttccatctgagaaatgggccaacggaaaaatcaaacttccattctggggaagtcgagaaccgggactccctaggaagggcagtgctttggcctcatgttctgtgctctgacagagagctgcactagagacaagtttatccatgaacacattgctctgtaaaggaatgttttgcctactcagctgggaggccgacagcagaggcagacttggggagtacactctgcagcccctgtccctgcagactgaagagaccacagagctgggcagcaagaaggagctcaagtccatgcccttcatcacctacctctcaggtttgctgacagcccagatgctgtcagatgaccagctcatttcaggtgtggagattcgctgtgaggagaaggggcgctgtccatctacctgtcacctttgccgccggccaggcaaggagcagctgagccccacaccagtgctgctggaaatcaaccgtgtggtgccactttataccctcatccaagacaatggcacaaaggaggccttcaagagtgcactgatgagttcctactggtgctcagggaaaggggatgtgatcgatgactggtgcaggtgtgacctcagcgcctttgatgccaatgggctccccaactgcagcccccttctgcagccggtgctgcggctgtccccaacagtggagccctccagtactgtggtctccttggagtgggtggatgttcagccagctattgggaccaaggtctccgactatattctgcagcataagaaagtggatgaatacacagacactgacctgtacacaggagaattcctgagttttgctgatgacttactctctggcctgggcacatcttgtgtagcagctggtcgaagccatggagaggtccctgaagtcagtatctactcagtcatcttcaagtgtctggagcccgacggtctctacaagttcactctgtatgctgtggatacacgagggaggcactcagagctaagcacggtgaccctgaggacggcctgtccactggtagatgacaacaaggcagaagaaatagctgacaagatctacaatctgtacaatgggtacacaagtggaaaggagcagcagatggcctacaacacactgatggaggtctcagcctcgatgctgttccgagtccagcaccactacaactctcactatgaaaagtttggcgacttcgtctggagaagtgaggatgagctggggcccaggaaggcccacctgattctacggcgactggagagggtgagtagccactgctccagcctcctgcggagtgcctacatccagagccgcgtggaaacagtgccctatcttttctgccgcagcgaggaggtccggcctgcaggcatggtgtggtatagcatcctcaaggacaccaaaatcacgtgtgaggagaagatggtgtcaatggcccgaaacacgtacggggagtccaagggccggtgagggagggtattgccctccgtgagcacagagactctccatgggagggggagcagtattctcctggatcctggggcctgggtgggctgggggacagctgaggatgggcctagcagatgaagcttgccagcaaggccaaagcaaacggtttctcctgtggatagtggacagagacctttgtaaccaatggaattattcatttttctctatcttttattttttcaaagatattatttgactctatcaaaagtctctcctttttaaaccttttcttatggatggctgtcaatcccgaggcagaagttttcaggtggagaccaagcggcctttgctcttcttccttcttcctgccacactctgctttcttcctgccatggacccctggaggagacctatggagggacagttttgacctgacccctagaggagacagttttgacctcttcagcaccaggaaggaagctctgaggatggttgcagtgaggaagcatgggtctttaaggacttctctctcttttttgctggacattattgagtttgtgggaccctgcctcttcctgctacctgtgggtctgcccagagtccctgcaggcctgtccatgcattaaaaattcctattgtctctc

SEQ ID NO: 2559 - DNA, 4747 bp, Homo sapiens
  source 1..4747: mol_type = unassigned DNA
ggttcgcttcggcgtccgccgtctccgcagctgcctcctcttcctccttcgccaccgccgccaccgccgccgccgcccgcagcaccgcagcccctcccgccatggccgccgccggcgcccggctcagccccggccccggctcggggctccgggggcggccgaggctctgcttccacccggggccgccgccactgctgccgctgctgctgctgttcctgctcctgctgccgccgccgccgctgctggccggcgccaccgccgctgcctcgcgggagcccgacagcccgtgccggctgaagaccgtcacggtgtccacactgcccgccctgcgggagagcgacatcggctggagcggcgcccgcgccggggccggggctgggaccggggccggagccgccgccgccgccgcgtccccgggctctcctggctctgccggcaccgccgccgagtcgcgcctcctgctctttgtgcgtaacgagctgccggggcgcatcgcggtgcaggacgacctggacaacaccgagctgcccttcttcaccctggagatgtctggcacagcagcggacatctcgctggtgcactggagacagcagtggctggagaatggcaccttgtacttccacgtctccatgagcagctccgggcagctggcccaagccaccgcccccactctccaggagccctcggagattgttgaggagcagatgcacatcctccacatttctgtgatgggtggcctcatcgcgctgctgctgctgctgctggtgttcaccgtggcgctgtacgcccagcgacgttggcagaagcgtcgccgcatcccccagaagagcgcaagcacagaagccactcatgagatccactacatcccatctgtgctgctgggtccccaggcgcgggagagcttccgttcatcccggctgcaaacccacaattccgtcattggcgtgcccatccgggagactcccatcctggatgactatgactgtgaggaggatgaggagccacctaggcgggccaaccatgtctcccgcgaggacgagtttggcagccaggtgacccacactctggacagtctgggacatccaggggaagagaaggtggactttgagaagaaagcagcagctgaggcgactcaggagacagtggagtccctgatgcagaagttcaaggagagtttccgcgctaacacgcccatcgagatcggtcagctgcaaccacccctgcgcagcacatcggcagggaagaggaagcggaggagcaagtctcgaggaggaatcagctttgggagagccaaggggacgtcgggctcagaggcagacgatgaaactcagctgacattctacacggagcagtaccgcagtcgccgccgcagcaaaggtttgctgaaaagcccagtgaacaagacagccctgacactgattgctgtgagttcctgcatcctggccatggtgtgtggcagccagatgtcttgtccactcactgtgaaggtgactctgcatgtgcccgagcacttcatagcagatggaagcagcttcgtggtgagtgaagggagctacctggacatctccgactggttaaacccggccaagctttccctgtattaccagatcaatgccacctccccatgggtgagggacctctgtggacaaaggacgacagatgcctgtgagcagctctgcgacccagaaaccggagagtgcagctgtcatgaaggctatgcccctgaccctgttcacagacacctgtgtgtgcgcagtgactggggacagagtgaaggaccttggccctacacgacacttgagaggggctatgatctggtgacaggggagcaagcccctgaaaagattctcaggtctactttcagcttgggccaaggcctctggcttcctgtcagcaaaagctttgtggttccgcctgtggagctgtccatcaaccccctggccagctgcaagaccgatgtgctcgtcacggaagaccctgcagatgtcagggaagaagcgatgctgtccacatactttgaaaccatcaatgacctgctgtcttccttcgggccagttcgtgactgctctcggaacaatgggggctgcactcgcaacttcaagtgtgtgtctgaccggcaggtggattcctcgggatgtgtgtgccctgaggagctgaaacccatgaaggatggctctggctgctacgaccactccaaaggcattgactgctctgatggctttaatggcggctgtgagcagctgtgcctgcagcagacgctgcccctgccctacgatgccacttcgagcaccatcttcatgttctgcggttgcgtggaggagtacaaactggctcctgatggaaaatcctgcttaatgctctcagatgtctgcgagggccccaagtgcctcaaacctgactccaaattcaatgataccctctttggagagatgctacatggttacaacaaccggacccagcatgtgaaccaaggccaagtcttccagatgacctttagggagaacaacttcatcaaggactttccccagctggccgatgggctgttggtgatcccgctgccggtggaggagcagtgccggggggtcctctccgagccccttccagacctccaactgctcactggagatatcaggtatgatgaggccatgggttaccccatggtgcagcagtggcgggtccggagcaacctctaccgtgtgaagctcagcaccatcaccctcgcagcaggcttcactaatgttctcaagatcctgaccaaggagagcagtcgggaggagctgctgtccttcatccagcactatggctcccactacatcgcagaggccctctatggctcagagctcacctgcatcatccactttcccagcaagaaggtccagcagcagctgtggctccagtatcagaaagagaccacagagctgggcagcaagaaggagctcaagtccatgcccttcatcacctacctctcaggtttgctgacagcccagatgctgtcagatgaccagctcatttcaggtgtggagattcgctgtgaggagaaggggcgctgtccatctacctgtcacctttgccgccggccaggcaaggagcagctgagccccacaccagtgctgctggaaatcaaccgtgtggtgccactttataccctcatccaagacaatggcacaaaggaggccttcaagagtgcactgatgagttcctactggtgctcagggaaaggggatgtgatcgatgactggtgcaggtgtgacctcagcgcctttgatgccaatgggctccccaactgcagcccccttctgcagccggtgctgcggctgtccccaacagtggagccctccagtactgtggtctccttggagtgggtggatgttcagccagctattgggaccaaggtctccgactatattctgcagcataagaaagtggatgaatacacagacactgacctgtacacaggagaattcctgagttttgctgatgacttactctctggcctgggcacatcttgtgtagcagctggtcgaagccatggagaggtccctgaagtcagtatctactcagtcatcttcaagtgtctggagcccgacggtctctacaagttcactctgtatgctgtggatacacgagggaggcactcagagctaagcacggtgaccctgaggacggcctgtccactggtagatgacaacaaggcagaagaaatagctgacaagatctacaatctgtacaatgggtacacaagtggaaaggagcagcagatggcctacaacacactgatggaggtctcagcctcgatgctgttccgagtccagcaccactacaactctcactatgaaaagtttggcgacttcgtctggagaagtgaggatgagctggggcccaggaaggcccacctgattctacggcgactggagagggtgagtagccactgctccagcctcctgcggagtgcctacatccagagccgcgtggaaacagtgccctatcttttctgccgcagcgaggaggtccggcctgcaggcatggtgtggtatagcatcctcaaggacaccaaaatcacgtgtgaggagaagatggtgtcaatggcccgaaacacgtacggggagtccaagggccggtgagggagggtattgccctccgtgagcacagagactctccatgggagggggagcagtattctcctggatcctggggcctgggtgggctgggggacagctgaggatgggcctagcagatgaagcttgccagcaaggccaaagcaaacggtttctcctgtggatagtggacagagacctttgtaaccaatggaattattcatttttctctatcttttattttttcaaagatattatttgactctatcaaaagtctctcctttttaaaccttttcttatggatggctgtcaatcccgaggcagaagttttcaggtggagaccaagcggcctttgctcttcttccttcttcctgccacactctgctttcttcctgccatggacccctggaggagacctatggagggacagttttgacctgacccctagaggagacagttttgacctcttcagcaccaggaaggaagctctgaggatggttgcagtgaggaagcatgggtctttaaggacttctctctcttttttgctggacattattgagtttgtgggaccctgcctcttcctgctacctgtgggtctgcccagagtccctgcaggcctgtccatgcattaaaaattcctattgtctctcttt

SEQ ID NO: 2560 - DNA, 1757 bp, Homo sapiens
  source 1..1757: mol_type = unassigned DNA
gcttgtcgtgcagctggccccaagcgcgcggggcaaggcggccctgcaggggtgagctttcctctgagaacccggggccttagcgacacgtaatccagttttccgtctccttggtgcagatgaagaaaccgacgcccatgggcgaaagggacctgctcaagttcactcaagaccacagagctgggcagcaagaaggagctcaagtccatgcccttcatcacctacctctcaggtttgctgacagcccagatgctgtcagatgaccagctcatttcaggtgtggagattcgctgtgaggagaaggggcgctgtccatctacctgtcacctttgccgccggccaggcaaggagcagctgagccccacaccagtgctgctggaaatcaaccgtgtggtgccactttataccctcatccaagacaatggcacaaaggaggccttcaagagtgcactgatgagttcctactggtgctcagggaaaggggatgtgatcgatgactggtgcaggtgtgacctcagcgcctttgatgccaatgggctccccaactgcagcccccttctgcagccggtgctgcggctgtccccaacagtggagccctccagtactgtggtctccttggagtgggtggatgttcagccagctattgggaccaaggtctccgactatattctgcagcataagaaagtggatgaatacacagacactgacctgtacacaggagaattcctgagttttgctgatgacttactctctggcctgggcacatcttgtgtagcagctggtcgaagccatggagaggtccctgaagtcagtatctactcagtcatcttcaagtgtctggagcccgacggtctctacaagttcactctgtatgctgtggatacacgagggaggcactcagagctaagcacggtgaccctgaggacggcctgtccactggtagatgacaacaaggcagaagaaatagctgacaagatctacaatctgtacaatgggtacacaagtggaaaggagcagcagatggcctacaacacactgatggaggtctcagcctcgatgctgttccgagtccagcaccactacaactctcactatgaaaagtttggcgacttcgtctggagaagtgaggatgagctggggcccaggaaggcccacctgattctacggcgactggagagggtgagtagccactgctccagcctcctgcggagtgcctacatccagagccgcgtggaaacagtgccctatcttttctgccgcagcgaggaggtccggcctgcaggcatggtgtggtatagcatcctcaaggacaccaaaatcacgtgtgaggagaagatggtgtcaatggcccgaaacacatattatttgactctatcaaaagtctctcctttttaaaccttttcttatggatggctgtcaatcccgaggcagaagttttcaggtggagaccaagcggcctttgctcttcttccttcttcctgccacactctgctttcttcctgccatggacccctggaggagacctatggagggacagttttgacctgacccctagaggagacagttttgacctcttcagcaccaggaaggaagctctgaggatggttgcagtgaggaagcatgggtctttaaggacttctctctcttttttgctggacattattgagtttgtgggaccctgcctcttcctgctacctgtgggtctgcccagagtccctgcaggcctgtccatgcattaaaaattcctattgtctctc

SEQ ID NO: 2561 - DNA, 3411 bp, Homo sapiens
  source 1..3411: mol_type = unassigned DNA
ctggccccaagcgcgcggggcaaggcggccctgcaggggtgagctttcctctgagaacccggggccttagcgacacgtaatccagttttccgtctccttggtgcagatgaagaaaccgacgcccatgggcgaaagggacctgctcaagttcactcaagaccacagagctgggcagcaagaaggagctcaagtccatgcccttcatcacctacctctcaggtttgctgacagcccagatgctgtcagatgaccagctcatttcaggtgtggagattcgctgtgaggagaaggggcgctgtccatctacctgtcacctttgccgccggccaggcaaggagcagctgagccccacaccagtgctgctggaaatcaaccgtgtggtgccactttataccctcatccaagacaatggcacaaaggaggccttcaagagtgcactgatgagttcctactggtgctcagggaaaggggatgtgatcgatgactggtgcaggtgtgacctcagcgcctttgatgccaatgggctccccaactgcagcccccttctgcagccggtgctgcggctgtccccaacagtggagccctccagtactgtggtctccttggagtgggtggatgttcagccagctattgggaccaaggtctccgactatattctgcagcataagaaagtggatgaatacacagacactgacctgtacacagtttattgctggattacatttattgatttgcggatattgaaccagccttgcatcccagggatgaagccaacttgattgtggtggataagctttttgatgtgctgctggatttggtttgccaatattttattgaagatttttgcatcgatgttcatcagggatattggtctaaaattctctttttttgttgtgtctctgccaggctttggtatcaggatgatgttggcctcataaaatgaattagggaggattccctctttttctattgatttgaatagtttcagaaggaatggtaccagctcatctttgtacctctggtagaattcggctgtgaatccatctggtcctggacttattttggttagtaggctattaattatggcctcaatttcagaacctgttattggtctattcagggattcaacttcttcctggtttagtcttgggaggaggctgtatgtgtccaggaatttatccatttcttctagattttctagtttatttgcatagaggtgtttatagtattctctaatggtagtttgtatttctgtgggatcggtggtgatatcccctttatcattttttattgcgtctatttgattcttctctcttttattctttatgagtcttgctagtagtctatcaattttgttgattttttcaaaaaaccagctcctggattcattgattttttgaagggtttttttttttttgtctctatctccttcagttctgctctcatcttagttatttcttgccttctgctagcttttgtgtgtttgctcttgcttctctagttcttttaattatgatgttagggtgtcagtttcagatctttcttgctttctcctgtgggcatttagtgctataaatctccctctacacactgctttaaatgtgtcccagagattctggtatgttgtgtcctgttctcattggtttcaaagaacatctttatttccgctttcatttcgttatgtacccagtagtcattcaggagcaagttgttcagtttccatgtagttgagcggttttgagtgagtttcttaatcctgagttctagtttgattgcactgtgttctgagagacagtttgttataatttctttcttttacatttgctgaggagtgctttacttcccactgtgtgatcaattttggaataactgcgatgtggtgctgagaagaatgtatattctgttgattggggtggatagttctgtagatgtctattaggtccgcttggtgcagagctgagttcaattcctggatatccttgttaactttctgtctcattgatctatctaatgttgacagtggggtgttaaagtctcccattattattgtgtgggagtctaagtctctttgtaagtctctaaggacttgctttatgaatctgggtgctcctatattgggtgcatatatatttaggatagttagctcgaagaaggtatcttctatttctagtctgctgcaaaggctctgttttgtttccattggaaacagatgttgaattttctgtgtctattaaaatgattgtatagtttatctctctaaatttgttaatatgataagtcacattgatagattttcatattataaaacaacctactatgtgagatttatcccaggaatgtgtaggttgttttatctgtttgttttaattaggatcattctggtctcacaaaatgaattataaaatattttctccttttcagttttctgaagtgtatctgtcttctcagagaatcactgtggttaaaattgatagtatttttttcttaatcattttttagaattcaccagtgaaggcatctgggcttagaccttttcttgcaagaaggtttttaactactaatttagttatttaatagatatagatttacttagattatctgtttcttcttgagtgatctttggcagcttgtgtgttttaaggaacttgttcattccatgtaaattatcaaatttattggaaaaagttgtttatgacattccgttactattcttttgaaatctgttgagattatagtgatattagtctcatcttgatattggtaatgtgtgtctcctctgttttttttctagatcagtttggctagatagctatgacatttatttgtattttcaaagaatcaactttcggttttatctgtttttgcttattgtttcctatttcattgatttatcctctaatttttattataattttctttgtttggcttactttgagtttggttttctccgcattttaatttttgaaatggtagctgaggctattgatttgagacctttcttgtaatgtagtcattccctcttaactactgctttagtagtatctcaaagattgtgttatgttgcgttttcattttcattcagttcaaagtatttccaatttcacttttgttttcttctttgacttatgagttatttagaggcatgccacttcgttttcaaatatttgggagttttttcagaaatttttgttgttgatttttgattccgctatagtcagaaaatatgtttttatgactttaaacattttaaatttattgagactagtttttggtctagatggtctattgctgtattcagtgttcactttaaaataatgtgtatccacttatttatgggtattttataaatgcctgttagataaaatcggttaattatgttattcaagtcttctggagcctttctgattttct

SEQ ID NO: 2562 - DNA, 4622 bp, Homo sapiens
  source 1..4622: mol_type = unassigned DNA
ggctctctccgctccttagctcgggcgtcctggttcgcttcggcgtccgccgtctccgcagctgcctcctcttcctccttcgccaccgccgccaccgccgccgccgcccgcagcaccgcagcccctcccgccatggccgccgccggcgcccggctcagccccggccccggctcggggctccgggggcggccgaggctctgcttccacccggggccgccgccactgctgccgctgctgctgctgttcctgctcctgctgccgccgccgccgctgctggccggcgccaccgccgctgcctcgcgggagcccgacagcccgtgccggctgaagaccgtcacggtgtccacactgcccgccctgcgggagagcgacatcggctggagcggcgcccgcgccggggccggggctgggaccggggccggagccgccgccgccgccgcgtccccgggctctcctggctctgccggcaccgccgccgagtcgcgcctcctgctctttgtgcgtaacgagctgccggggcgcatcgcggtgcaggacgacctggacaacaccgagctgcccttcttcaccctggagatgtctggcacagcagcggacatctcgctggtgcactggagacagcagtggctggagaatggcaccttgtacttccacgtctccatgagcagctccgggcagctggcccaagccaccgcccccactctccaggagccctcggagattgttgaggagcagatgcacatcctccacatttctgtgatgggtggcctcatcgcgctgctgctgctgctgctggtgttcaccgtggcgctgtacgcccagcgacgttggcagaagcgtcgccgcatcccccagaagagcgcaagcacagaagccactcatgagatccactacatcccatctgtgctgctgggtccccaggcgcgggagagcttccgttcatcccggctgcaaacccacaattccgtcattggcgtgcccatccgggagactcccatcctggatgactatgactgtgaggaggatgaggagccacctaggcgggccaaccatgtctcccgcgaggacgagtttggcagccaggtgacccacactctggacagtctgggacatccaggggaagagaaggtggactttgagaagaaaggaggaatcagctttgggagagccaaggggacgtcgggctcagaggcagacgatgaaactcagctgacattctacacggagcagtaccgcagtcgccgccgcagcaaaggtttgctgaaaagcccagtgaacaagacagccctgacactgattgctgtgagttcctgcatcctggccatggtgtgtggcagccagatgtcttgtccactcactgtgaaggtgactctgcatgtgcccgagcacttcatagcagatggaagcagcttcgtggtgagtgaagggagctacctggacatctccgactggttaaacccggccaagctttccctgtattaccagatcaatgccacctccccatgggtgagggacctctgtggacaaaggacgacagatgcctgtgagcagctctgcgacccagaaaccggagagtgcagctgtcatgaaggctatgcccctgaccctgttcacagacacctgtgtgtgcgcagtgactggggacagagtgaaggaccttggccctacacgacacttgagaggggctatgatctggtgacaggggagcaagcccctgaaaagattctcaggtctactttcagcttgggccaaggcctctggcttcctgtcagcaaaagctttgtggttccgcctgtggagctgtccatcaaccccctggccagctgcaagaccgatgtgctcgtcacggaagaccctgcagatgtcagggaagaagcgatgctgtccacatactttgaaaccatcaatgacctgctgtcttccttcgggccagttcgtgactgctctcggaacaatgggggctgcactcgcaacttcaagtgtgtgtctgaccggcaggtggattcctcgggatgtgtgtgccctgaggagctgaaacccatgaaggatggctctggctgctacgaccactccaaaggcattgactgctctgatggctttaatggcggctgtgagcagctgtgcctgcagcagacgctgcccctgccctacgatgccacttcgagcaccatcttcatgttctgcggttgcgtggaggagtacaaactggctcctgatggaaaatcctgcttaatgctctcagatgtctgcgagggccccaagtgcctcaaacctgactccaaattcaatgataccctctttggagagatgctacatggttacaacaaccggacccagcatgtgaaccaaggccaagtcttccagatgacctttagggagaacaacttcatcaaggactttccccagctggccgatgggctgttggtgatcccgctgccggtggaggagcagtgccggggggtcctctccgagccccttccagacctccaactgctcactggagatatcaggtatgatgaggccatgggttaccccatggtgcagcagtggcgggtccggagcaacctctaccgtgtgaagctcagcaccatcaccctcgcagcaggcttcactaatgttctcaagatcctgaccaaggagagcagtcgggaggagctgctgtccttcatccagcactatggctcccactacatcgcagaggccctctatggctcagagctcacctgcatcatccactttcccagcaagaaggtccagcagcagctgtggctccagtatcagaaagagaccacagagctgggcagcaagaaggagctcaagtccatgcccttcatcacctacctctcaggtttgctgacagcccagatgctgtcagatgaccagctcatttcaggtgtggagattcgctgtgaggagaaggggcgctgtccatctacctgtcacctttgccgccggccaggcaaggagcagctgagccccacaccagtgctgctggaaatcaaccgtgtggtgccactttataccctcatccaagacaatggcacaaaggaggccttcaagagtgcactgatgagttcctactggtgctcagggaaaggggatgtgatcgatgactggtgcaggtgtgacctcagcgcctttgatgccaatgggctccccaactgcagcccccttctgcagccggtgctgcggctgtccccaacagtggagccctccagtactgtggtctccttggagtgggtggatgttcagccagctattgggaccaaggtctccgactatattctgcagcataagaaagtggatgaatacacagacactgacctgtacacaggagaattcctgagttttgctgatgacttactctctggcctgggcacatcttgtgtagcagctggtcgaagccatggagaggtccctgaagtcagtatctactcagtcatcttcaagtgtctggagcccgacggtctctacaagttcactctgtatgctgtggatacacgagggaggcactcagagctaagcacggtgaccctgaggacggcctgtccactggtagatgacaacaaggcagaagaaatagctgacaagatctacaatctgtacaatgggtacacaagtggaaaggagcagcagatggcctacaacacactgatggaggtctcagcctcgatgctgttccgagtccagcaccactacaactctcactatgaaaagtttggcgacttcgtctggagaagtgaggatgagctggggcccaggaaggcccacctgattctacggcgactggagagggtgagtagccactgctccagcctcctgcggagtgcctacatccagagccgcgtggaaacagtgccctatcttttctgccgcagcgaggaggtccggcctgcaggcatggtgtggtatagcatcctcaaggacaccaaaatcacgtgtgaggagaagatggtgtcaatggcccgaaacacgtacggggagtccaagggccggtgagggagggtattgccctccgtgagcacagagactctccatgggagggggagcagtattctcctggatcctggggcctgggtgggctgggggacagctgaggatgggcctagcagatgaagcttgccagcaaggccaaagcaaacggtttctcctgtggatagtggacagagacctttgtaaccaatggaattattcatttttctctatcttttattttttcaaagatattatttgactctatcaaaagtctctcctttttaaaccttttcttatggatggctgtcaatcccgaggcagaagttttcaggtggagaccaagcggcctttgctcttcttccttcttcctgccacactctgctttcttcctgccatggacccctggaggagacctatggagggacagttttgacctgacccctagaggagacagttttgacctcttcagcaccaggaaggaagctctgaggatggttgcagtgaggaagcatgggtctttaaggacttctctctcttttttgctggacattattgagtttgtgggaccctgcctcttcctgctacctgtgggtctgcccagagtccctgcaggcctgtccatgcattaaaaattcctattgtctctc

SEQ ID NO: 2563 - DNA, 3980 bp, Homo sapiens
  source 1..3980: mol_type = unassigned DNA
ggttcgcttcggcgtccgccgtctccgcagctgcctcctcttcctccttcgccaccgccgccaccgccgccgccgcccgcagcaccgcagcccctcccgccatggccgccgccggcgcccggctcagccccggccccggctcggggctccgggggcggccgaggctctgcttccacccggggccgccgccactgctgccgctgctgctgctgttcctgctcctgctgccgccgccgccgctgctggccggcgccaccgccgctgcctcgcgggagcccgacagcccgtgccggctgaagaccgtcacggtgtccacactgcccgccctgcgggagagcgacatcggctggagcggcgcccgcgccggggccggggctgggaccggggccggagccgccgccgccgccgcgtccccgggctctcctggctctgccggcaccgccgccgagtcgcgcctcctgctctttgtgcgtaacgagctgccggggcgcatcgcggtgcaggacgacctggacaacaccgagctgcccttcttcaccctggagatgtctggcacagcagcggacatctcgctggtgcactggagacagcagtggctggagaatggcaccttgtacttccacgtctccatgagcagctccgggcagctggcccaagccaccgcccccactctccaggagccctcggagattgttgaggagcagatgcacatcctccacatttctgtgatgggtggcctcatcgcgctgctgctgctgctgctggtgttcaccgtggcgctgtacgcccagcgacgttggcagaagcgtcgccgcatcccccagaagagcgcaagcacagaagccactcatgagatccactacatcccatctgtgctgctgggtccccaggcgcgggagagcttccgttcatcccggctgcaaacccacaattccgtcattggcgtgcccatccgggagactcccatcctggatgactatgactgtgaggaggatgaggagccacctaggcgggccaaccatgtctcccgcgaggacgagtttggcagccaggtgacccacactctggacagtctgggacatccaggggaagagaaggtggactttgagaagaaaggaggaatcagctttgggagagccaaggggacgtcgggctcagaggcagacgatgaaactcagctgacattctacacggagcagtaccgcagtcgccgccgcagcaaaggtttgctgaaaagcccagtgaacaagacagccctgacactgattgctgtgagttcctgcatcctggccatggtgtgtggcagccagatgtcttgtccactcactgtgaaggtgactctgcatgtgcccgagcacttcatagcagatggaagcagcttcgtggtgagtgaagggagctacctggacatctccgactggttaaacccggccaagctttccctgtattaccagatcaatgccacctccccatgggtgagggacctctgtggacaaaggacgacagatgcctgtgagcagctctgcgacccagaaaccggagagtgcagctgtcatgaaggctatgcccctgaccctgttcacagacacctgtgtgtgcgcagtgactggggacagagtgaaggaccttggccctacacgacacttgagaggggctatgatctggtgacaggggagcaagcccctgaaaagattctcaggtctactttcagcttgggccaaggcctctggcttcctgtcagcaaaagctttgtggttccgcctgtggagctgtccatcaaccccctggccagctgcaagaccgatgtgctcgtcacggaagaccctgcagatgtcagggaagaagcgatgctgtccacatactttgaaaccatcaatgacctgctgtcttccttcgggccagttcgtgactgctctcggaacaatgggggctgcactcgcaacttcaagtgtgtgtctgaccggcaggtggattcctcgggatgtgtgtgccctgaggagctgaaacccatgaaggatggctctggctgctacgaccactccaaaggcattgactgctctgatggctttaatggcggctgtgagcagctgtgcctgcagcagacgctgcccctgccctacgatgccacttcgagcaccatcttcatgttctgcggttgcgtggaggagtacaaactggctcctgatggaaaatcctgcttaatgctctcagatgtctgcgagggccccaagtgcctcaaacctgactccaaattcaatgataccctctttggagagatgctacatggttacaacaaccggacccagcatgtgaaccaaggccaagtcttccagatgacctttagggagaacaacttcatcaaggactttccccagctggccgatgggctgttggtgatcccgctgccggtggaggagcagtgccggggggtcctctccgagccccttccagacctccaactgctcactggagatatcaggtatgatgaggccatgggttaccccatggtgcagcagtggcgggtccggagcaacctctaccgtgtgaagctcagcaccatcaccctcgcagcaggcttcactaatgttctcaagatcctgaccaaggagagcagtcgggaggagctgctgtccttcatccagcactatggctcccactacatcgcagaggccctctatggctcagagctcacctgcatcatccactttcccagcaagaaggtccagcagcagctgtggctccagtatcagaaagagaccacagagctgggcagcaagaaggagctcaagtccatgcccttcatcacctacctctcaggtttgctgacagcccagatgctgtcagatgaccagctcatttcaggtgtggagattcgctgtgaggagaaggggcgctgtccatctacctgtcacctttgccgccggccaggcaaggagcagctgagccccacaccagtgctgctggaaatcaaccgtgtggtgccactttataccctcatccaagacaatggcacaaaggaggccttcaagagtgcactgatgagttcctactggtgctcagggaaaggggatgtgatcgatgactggtgcaggtgtgacctcagcgcctttgatgccaatgggctccccaactgcagcccccttctgcagccggtgctgcggctgtccccaacagtggagccctccagtactgtggtctccttggagtgggtggatgttcagccagctattgggaccaaggtctccgactatattctgcagcataagaaagtggatgaatacacagacactgacctgtacacaggagaattcctgagttttgctgatgacttactctctggcctgggcacatcttgtgtagcagctggtcgaagccatggagaggtccctgaagtcagtatctactcagtcatcttcaagtgtctggagcccgacggtctctacaagttcactctgtatgctgtggatacacgagggaggcactcagagctaagcacggtgaccctgaggacggcctgtccactggtagatgacaacaaggcagaagaaatagctgacaagatctacaatctgtacaatgggtacacaagtggaaaggagcagcagatggcctacaacacactgatggaggtctcagcctcgatgctgttccgagtccagcaccactacaactctcactatgaaaagtttggcgacttcgtctggagaagtgaggatgagctggggcccaggaaggcccacctgattctacggcgactggagagggtgagtagccactgctccagcctcctgcggagtgcctacatccagagccgcgtggaaacagtgccctatcttttctgccgcagcgaggaggtccggcctgcaggcatggtgtggtatagcatcctcaaggacaccaaaatcacgtgtgaggagaagatggtgtcaatggcccgaaacacatattatttgactctatcaaaagtctctcctttttaa

SEQ ID NO: 2564 - DNA, 4634 bp, Homo sapiens
  source 1..4634: mol_type = unassigned DNA
atggccgccgccggcgcccggctcagccccggccccggctcggggctccgggggcggccgaggctctgcttccacccggggccgccgccactgctgccgctgctgctgctgttcctgctcctgctgccgccgccgccgctgctggccggcgccaccgccgctgcctcgcgggagcccgacagcccgtgccggctgaagaccgtcacggtgtccacactgcccgccctgcgggagagcgacatcggctggagcggcgcccgcgccggggccggggctgggaccggggccggagccgccgccgccgccgcgtccccgggctctcctggctctgccggcaccgccgccgagtcgcgcctcctgctctttgtgcgtaacgagctgccggggcgcatcgcggtgcaggacgacctggacaacaccgagctgcccttcttcaccctggagatgtctggcacagcagcggacatctcgctggtgcactggagacagcagtggctggagaatggcaccttgtacttccacgtctccatgagcagctccgggcagctggcccaagccaccgcccccactctccaggagccctcggagattgttgaggagcagatgcacatcctccacatttctgtgatgggtggcctcatcgcgctgctgctgctgctgctggtgttcaccgtggcgctgtacgcccagcgacgttggcagaagcgtcgccgcatcccccagaagagcgcaagcacagaagccactcatgagatccactacatcccatctgtgctgctgggtccccaggcgcgggagagcttccgttcatcccggctgcaaacccacaattccgtcattggcgtgcccatccgggagactcccatcctggatgactatgactgtgaggaggatgaggagccacctaggcgggccaaccatgtctcccgcgaggacgagtttggcagccaggtgacccacactctggacagtctgggacatccaggggaagagaaggtggactttgagaagaaagcagcagctgaggcgactcaggagacagtggagtccctgatgcagaagttcaaggagagtttccgcgctaacacgcccatcgagatcggtcagctgcaaccacccctgcgcagcacatcggcagggaagaggaagcggaggagcaagtctcgaggaggaatcagctttgggagagccaaggggacgtcgggctcagaggcagacgatgaaactcagctgacattctacacggagcagtaccgcagtcgccgccgcagcaaaggtttgctgaaaagcccagtgaacaagacagccctgacactgattgctgtgagttcctgcatcctggccatggtgtgtggcagccagatgtcttgtccactcactgtgaaggtgactctgcatgtgcccgagcacttcatagcagatggaagcagcttcgtggtgagtgaagggagctacctggacatctccgactggttaaacccggccaagctttccctgtattaccagatcaatgccacctccccatgggtgagggacctctgtggacaaaggacgacagatgcctgtgagcagctctgcgacccagaaaccggagagtgcagctgtcatgaaggctatgcccctgaccctgttcacagacacctgtgtgtgcgcagtgactggggacagagtgaaggaccttggccctacacgacacttgagaggggctatgatctggtgacaggggagcaagcccctgaaaagattctcagcttgggccaaggcctctggcttcctgtcagcaaaagctttgtggttccgcctgtggagctgtccatcaaccccctggccagctgcaagaccgatgtgctcgtcacggaagaccctgcagatgtcagggaagaagcgatgctgtccacatactttgaaaccatcaatgacctgctgtcttccttcgggccagttcgtgactgctctcggaacaatgggggctgcactcgcaacttcaagtgtgtgtctgaccggcaggtggattcctcgggatgtgtgtgccctgaggagctgaaacccatgaaggatggctctggctgctacgaccactccaaaggcattgactgctctgatggctttaatggcggctgtgagcagctgtgcctgcagcagacgctgcccctgccctacgatgccacttcgagcaccatcttcatgttctgcggttgcgtggaggagtacaaactggctcctgatggaaaatcctgcttaatgctctcagatgtctgcgagggccccaagtgcctcaaacctgactccaaattcaatgataccctctttggagagatgctacatggttacaacaaccggacccagcatgtgaaccaaggccaagtcttccagatgacctttagggagaacaacttcatcaaggactttccccagctggccgatgggctgttggtgatcccgctgccggtggaggagcagtgccggggggtcctctccgagccccttccagacctccaactgctcactggagatatcaggtatgatgaggccatgggttaccccatggtgcagcagtggcgggtccggagcaacctctaccgtgtgaagctcagcaccatcaccctcgcagcaggcttcactaatgttctcaagatcctgaccaaggagagcagtcgggaggagctgctgtccttcatccagcactatggctcccactacatcgcagaggccctctatggctcagagctcacctgcatcatccactttcccagcaagaaggtccagcagcagctgtggctccagtatcagaaagagaccacagagctgggcagcaagaaggagctcaagtccatgcccttcatcacctacctctcaggtttgctgacagcccagatgctgtcagatgaccagctcatttcaggtgtggagattcgctgtgaggagaaggggcgctgtccatctacctgtcacctttgccgccggccaggcaaggagcagctgagccccacaccagtgctgctggaaatcaaccgtgtggtgccactttataccctcatccaagacaatggcacaaaggaggccttcaagagtgcactgatgagttcctactggtgctcagggaaaggggatgtgatcgatgactggtgcaggtgtgacctcagcgcctttgatgccaatgggctccccaactgcagcccccttctgcagccggtgctgcggctgtccccaacagtggagccctccagtactgtggtctccttggagtgggtggatgttcagccagctattgggaccaaggtctccgactatattctgcagcataagaaagtggatgaatacacagacactgacctgtacacaggagaattcctgagttttgctgatgacttactctctggcctgggcacatcttgtgtagcagctggtcgaagccatggagaggtccctgaagtcagtatctactcagtcatcttcaagtgtctggagcccgacggtctctacaagttcactctgtatgctgtggatacacgagggaggcactcagagctaagcacggtgaccctgaggacggcctgtccactggtagatgacaacaaggcagaagaaatagctgacaagatctacaatctgtacaatgggtacacaagtggaaaggagcagcagatggcctacaacacactgatggaggtctcagcctcgatgctgttccgagtccagcaccactacaactctcactatgaaaagtttggcgacttcgtctggagaagtgaggatgagctggggcccaggaaggcccacctgattctacggcgactggagagggtgagtagccactgctccagcctcctgcggagtgcctacatccagagccgcgtggaaacagtgccctatcttttctgccgcagcgaggaggtccggcctgcaggcatggtgtggtatagcatcctcaaggacaccaaaatcacgtgtgaggagaagatggtgtcaatggcccgaaacacgtacggggagtccaagggccggtgagggagggtattgccctccgtgagcacagagactctccatgggagggggagcagtattctcctggatcctggggcctgggtgggctgggggacagctgaggatgggcctagcagatgaagcttgccagcaaggccaaagcaaacggtttctcctgtggatagtggacagagacctttgtaaccaatggaattattcatttttctctatcttttattttttcaaagatattatttgactctatcaaaagtctctcctttttaaaccttttcttatggatggctgtcaatcccgaggcagaagttttcaggtggagaccaagcggcctttgctcttcttccttcttcctgccacactctgctttcttcctgccatggacccctggaggagacctatggagggacagttttgacctgacccctagaggagacagttttgacctcttcagcaccaggaaggaagctctgaggatggttgcagtgaggaagcatgggtctttaaggacttctctctcttttttgctggacattattgagtttgtgggaccctgcctcttcctgctacctgtgggtctgcccagagtccctgcaggcctgtccatgcattaaaaattcctattgtctctcttt

SEQ ID NO: 2565 - DNA, 395 bp, Homo sapiens
  source 1..395: mol_type = unassigned DNA
agatggcctacaacacactgatggaggtctcagcctcgatgctgttccgagtccagcaccactacaactctcactatgaaaagtttggcgacttcgtctggagaagtgaggatgagctggggcccagcctcctggaatcctttatgagcctccaggacataaatcttctggaaaggcggccgggccgcccacagaggccaggcaatccactcagtaatgtctcctggaggatatctgagattgctccaacatcccacactgatatgtcagcaggaatcaaggaaactgcctcctaatctatcctggtgctgctaataagctcactgtgcaaccctgggctctgccgctttctggccctcagtctcctcacctataacatgataaggacgaactag

SEQ ID NO: 2566 - DNA, 8633 bp, Homo sapiens
  source 1..8633: mol_type = unassigned DNA
tggggctcgagggggcgagcggtggcggtggcgggtacggcaggctcgcgggcgccgggcttcgttacataatctcggaccggaggagcggcggcacatggcggcggagcggcgctgtggaagtatgcgagacttaagagctcaagtgactagtggtctcctgccatttccagaagtgactcttcaagcccttggagaagacgaaataacattagaatctgtgcttcgtggaaagtttgctgcagggaaaaatggacttgcttgcttggcttgtggtccacaacttgaggtagtaaactctataacaggagagcgattgtctgcttacagattcagtggagtcaatgaacagcctcctgtagttttagctgtgaaagaattctcttggcagaagagaactggattattaataggattggaagaaacagaagggagtgttctctgtctttatgaccttggaatatcaaaagtagttaaagcagttgttcttcctggaagggtaacagctattgaacctataattaatcatggaggagccagtgcaagcactcagcatttacatccaagtctgcgatggctttttggagtggcagctgtggtcactgatgttggacagatccttcttgttgacctatgtttggatgacttgtcatgcaatcaaaatgaagttgaagcatcagatcttgaagttctaactggtatcccagctgaagtaccacacattagagaaagtgtaatgagacaagggcgccatctgtgtttccagttagtaagtccaacaggaacagctgtttcaactcttagttacataagcaggacaaatcagcttgctgtaggtttttctgatggctatctagcactttggaacatgaaaagcatgaaaagagaatattacatacaattggaaagtggacaagttcctgtatatgctgtcacttttcaagaacctgagaatgatcctcggaattgctgttacttgtgggctgttcagtctacacaagatagtgaaggggatgttttgagtttgcatctgctgcagctggcctttggtaatagaaagtgtttggcatcaggacaaatcttatatgaggggttagaatactgtgaagaaagatacaccctggacctgacaggtggcatgttccctttgaggggacagacgagtaataccaaattgttgggatgccagagtatagagaaatttcgatctcatggtgacagggaggaaggcgtgaatgaagctctatcgcctgacactagtgtttcagtctttacctggcaggtgaatatatatggacagggaaagccttctgtatatttggggctttttgatataaatcgttggtatcatgcacaaatgccagattcgttaaggtcaggagaatatctacataattgctcttattttgcactgtggtcattggagtctgttgtaagtaggacttctccacatggcatcttggatatattagtacatgagagaagtttaaatagaggagtccctccttcatatccacctcccgagcagttttttaatccaagcacttataattttgatgccacttgtttgttaaactcgggagttgttcatttaacttgtactggctttcagaaggagactttgacttttttaaagaaatcaggtccatcactcaatgaactcattcctgatggttataatcgatgtcttgtagctggccttctttccccaagatttgttgatgttcagccttccagtttaagccaagaagaacagttagaagctatattgtcagcagcaattcagactagttccctgggacttttgactggttatatccgaagatggataacagaagaacaaccaaattctgccactaatttgcgctttgttcttgaatggacgtggaataaagtggttctcacaaaagaggaatttgacagactatgtgtgccattatttgatggttcgtgtcatttcatggatccacaaactatacagtctatccagcaatgctatttgcttcttagcaatcttaatatagtcttgagctgttttgcatcagaagcccgagagatcactgagagaggactgatagacttaagcaataagtttgtggtttcccacctcatctgtcagtatgcacaagtggttctttggttctctcattctgggcttttaccagaaggcatagatgattctgtgcagttgtcaaggttatgctacaactaccctgtaattcagaactactacaccagtcgtcgacagaagtttgagcgtttatcaagagggaagtggaatcccgattgcttgatgattgatggactggtttctcagttaggagagcgaattgagaagttgtggaaacgagatgaaggaggcacaggaaaatatcctcctgctagtctgcatgcagtacttgatatgtacctattagacggcgttactgaagcagccaaacactctattaccatttatttgctacttgatattatgtattcctttcccaacaaaacagacactcccattgaatctttcccaactgtatttgccatttcttggggccaagttaaacttattcaggggttttggttgatagatcataatgactatgagagtggtttggatcttttgtttcatccagctactgcaaaacctttgtcatggcaacattcaaagattattcaggcattcatgagtcagggcgagcacagacaagccctcagatatattcagacaatgaagccaacagtgtccagtggtaacgatgttatccttcacctcactgttttgctttttaataggtgtatggttgaagcctggaattttttgcggcaacattgcaataggttgaatatagaggagttactgaagcacatgtatgaagtctgtcaggaaatgggcttgatggaagatttactgaagttaccatttacagacactgagcaggaatgtttagtgaaatttttgcagtccagtgccagcgttcagaatcatgaattccttttagtgcaccatttgcagcgtgccaattatgtgcctgccttgaagctgaaccaaactctgaagattaatgttatgaatgatcgtgatcctcgtttgcgggagagatcactggctcgaaattctatattagaccagtatggaaaaatccttcctagagtccatcgaaaattagccattgaacgagctaagccttatcatctgtcaacatcatcagtttttcgattagtttctagacccaaaccattatcagcagttccaaagcaagttgtaacaggaactgtgttgacaagatctgttttcatcaacaatgtgttatctaaaattggagaagtttgggcaagcaaagaacctataaatagcaccacacctttcaatagttctaaaatagaagaaccatctcctatagtgtattcgctcccagctccagagctgcctgaggcattttttggaacaccaatttcaaaagcatcacaaaaaatttctagactgctagatttggttgttcagcctgtcccccggccttctcagtgttcggagtttattcagcaaagctccatgaaatctcctttgtacctagtatcccgttcactgccctcaagttcgcaattaaaaggatcgcctcaggccatctccagggcttcagaattacatttgcttgaaactcctcttgtagttaagaaagctaaaagtttggccatgtcagttactacttctggattttctgagttcactcctcagtccatcctgaggtctactcttcgatcaacacctttagcatctccctctccatcacctggaaggtctcctcaacgacttaaagaaactagaatttcatttgtggaagaagatgtccacccaaaatggattcctggggctgcagatgatagcaaattagaagtatttactacacctaaaaaatgtgcagttccagtggaaactgaatggctgaagagcaaagataggaccacatcttttttcctgaacagccctgaaaaggagcatcaagaaatggatgaggggtcacaaagtttagagaaactggatgtgagcaaaggaaacagcagtgtttcaatcacatccgatgagactaccttagagtatcaggatgcaccgtcaccggaagaccttgaagagactgttttcacggcctctaagcccaaaagctcttccactgcactaactactaatgtaactgaacaaactgaaaaggatggagataaagatgtatttgcatcagaagtaactccttcagacctacagaaacaaatgggcaatttagaagatgcagaaacaaaggatctcttagttgcagcagaggcattttcagaattgaatcacttaagcccggttcaaggaactgaagcttctctttgtgcaccatcagtctatgaagggaaaatcttcacccagaagtccaaggtaccagtgttggacgaaggattaacatctgttgaaacctacacccctgcaattagagcaaatgacaataaatctatggctgatgtccttggtgatggtggaaactcctcgctcactatctctgaaggtcctattgtctctgagcgcaggcttaaccaggaagtagcgctgaacttaaaagaagatcatgaagtagaagttggtgtactaaaagaaagtgttgacttaccagaagaaaagcttccaatttctgacagccctcctgatactcaagaaattcatgtgattgaacaagaaaagcttgaagctcaagattcaggagaagaggctaggaatctttcatttaatgagttatatccctctggaacacttaagcttcagtacaattttgatactattgaccaacagttttgtgacttagctgataacaaagacactgctgaatgtgacattgctgaagtagatggggaactttttgtggctcaaagcaactttaccttgatattggaaggtgaagaaggagaagttgagccaggtgattttgcatcatctgatgtgttacctaaagcagctaacacagcaactgaagaaaaacttgtatgcagtggggaaaatgataatcatggacaaattgcaaatttgccatctgccgtaactagtgaccaaaagtcccaaaaagtagacactttaccatatgtgcctgaacctattaaagtagcaattgcagaaaatttactagatgtaattaaagacacaagaagtaaagaaattacttcagatacaatggaacagtccattcatgaaacaatacctttagtgagccaaaacataatgtgtcccactaaattggtcaaatctgcatttaagactgctcaggaaacaagcacaatgactatgaatgtcagccaggttgatgacgtggtttcctccaaaactcgtacgagaggtcaacgtatccaaaacgtgaatgtcaaatcagcacaacaggaagcatcagcagatgttgctactcctaagatgccagggcagtcagtcaggaagaaaactaggaaggcaaaagaaatttctgaagcttctgaaaacatctattctgatgtcagaggactatctcagaaccagcaaatacctcaaaattctgttacgcctaggagaggaaggagaaagaaagaagttaatcaggacatactagaaaacaccagttctgtggaacaagaattacagatcactacaggtagggaatcaaaaagattaaaatcatctcagctgttggaaccagcagttgaagaaactactaaaaaagaagttaaggtttcatctgttacaaaaaggactcctagaagaattaaaagatctgtagaaaatcaggaaagtgttgaaattataaatgatctaaaagttagtacggtaacaagtcctagcagaatgatcagaaaattgagaagtactaatttagatgcttctgaaaatacaggaaataagcaagatgataaatccagtgacaagcagctgcgtattaaacatgttagaagggtcagagggagagaagttagtccatcagatgtgagagaagactccaaccttgagtcatctcagttgactgttcaagcagaatttgatatgtctgccatacctagaaaacgtggtagaccaagaaaaatcaatccatctgaagatgtaggatctaaggctgttaaggaagagagaagccccaagaagaaagaagctcccagcattagaaggagatctacaagaaataccccagctaaaagtgaaaatgttgatgttggaaaaccagctttaggaaaatccattttagtgccaaacgaggaactttcgatggtgatgagctctaagaaaaaacttacaaaaaagactgaaagtcaaagccaaaaacgttcattgcactcagtatcagaagaacgcacagatgaaatgacacataaagaaacaaatgagcaggaagaaagattgctcgccacagcttccttcactaaatcatcccgcagcagcaggactcggtctagcaaggccatcttgttgccggacctttctgaaccaaacaatgagcctttattttctccagcgtcagaagttccaaggaaagcaaaagctaaaaaaatagaggttcctgcacagctgaaagaattagtttcggatttatcttctcagtttgtcatctcacctcctgctttaaggagcagacaaaaaaacacatccaataagaacaagcttgaagatgaactgaaagatgatgcacaatcagtagaaactctgggaaagccaaaagcgaaacgaatcaggacgtcaaaaacaaaacaagcaagcaaaaacacagaaaaagaaagtgcttggtcacctcctcccatagaaattcggctgatttcccccttggctagcccagctgacggagtcaagagcaaaccaagaaaaactacagaagtgacaggaacaggtcttggaaggaacagaaagaaactgtcttcctatccaaagcaaattttacgcagaaaaatgctgtaatttcttgggaagattttaatgtacacctatttgtaaagtcatcagaatagtgtggattattaaatatctagtttggaagaaaataatttatataaattattgtaaatttttatgtaaacagaaggtcttcaataagtaaagtaactccatatggagtgattgtttcagtccaggcaatttttctattttatattaagacttcatacatttatatatgtaaatatggcttattaatggaatgttaaataaaatgtatacttcacagtcgtttgtgtcttggatttttgaaagggaggggatatctgtttaaatagttttatatgctcattggtctcattttctctataattaaaatactagaccagtcttaaaatggggatgattgaagtattgatatttctttttacagttactattttataatttatgcactttgattctgtgattcagatttctaatcagaaaatgtatttttttgtttttggctgttactatgttaaaattgaattatgggcatgtcattttgccatctttgtagtttcacaaattttgtgtaatctacctcaaatgaataatccaagtattggttaactataatgttggcatctcttattcggcaagcttaaaggctctttaaagtcttaattagtcaaagactaatccaggttagattgaccggttcactgctcacttgcaaccttatcaaagggtttgacaaagggaaatgtaaaataaatctgtttatggatattgagtgcatcttgtatgtgcctaatattgataggatgagatgtctgaacaaatttttataatattgctgtgaaggagcttgctattgaaccacagaaatcccttaatattcaggttttaaaactggcaaattctcacaggacctcaggcacagattattgaggttgggagagagtgagtagatgtagaaaaggagaaaaacaacacacgccctgttctctacagtacaactgtgtgcaattaagcaatggtacttgatgtaggctctaacactcatcaataaataagtgttgtaaaataatttataacaggtaatcgatagtgtgtaatgaatggactattaataattgattatctagaaacgaactgctttcgtgggcttttaatattttaatgtgaagcatatgcagtgtgctttctgcatttatttttctaccaaataatacagataatgagaaattggtgaaaatgcctacgcaaagtgttgacagtgtgaaagcagtgcgagtgcggccttttagtcaggttagtgatggatgttacgctgccttgttgaaaatttcactgactttgattttattacttttttaatgatagttatcaaacttgtatttaagctgcttgtcatttatggaatattgaacttatttaaatgaacttgttaaatgaataaagagctaaacataattcagtaaacaattcctttgcgcaagtagcacaataaacatggatgcaacgtatgtcaagttaatacttttttaaaccaacgcaatttggtgaatatagatgtgtggtacctgtttttaataagtgtactttttttcccccctccgtgaatgtagatcataagcaaacaaattgcctgttctaaatgaactttacatatattttaaatgaatgtatgtacttacgtataaatgtctttatatagcttgaataaaaacactgctcattaaaa

SEQ ID NO: 2567 - DNA, 8751 bp, Homo sapiens
  source 1..8751: mol_type = unassigned DNA
tcgttacataatctcggaccggaggagcggcggcacatggcggcggagcggcgctggtggttcgcgtcctgcgccggcagtcgggtccctttacggacggccggggccgcgaccctttcccactgttctcccacgcgatggactcgttggcgggcctttccccgagggaagcggccggcgtgctgagcctgtcctgtgttggcgtgtgttccacatgcgcttgggcctggccacatggaagtatgcgagacttaagagctcaagtgactagtggtctcctgccatttccagaagtgactcttcaagcccttggagaagacgaaataacattagaatctgtgcttcgtggaaagtttgctgcagggaaaaatggacttgcttgcttggcttgtggtccacaacttgaggtagtaaactctataacaggagagcgattgtctgcttacagattcagtggagtcaatgaacagcctcctgtagttttagctgtgaaagaattctcttggcagaagagaactggattattaataggattggaagaaacagaagggagtgttctctgtctttatgaccttggaatatcaaaagtagttaaagcagttgttcttcctggaagggtaacagctattgaacctataattaatcatggaggagccagtgcaagcactcagcatttacatccaagtctgcgatggctttttggagtggcagctgtggtcactgatgttggacagatccttcttgttgacctatgtttggatgacttgtcatgcaatcaaaatgaagttgaagcatcagatcttgaagttctaactggtatcccagctgaagtaccacacattagagaaagtgtaatgagacaagggcgccatctgtgtttccagttagtaagtccaacaggaacagctgtttcaactcttagttacataagcaggacaaatcagcttgctgtaggtttttctgatggctatctagcactttggaacatgaaaagcatgaaaagagaatattacatacaattggaaagtggacaagttcctgtatatgctgtcacttttcaagaacctgagaatgatcctcggaattgctgttacttgtgggctgttcagtctacacaagatagtgaaggggatgttttgagtttgcatctgctgcagctggcctttggtaatagaaagtgtttggcatcaggacaaatcttatatgaggggttagaatactgtgaagaaagatacaccctggacctgacaggtggcatgttccctttgaggggacagacgagtaataccaaattgttgggatgccagagtatagagaaatttcgatctcatggtgacagggaggaaggcgtgaatgaagctctatcgcctgacactagtgtttcagtctttacctggcaggtgaatatatatggacagggaaagccttctgtatatttggggctttttgatataaatcgttggtatcatgcacaaatgccagattcgttaaggtcaggagaatatctacataattgctcttattttgcactgtggtcattggagtctgttgtaagtaggacttctccacatggcatcttggatatattagtacatgagagaagtttaaatagaggagtccctccttcatatccacctcccgagcagttttttaatccaagcacttataattttgatgccacttgtttgttaaactcgggagttgttcatttaacttgtactggctttcagaaggagactttgacttttttaaagaaatcaggtccatcactcaatgaactcattcctgatggttataatcgatgtcttgtagctggccttctttccccaagatttgttgatgttcagccttccagtttaagccaagaagaacagttagaagctatattgtcagcagcaattcagactagttccctgggacttttgactggttatatccgaagatggataacagaagaacaaccaaattctgccactaatttgcgctttgttcttgaatggacgtggaataaagtggttctcacaaaagaggaatttgacagactatgtgtgccattatttgatggttcgtgtcatttcatggatccacaaactatacagtctatccagcaatgctatttgcttcttagcaatcttaatatagtcttgagctgttttgcatcagaagcccgagagatcactgagagaggactgatagacttaagcaataagtttgtggtttcccacctcatctgtcagtatgcacaagtggttctttggttctctcattctgggcttttaccagaaggcatagatgattctgtgcagttgtcaaggttatgctacaactaccctgtaattcagaactactacaccagtcgtcgacagaagtttgagcgtttatcaagagggaagtggaatcccgattgcttgatgattgatggactggtttctcagttaggagagcgaattgagaagttgtggaaacgagatgaaggaggcacaggaaaatatcctcctgctagtctgcatgcagtacttgatatgtacctattagacggcgttactgaagcagccaaacactctattaccatttatttgctacttgatattatgtattcctttcccaacaaaacagacactcccattgaatctttcccaactgtatttgccatttcttggggccaagttaaacttattcaggggttttggttgatagatcataatgactatgagagtggtttggatcttttgtttcatccagctactgcaaaacctttgtcatggcaacattcaaagattattcaggcattcatgagtcagggcgagcacagacaagccctcagatatattcagacaatgaagccaacagtgtccagtggtaacgatgttatccttcacctcactgttttgctttttaataggtgtatggttgaagcctggaattttttgcggcaacattgcaataggttgaatatagaggagttactgaagcacatgtatgaagtctgtcaggaaatgggcttgatggaagatttactgaagttaccatttacagacactgagcaggaatgtttagtgaaatttttgcagtccagtgccagcgttcagaatcatgaattccttttagtgcaccatttgcagcgtgccaattatgtgcctgccttgaagctgaaccaaactctgaagattaatgttatgaatgatcgtgatcctcgtttgcgggagagatcactggctcgaaattctatattagaccagtatggaaaaatccttcctagagtccatcgaaaattagccattgaacgagctaagccttatcatctgtcaacatcatcagtttttcgattagtttctagacccaaaccattatcagcagttccaaagcaagttgtaacaggaactgtgttgacaagatctgttttcatcaacaatgtgttatctaaaattggagaagtttgggcaagcaaagaacctataaatagcaccacacctttcaatagttctaaaatagaagaaccatctcctatagtgtattcgctcccagctccagagctgcctgaggcattttttggaacaccaatttcaaaagcatcacaaaaaatttctagactgctagatttggttgttcagcctgtcccccggccttctcagtgttcggagtttattcagcaaagctccatgaaatctcctttgtacctagtatcccgttcactgccctcaagttcgcaattaaaaggatcgcctcaggccatctccagggcttcagaattacatttgcttgaaactcctcttgtagttaagaaagctaaaagtttggccatgtcagttactacttctggattttctgagttcactcctcagtccatcctgaggtctactcttcgatcaacacctttagcatctccctctccatcacctggaaggtctcctcaacgacttaaagaaactagaatttcatttgtggaagaagatgtccacccaaaatggattcctggggctgcagatgatagcaaattagaagtatttactacacctaaaaaatgtgcagttccagtggaaactgaatggctgaagagcaaagataggaccacatcttttttcctgaacagccctgaaaaggagcatcaagaaatggatgaggggtcacaaagtttagagaaactggatgtgagcaaaggaaacagcagtgtttcaatcacatccgatgagactaccttagagtatcaggatgcaccgtcaccggaagaccttgaagagactgttttcacggcctctaagcccaaaagctcttccactgcactaactactaatgtaactgaacaaactgaaaaggatggagataaagatgtatttgcatcagaagtaactccttcagacctacagaaacaaatgggcaatttagaagatgcagaaacaaaggatctcttagttgcagcagaggcattttcagaattgaatcacttaagcccggttcaaggaactgaagcttctctttgtgcaccatcagtctatgaagggaaaatcttcacccagaagtccaaggtaccagtgttggacgaaggattaacatctgttgaaacctacacccctgcaattagagcaaatgacaataaatctatggctgatgtccttggtgatggtggaaactcctcgctcactatctctgaaggtcctattgtctctgagcgcaggcttaaccaggaagtagcgctgaacttaaaagaagatcatgaagtagaagttggtgtactaaaagaaagtgttgacttaccagaagaaaagcttccaatttctgacagccctcctgatactcaagaaattcatgtgattgaacaagaaaagcttgaagctcaagattcaggagaagaggctaggaatctttcatttaatgagttatatccctctggaacacttaagcttcagtacaattttgatactattgaccaacagttttgtgacttagctgataacaaagacactgctgaatgtgacattgctgaagtagatggggaactttttgtggctcaaagcaactttaccttgatattggaaggtgaagaaggagaagttgagccaggtgattttgcatcatctgatgtgttacctaaagcagctaacacagcaactgaagaaaaacttgtatgcagtggggaaaatgataatcatggacaaattgcaaatttgccatctgccgtaactagtgaccaaaagtcccaaaaagtagacactttaccatatgtgcctgaacctattaaagtagcaattgcagaaaatttactagatgtaattaaagacacaagaagtaaagaaattacttcagatacaatggaacagtccattcatgaaacaatacctttagtgagccaaaacataatgtgtcccactaaattggtcaaatctgcatttaagactgctcaggaaacaagcacaatgactatgaatgtcagccaggttgatgacgtggtttcctccaaaactcgtacgagaggtcaacgtatccaaaacgtgaatgtcaaatcagcacaacaggaagcatcagcagatgttgctactcctaagatgccagggcagtcagtcaggaagaaaactaggaaggcaaaagaaatttctgaagcttctgaaaacatctattctgatgtcagaggactatctcagaaccagcaaatacctcaaaattctgttacgcctaggagaggaaggagaaagaaagaagttaatcaggacatactagaaaacaccagttctgtggaacaagaattacagatcactacaggtagggaatcaaaaagattaaaatcatctcagctgttggaaccagcagttgaagaaactactaaaaaagaagttaaggtttcatctgttacaaaaaggactcctagaagaattaaaagatctgtagaaaatcaggaaagtgttgaaattataaatgatctaaaagttagtacggtaacaagtcctagcagaatgatcagaaaattgagaagtactaatttagatgcttctgaaaatacaggaaataagcaagatgataaatccagtgacaagcagctgcgtattaaacatgttagaagggtcagagggagagaagttagtccatcagatgtgagagaagactccaaccttgagtcatctcagttgactgttcaagcagaatttgatatgtctgccatacctagaaaacgtggtagaccaagaaaaatcaatccatctgaagatgtaggatctaaggctgttaaggaagagagaagccccaagaagaaagaagctcccagcattagaaggagatctacaagaaataccccagctaaaagtgaaaatgttgatgttggaaaaccagctttaggaaaatccattttagtgccaaacgaggaactttcgatggtgatgagctctaagaaaaaacttacaaaaaagactgaaagtcaaagccaaaaacgttcattgcactcagtatcagaagaacgcacagatgaaatgacacataaagaaacaaatgagcaggaagaaagattgctcgccacagcttccttcactaaatcatcccgcagcagcaggactcggtctagcaaggccatcttgttgccggacctttctgaaccaaacaatgagcctttattttctccagcgtcagaagttccaaggaaagcaaaagctaaaaaaatagaggttcctgcacagctgaaagaattagtttcggatttatcttctcagtttgtcatctcacctcctgctttaaggagcagacaaaaaaacacatccaataagaacaagcttgaagatgaactgaaagatgatgcacaatcagtagaaactctgggaaagccaaaagcgaaacgaatcaggacgtcaaaaacaaaacaagcaagcaaaaacacagaaaaagaaagtgcttggtcacctcctcccatagaaattcggctgatttcccccttggctagcccagctgacggagtcaagagcaaaccaagaaaaactacagaagtgacaggaacaggtcttggaaggaacagaaagaaactgtcttcctatccaaagcaaattttacgcagaaaaatgctgtaatttcttgggaagattttaatgtacacctatttgtaaagtcatcagaatagtgtggattattaaatatctagtttggaagaaaataatttatataaattattgtaaatttttatgtaaacagaaggtcttcaataagtaaagtaactccatatggagtgattgtttcagtccaggcaatttttctattttatattaagacttcatacatttatatatgtaaatatggcttattaatggaatgttaaataaaatgtatacttcacagtcgtttgtgtcttggatttttgaaagggaggggatatctgtttaaatagttttatatgctcattggtctcattttctctataattaaaatactagaccagtcttaaaatggggatgattgaagtattgatatttctttttacagttactattttataatttatgcactttgattctgtgattcagatttctaatcagaaaatgtatttttttgtttttggctgttactatgttaaaattgaattatgggcatgtcattttgccatctttgtagtttcacaaattttgtgtaatctacctcaaatgaataatccaagtattggttaactataatgttggcatctcttattcggcaagcttaaaggctctttaaagtcttaattagtcaaagactaatccaggttagattgaccggttcactgctcacttgcaaccttatcaaagggtttgacaaagggaaatgtaaaataaatctgtttatggatattgagtgcatcttgtatgtgcctaatattgataggatgagatgtctgaacaaatttttataatattgctgtgaaggagcttgctattgaaccacagaaatcccttaatattcaggttttaaaactggcaaattctcacaggacctcaggcacagattattgaggttgggagagagtgagtagatgtagaaaaggagaaaaacaacacacgccctgttctctacagtacaactgtgtgcaattaagcaatggtacttgatgtaggctctaacactcatcaataaataagtgttgtaaaataatttataacaggtaatcgatagtgtgtaatgaatggactattaataattgattatctagaaacgaactgctttcgtgggcttttaatattttaatgtgaagcatatgcagtgtgctttctgcatttatttttctaccaaataatacagataatgagaaattggtgaaaatgcctacgcaaagtgttgacagtgtgaaagcagtgcgagtgcggccttttagtcaggttagtgatggatgttacgctgccttgttgaaaatttcactgactttgattttattacttttttaatgatagttatcaaacttgtatttaagctgcttgtcatttatggaatattgaacttatttaaatgaacttgttaaatgaataaagagctaaacataattcagtaaacaattcctttgcgcaagtagcacaataaacatggatgcaacgtatgtcaagttaatacttttttaaaccaacgcaatttggtgaatatagatgtgtggtacctgtttttaataagtgtactttttttcccccctccgtgaatgtagatcataagcaaacaaattgcctgttctaaatgaactttacatatattttaaatgaatgtatgtacttacgtataaatgtctttatatagcttgaataaaaacactgctcattaaaa

SEQ ID NO: 2568 - DNA, 8629 bp, Homo sapiens
  source 1..8629: mol_type = unassigned DNA
tggggctcgagggggcgagcggtggcggtggcgggtacggcaggctcgcgggcgccgggcttcgttacataatctcggaccggaggagcggcggcacatggcggcggagcggcgctgtggaagtatgcgagacttaagagctcaagtgactagtggtctcctgccatttccagaagtgactcttcaagcccttggagaagacgaaataacattagaatctgtgcttcgtggaaagtttgctgcagggaaaaatggacttgcttgcttggcttgtggtccacaacttgaggtagtaaactctataacaggagagcgattgtctgcttacagattcagtggagtcaatgaacagcctcctgtagttttagctgtgaaagaattctcttggcagaagagaactggattattaataggattggaagaaacagaagggagtgttctctgtctttatgaccttggaatatcaaaagtagttaaagcagttgttcttcctggaagggtaacagctattgaacctataattaatcatggaggagccagtgcaagcactcagcatttacatccaagtctgcgatggctttttggagtggcagctgtggtcactgatgttggacagatccttcttgttgacctatgtttggatgacttgtcatgcaatcaaaatgaagttgaagcatcagatcttgaagttctaactggtatcccagctgaagtaccacacattagagaaagtgtaatgagacaagggcgccatctgtgtttccagttagtaagtccaacaggaacagctgtttcaactcttagttacataagcaggacaaatcagcttgctgtaggtttttctgatggctatctagcactttggaacatgaaaagcatgaaaagagaatattacatacaattggaaagtggacaagttcctgtatatgctgtcacttttcaagaacctgagaatgatcctcggaattgctgttacttgtgggctgttcagtctacacaagatagtgaaggggatgttttgagtttgcatctgctgcagctggcctttggtaatagaaagtgtttggcatcaggacaaatcttatatgaggggttagaatactgtgaagaaagatacaccctggacctgacaggtggcatgttccctttgaggggacagacgagtaataccaaattgttgggatgccagagtatagagaaatttcgatctcatggtgacagggaggaaggcgtgaatgaagctctatcgcctgacactagtgtttcagtctttacctggcaggtgaatatatatggacagggaaagccttctgtatatttggggctttttgatataaatcgttggtatcatgcacaaatgccagattcgttaaggtcaggagaatatctacataattgctcttattttgcactgtggtcattggagtctgttgtaagtaggacttctccacatggcatcttggatatattagtacatgagagaagtttaaatagaggagtccctccttcatatccacctcccgagcagttttttaatccaagcacttataattttgatgccacttgtttgttaaactcgggagttgttcatttaacttgtactggctttcagaaggagactttgacttttttaaagaaatcaggtccatcactcaatgaactcattcctgatggttataatcgatgtcttgtagctggccttctttccccaagatttgttgatgttcagccttccagtttaagccaagaagaacagttagaagctatattgtcagcagcaattcagactagttccctgggacttttgactggttatatccgaagatggataacagaagaacaaccaaattctgccactaatttgcgctttgttcttgaatggacgtggaataaagtggttctcacaaaagaggaatttgacagactatgtgtgccattatttgatggttcgtgtcatttcatggatccacaaactatacagtctatccagcaatgctatttgcttcttagcaatcttaatatagtcttgagctgttttgcatcagaagcccgagagatcactgagagaggactgatagacttaagcaataagtttgtggtttcccacctcatctgtcagtatgcacaagtggttctttggttctctcattctgggcttttaccagaaggcatagatgattctgtgcagttgtcaaggttatgctacaactaccctgtaattcagaactactacaccagtcgtcgacagaagtttgagcgtttatcaagagggaagtggaatcccgattgcttgatgattgatggactggtttctcagttaggagagcgaattgagaagttgtggaaacgagatgaaggaggcacaggaaaatatcctcctgctagtctgcatgcagtacttgatatgtacctattagacggcgttactgaagcagccaaacactctattaccatttatttgctacttgatattatgtattcctttcccaacaaaacagacactcccattgaatctttcccaactgtatttgccatttcttggggccaagttaaacttattcaggggttttggttgatagatcataatgactatgagagtggtttggatcttttgtttcatccagctactgcaaaacctttgtcatggcaacattcaaagattattcaggcattcatgagtcagggcgagcacagacaagccctcagatatattcagacaatgaagccaacagtgtccagtggtaacgatgttatccttcacctcactgttttgctttttaataggtgtatggttgaagcctggaattttttgcggcaacattgcaataggttgaatatagaggagttactgaagcacatgtatgaagtctgtcaggaaatgggcttgatggaagatttactgaagttaccatttacagacactgagcaggaatgtttagtgaaatttttgcagtccagtgccagcgttcagaatcatgaattccttttagtgcaccatttgcagcgtgccaattatgtgcctgccttgaagctgaaccaaactctgaagattaatgttatgaatgatcgtgatcctcgtttgcgggagagatcactggctcgaaattctatattagaccagtatggaaaaatccttcctagagtccatcgaaaattagccattgaacgagctaagccttatcatctgtcaacatcatcagtttttcgattagtttctagacccaaaccattatcagcagttccaaagcaagttgtaacaggaactgtgttgacaagatctgttttcatcaacaatgtgttatctaaaattggagaagtttgggcaagcaaagaacctataaatagcaccacacctttcaatagttctaaaatagaagaaccatctcctatagtgtattcgctcccagctccagagctgcctgaggcattttttggaacaccaatttcaaaagcatcacaaaaaatttctagactgctagatttggttgttcagcctgtcccccggccttctcagtgttcggagtttattcagcaaagctccatgaaatctcctttgtacctagtatcccgttcactgccctcaagttcgcaattaaaaggatcgcctcaggccatctccagggcttcagaattacatttgcttgaaactcctcttgtagttaagaaagctaaaagtttggccatgtcagttactacttctggattttctgagttcactcctcagtccatcctgaggtctactcttcgatcaacacctttagcatctccctctccatcacctggaaggtctcctcaacgacttaaagaaactagaatttcatttgtggaagaagatgtccacccaaaatggattcctggggctgcagatgatagcaaattagaagtatttactacacctaaaaaatgtgcagttccagtggaaactgaatggctgaagagcaaagataggaccacatcttttttcctgaacagccctgaaaaggagcatcaagaaatggatgaggggtcacaaagtttagagaaactggatgtgagcaaaggaaacagcagtgtttcaatcacatccgatgagactaccttagagtatcaggatgcaccgtcaccggaagaccttgaagagactgttttcacggcctctaagcccaaaagctcttccactgcactaactactaatgtaactgaacaaactgaaaaggatggagataaagatgtatttgcatcagaagtaactccttcagacctacagaaacaaatgggcaatttagaagatgcagaaacaaaggatctcttagttgcagcagaggcattttcagaattgaatcacttaagcccggttcaaggaactgaagcttctctttgtgcaccatcagtctatgaagggaaaatcttcacccagaagtccaaggtaccagtgttggacgaaggattaacatctgttgaaacctacacccctgcaattagagcaaatgacaataaatctatggctgatgtccttggtgatggtggaaactcctcgctcactatctctgaaggtcctattgtctctgagcgcaggcttaaccaggaagtagcgctgaacttaaaagaagatcatgaagtagaagttggtgtactaaaagaaagtgttgacttaccagaagaaaagcttccaatttctgacagccctcctgatactcaagaaattcatgtgattgaacaagaaaagcttgaagctcaagattcaggagaagaggctaggaatctttcatttaatgagttatatccctctggaacacttaagcttcagtacaattttgatactattgaccaacagttttgtgacttagctgataacaaagacactgctgaatgtgacattgctgaagtagatggggaactttttgtggctcaaagcaactttaccttgatattggaaggtgaagaaggagaagttgagccaggtgattttgcatcatctgatgtgttacctaaagcagctaacacagcaactgaagaaaaacttgtatgcagtggggaaaatgataatcatggacaaattgcaaatttgccatctgccgtaactagtgaccaaaagtcccaaaaagtagacactttaccatatgtgcctgaacctattaaagtagcaattgcagaaaatttactagatgtaattaaagacacaagaagtaaagaaattacttcagatacaatggaacagtccattcatgaaacaatacctttagtgagccaaaacataatgtgtcccactaaattggtcaaatctgcatttaagactgctcaggaaacaagcacaatgactatgaatgtcagccaggttgatgacgtggtttcctccaaaactcgtacgagaggtcaacgtatccaaaacgtgaatgtcaaatcagcacaacaggaagcatcagcagatgttgctactcctaagatgccagggcagtcagtcaggaagaaaactaggaaggcaaaagaaatttctgaagcttctgaaaacatctattctgatgtcagaggactatctcagaaccagcaaatacctcaaaattctgttacgcctaggagaggaaggagaaagaaagaagttaatcaggacatactagaaaacaccagttctgtggaacaagaattacagatcactacaggtagggaatcaaaaagattaaaatcatctcagctgttggaaccagcagttgaagaaactactaaaaaagaagttaaggtttcatctgttacaaaaaggactcctagaagaattaaaagatctgtagaaaatcaggaaagtgttgaaattataaatgatctaaaagttagtacggtaacaagtcctagcagaatgatcagaaaattgagaagtactaatttagatgcttctgaaaatacaggaaataagcaagatgataaatccagtgacaagcagctgcgtattaaacatgttagaagggtcagagggagagaagttagtccatcagatgtgagagaagactccaaccttgagtcatctcagttgactgttcaagcagaatttgatatgtctgccatacctagaaaacgtggtagaccaagaaaaatcaatccatctgaagatgtaggatctaaggctgttaaggaagagagaagccccaagaagaaagaagctcccagcattagaaggagatctacaagaaataccccagctaaaagtgaaaatgttgatgttggaaaaccagctttaggaaaatccattttagtgccaaacgaggaactttcgatggtgatgagctctaagaaaaaacttacaaaaaagactgaaagtcaaagccaaaaacgttcattgcactcagtatcagaagaacgcacagatgaaatgacacataaagaaacaaatgagcaggaagaaagattgctcgccacagcttccttcactaaatcatcccgcagcagcaggactcggtctagcaaggccatcttgttgccggacctttctgaaccaaacaatgagcctttattttctccagcgtcagaagttccaaggaaagcaaaagctaaaaaaatagaggttcctgcacagctgaaagaattagtttcggatttatcttctcagtttgtcatctcacctcctgctttaaggagcagacaaaaaaacacatccaataagaacaagcttgaagatgaactgaaagatgatgcacaatcagtagaaactctgggaaagccaaaagcgaaacgaatcaggacgtcaaaaacaaaacaagcaagcaaaaacacagaaaaagaaagtgcttggtcacctcctcccatagaaattcggctgatttcccccttggctagcccagctgacggagtcaagagcaaaccaagaaaaactacagaagtgacaggaacaggtcttggaaggaacagaaagaaactgtcttcctatccaaagcaaattttacgcagaaaaatgctgtaatttcttgggaagattttaatgtacacctatttgtaaagtcatcagaatagtgtggattattaaatatctagtttggaagaaaataatttatataaattattgtaaatttttatgtaaacagaaggtcttcaataagtaaagtaactccatatggagtgattgtttcagtccaggcaatttttctattttatattaagacttcatacatttatatatgtaaatatggcttattaatggaatgttaaataaaatgtatacttcacagtcgtttgtgtcttggatttttgaaagggaggggatatctgtttaaatagttttatatgctcattggtctcattttctctataattaaaatactagaccagtcttaaaatggggatgattgaagtattgatatttctttttacagttactattttataatttatgcactttgattctgtgattcagatttctaatcagaaaatgtatttttttgtttttggctgttactatgttaaaattgaattatgggcatgtcattttgccatctttgtagtttcacaaattttgtgtaatctacctcaaatgaataatccaagtattggttaactataatgttggcatctcttattcggcaagcttaaaggctctttaaagtcttaattagtcaaagactaatccaggttagattgaccggttcactgctcacttgcaaccttatcaaagggtttgacaaagggaaatgtaaaataaatctgtttatggatattgagtgcatcttgtatgtgcctaatattgataggatgagatgtctgaacaaatttttataatattgctgtgaaggagcttgctattgaaccacagaaatcccttaatattcaggttttaaaactggcaaattctcacaggacctcaggcacagattattgaggttgggagagagtgagtagatgtagaaaaggagaaaaacaacacacgccctgttctctacagtacaactgtgtgcaattaagcaatggtacttgatgtaggctctaacactcatcaataaataagtgttgtaaaataatttataacaggtaatcgatagtgtgtaatgaatggactattaataattgattatctagaaacgaactgctttcgtgggcttttaatattttaatgtgaagcatatgcagtgtgctttctgcatttatttttctaccaaataatacagataatgagaaattggtgaaaatgcctacgcaaagtgttgacagtgtgaaagcagtgcgagtgcggccttttagtcaggttagtgatggatgttacgctgccttgttgaaaatttcactgactttgattttattacttttttaatgatagttatcaaacttgtatttaagctgcttgtcatttatggaatattgaacttatttaaatgaacttgttaaatgaataaagagctaaacataattcagtaaacaattcctttgcgcaagtagcacaataaacatggatgcaacgtatgtcaagttaatacttttttaaaccaacgcaatttggtgaatatagatgtgtggtacctgtttttaataagtgtactttttttcccccctccgtgaatgtagatcataagcaaacaaattgcctgttctaaatgaactttacatatattttaaatgaatgtatgtacttacgtataaatgtctttatatagcttgaataaaaacactgctcatt

SEQ ID NO: 2569 - DNA, 5562 bp, Homo sapiens
  source 1..5562: mol_type = unassigned DNA
caataggagttcgtgtagaagcgagtctgctcaacagcttgttatttggtggattgtggcagtaaatcggggcgagtggggaacccggcgcaggaactgcagccgcggctgggagtggtgctgcccggacgggggcccacggaggtcagaggggaggaggactctggagctgacagcgcgcacttcacccgcagttgttctagcgactgcgaagatagctcgctgagctggaaccccacagatcaccaacaaaaatgaaggcggcagatgagcctgcctacctgacagtgggaaccgatgtcagtgccaagtaccgaggtgccttctgtgaggcaaagattaagactgtgaaaaggctggtgaaagttaaggtactcctgaaacaggataataccacacaattggtacaagatgaccaagtaaagggtcctttaagagttggagctattgttgaaacaaggacatctgatggatcttttcaggaagctattatcagcaagttgacagatgctagttggtataccgtggtgtttgatgatggtgatgagcgaacattgagacgtacctcactttgtctgaaaggagagagacattttgcagagagtgagacacttgaccagcttccattaacaaatccagagcattttggaactccagtaattgcaaagaagacgaacagaggaaggagatcttctcttcctgttactgaagatgaaaaggaagaagaaagcagtgaagaggaagatgaagacaagcgccgtctcaatgatgaattactaggaaaagttgtaagtgtggtgtctgcaacggagaggactgaatggtatcctgctttggtaatatctcccagctgtaatgatgacatcacagtgaaaaaggatcagtgtttagttcgatcatttattgattctaaattttactctatagcaagaaaggacattaaggaagtagacattctcaatctaccggaatctgagctctccactaaaccagggcttcagaaagcaagcatcttcttaaaaactagagttgttcctgataattggaaaatggatataagtgaaatccttgagtcatccagtagtgatgatgaagatggcccagctgaagaaaatgatgaagagaaggaaaaggaggccaaaaagacagaagaagaggtgcctgaggaagaacttgatcctgaagagagggacaacttcctccagcagctttataagtttatggaagacagaggtactccaatcaacaaaccacctgttttgggctataaagatctcaatctcttcaaactcttcagactggtttatcatcagggtggatgtgacaatattgatagtggtgctgtatggaagcaaatttatatggaccttggcattcctattttgaattcagctgcttcctacaatgtaaaaactgcttatagaaagtatctctatggttttgaggagtactgccgttcggcaaatattcagttcagaactgttcatcaccatgaaccaaaagtaaaagaggaaaaaaaagacttagaagaatcaatggaagaggctctcaaattagatcaagaaatgcctttaacagaagtgaagagtgaacctgaggaaaatatcgattcaaacagtgaaagtgaaagagaagagatagaattaaaatctccgaggggacgaaggagaattgctcgagatgtaaattctattaaaaaggaaattgaagaagagaaaacagaagacaaattaaaagataatgatacagaaaataaggatgtagatgatgactatgaaactgcagagaaaaaagaaaatgagctactactggggagaaaaaatacaccaaagcaaaaagagaagaaaattaaaaaacaggaggattctgacaaagactcagatgaagaggaagagaaaagccaagagagggaagaaactgaaagcaaatgtgactctgaaggagaggaagatgaggaagacatggaaccctgcctaacaggaaccaaagtgaaagtaaaatatggacgagggaagactcagaaaatttatgaagccagtattaaaagcactgaaattgatgacggagaagttttatatttggtacattactatggatggaatgtcaggtatgatgagtgggtgaaggctgacaggataatctggcctttggacaaaggtggaccaaagaaaaaacagaagaaaaaagctaaaaataaagaagatagtgaaaaggacgaaaagagagatgaggagaggcagaagtcaaaacggggacgacctcctttaaaatcaaccctctcatcaaacatgccgtatggcttatctaagacagcaaacagtgaaggaaaatcagactcttgttcatctgatagtgaaacagaagatgctttagaaaagaatttaataaatgaagaactttctcttaaagatgaactagaaaaaaatgaaaatttgaatgatgataagctagatgaagaaaatccaaagatttctgcacatatattaaaagaaaatgataggactcaaatgcagcctttagaaaccctgaagttagaagttggagagaatgaacaaatagtacagatttttgggaacaaaatggaaaaaacagaagaagttaagaaagaagccgaaaaatctccaaaaggaaagggaagacgaagcaagacaaaagatctttctttagaaattataaagatttcatcatttggccagaatgaagcaggaagtgaacctcatatagaagctcatagtcttgaattgtcttcattagacaataaaaacttttcttctgctacagaagatgaaattgaccaatgtgtgaaagaaaagaagttgaaacggaaaatactaggacaatcatcgccagagaaaaaaataagaattgagaatggaatggaaatgacaaatactgtatctcaagaaaggaccagtgattgtattggatctgagggaatgaaaaacttaaattttgaacagcactttgaaagagaaaatgaaggaatgccatcattgatagcagagtcaaaccaatgcatccaacaactgactagtgaaagatttgatagtccagctgaagaaactgtaaatattccactaaaagaagatgaggatgcaatgcctctgatcgggcctgaaaccttggtttgccatgaagtagatttggatgatttggatgaaaaggataagaccagcattgaggatgtagcagttgaaagctctgagtctaactctcttgtttctattccacctgccctacctcctgtagtccaacataacttttcagtagcttcaccacttactcttagtcaagatgagtctcgaagcgtaaaaagtgagagtgatataacgattgaagttgatagtattgctgaagaatctcaagaaggtctctgtgagagggaatcggcaaatggatttgaaactaatgttgcctctggtacctgtagtataattgtacaagagagagagagcagagagaagggtcagaagaggccaagtgatggaaatagtggattaatggcaaaaaagcaaaagcgtaccccaaagcgaacaagtgctgcagccaaaaatgaaaagaatggaacagatgaattagataatatgaacagtacagagagaatctcatttctccaagaaaaactacaggaaatcagaaaatattatatgtctttgaagtctgaagttgcaaccatagacaggaggagaaaaagattaaaaaagaaagacagggaagtgtctcatgcgggagcctccatgtcatctgcttcatcagacactggaatgagtccctcatcatcatctcccccacaaaatgtacttgctgtagaatgcaggtgataaacattttctctaccttcccagcagtttgctgccatggacataaatccccaaaccctgaattacaaccacagaaagcactcaactggtttgacattgctaagtatatcctgtatacttttccaggctggattgtatctattcccctctctcttcttttttcttgttgcaaaaaataagctgattaataagtgaaggttaagcagcctgccatatttgtcataatttttcctctttacttttgtttttcgtttgttgtgatatagaacaaagggcacttagcaaatttgaatttgtataataaagctttcaggtgttacagaaatcgtagacaagcaagtgcacatgataaacatcaaaatattacccagctgaatagttactgctgcactttcactaagatgtatttgaacacttggtgagtagggggtttatgttgtgttttttttcattatcgttttttttatttttgtggaagcacttgctatttagaactgccaaagtatatgttcagcagtgtgcccaggattgaaggtgtaaatgggacaaaataaattgtgaaaggaagtgtagttgactgaaaactacagttgtaataagtcttccactttttataggatttttgagcacaaaattatgcaaatattttaatgtttattaatgtttacagtggaattgtgaataagttttcagtggactatcttatcccttgacaaaaatattttgtcttttttctatgtaatttcagagtttttattttgttacaaaaagacaaaaatgaaatatataacaacaatgaagttatttaacaagatttctaaagctgaaatttttgtgtaaaataaggtattatcttgcaacttgttaaatatatttattcagacattggatgttgtatttttatgtattttttaaaatattaataaaatttaaaaaaagaaaattctaggttaattcactctttggatgacaatagctctcagctgtcctttttacaggaggttgcatcctgcagccttgcctgtgttaaagggagtctgtctcagtccatcaaacagtatagaactataaatgggcatctggatcattaaagtatgtccttgtttagaaactttggcagtcctagtatttaaactgttttgaggatcaaatttttggttgcccttaagatactttgtcacagtttttatgtttgctatactgccgaatgaatttatatctcccaaagttgagatgcaacaactaagtaaagcaactatgtatgctttgtctgtgaattgttccacagactgatagattttgtaaataattcttccaaaatcatgtatttaaagcagttttgcatatacattatgtaaaaaggtgattttataaaagcagtttttaaattcatgtttgtacattgaaaggggttttttttttaaacctccttttctgtgtttaatatgctgtagaataataacctagatgctctagactgtatatcaggatctgatttacaagaaaaagtcagagctaaacactagtgatggcatagcattactgaaatcattgtttcttaatttcattttactacattgtgaacttgtgattcagattccattttctcagagaattaaaaacaaaaaaagtactcttgtaaaatgcacttttctgtcttttctttgcaaagcagaagtatctcaatgtaaaataaaaatggagctcagtgggcagtattaataaaggccatgttttaaac

SEQ ID NO: 2570 - DNA, 5891 bp, Homo sapiens
  source 1..5891: mol_type = unassigned DNA
taagtggaagatgtcctacctgctgtttttctcaccaatccatgaagtttcacagctacatccaatgaggacggcaggtagcgaggtcctatccgaagctcttcggcgtcatgagcagccaataggagttcgtgtagaagcgagtctgctcaacagcttgttatttggtggattgtggcagtaaatcggggcgagtggggaacccggcgcaggaactgcagccgcggctgggagtggtgctgcccggacgggggcccacggaggtcagaggggaggaggactctggagctgacagcgcgcacttcacccgcagttgttctagcgactgcgaagatagctcgctgagctggaaccccacagatcaccaacaaaaatgaaggcggcagatgagcctgcctacctgacagtgggaaccgatgtcagtgccaagtaccgaggtgccttctgtgaggcaaagattaagactgtgaaaaggctggtgaaagttaaggtactcctgaaacaggataataccacacaattggtacaagatgaccaagtaaagggtcctttaagagttggagctattgttgaaacaaggacatctgatggatcttttcaggaagctattatcagcaagttgacagatgctagttggtataccgtggtgtttgatgatggtgatgagcgaacattgagacgtacctcactttgtctgaaaggagagagacattttgcagagagtgagacacttgaccagcttccattaacaaatccagagcattttggaactccagtaattgcaaagaagacgaacagaggaaggagatcttctcttcctgttactgaagatgaaaaggaagaagaaagcagtgaagaggaagatgaagacaagcgccgtctcaatgatgaattactaggaaaagttgtaagtgtggtgtctgcaacggagaggactgaatggtatcctgctttggtaatatctcccagctgtaatgatgacatcacagtgaaaaaggatcagtgtttagttcgatcatttattgattctaaattttactctatagcaagaaaggacattaaggaagtagacattctcaatctaccggaatctgagctctccactaaaccagggcttcagaaagcaagcatcttcttaaaaactagagttgttcctgataattggaaaatggatataagtgaaatccttgagtcatccagtagtgatgatgaagatggcccagctgaagaaaatgatgaagagaaggaaaaggaggccaaaaagacagaagaagaggtgcctgaggaagaacttgatcctgaagagagggacaacttcctccagcagctttataagtttatggaagacagaggtactccaatcaacaaaccacctgttttgggctataaagatctcaatctcttcaaactcttcagactggtttatcatcagggtggatgtgacaatattgatagtggtgctgtatggaagcaaatttatatggaccttggcattcctattttgaattcagctgcttcctacaatgtaaaaactgcttatagaaagtatctctatggttttgaggagtactgccgttcggcaaatattcagttcagaactgttcatcaccatgaaccaaaagtaaaagaggaaaaaaaagacttagaagaatcaatggaagaggctctcaaattagatcaagaaatgcctttaacagaagtgaagagtgaacctgaggaaaatatcgattcaaacagtgaaagtgaaagagaagagatagaattaaaatctccgaggggacgaaggagaattgctcgagatgtaaattctattaaaaaggaaattgaagaagagaaaacagaagacaaattaaaagataatgatacagaaaataaggatgtagatgatgactatgaaactgcagagaaaaaagaaaatgagctactactggggagaaaaaatacaccaaagcaaaaagagaagaaaattaaaaaacaggaggattctgacaaagactcagatgaagaggaagagaaaagccaagagagggaagaaactgaaagcaaatgtgactctgaaggagaggaagatgaggaagacatggaaccctgcctaacaggaaccaaagtgaaagtaaaatatggacgagggaagactcagaaaatttatgaagccagtattaaaagcactgaaattgatgacggagaagttttatatttggtacattactatggatggaatgtcaggtatgatgagtgggtgaaggctgacaggataatctggcctttggacaaaggtggaccaaagaaaaaacagaagaaaaaagctaaaaataaagaagatagtgaaaaggacgaaaagagagatgaggagaggcagaagtcaaaacggggacgacctcctttaaaatcaaccctctcatcaaacatgccgtatggcttatctaagacagcaaacagtgaaggaaaatcagactcttgttcatctgatagtgaaacagaagatgctttagaaaagaatttaataaatgaagaactttctcttaaagatgaactagaaaaaaatgaaaatttgaatgatgataagctagatgaagaaaatccaaagatttctgcacatatattaaaagaaaatgataggactcaaatgcagcctttagaaaccctgaagttagaagttggagagaatgaacaaatagtacagatttttgggaacaaaatggaaaaaacagaagaagttaagaaagaagccgaaaaatctccaaaaggaaagggaagacgaagcaagacaaaagatctttctttagaaattataaagatttcatcatttggccagaatgaagcaggaagtgaacctcatatagaagctcatagtcttgaattgtcttcattagacaataaaaacttttcttctgctacagaagatgaaattgaccaatgtgtgaaagaaaagaagttgaaacggaaaatactaggacaatcatcgccagagaaaaaaataagaattgagaatggaatggaaatgacaaatactgtatctcaagaaaggaccagtgattgtattggatctgagggaatgaaaaacttaaattttgaacagcactttgaaagagaaaatgaaggaatgccatcattgatagcagagtcaaaccaatgcatccaacaactgactagtgaaagatttgatagtccagctgaagaaactgtaaatattccactaaaagaagatgaggatgcaatgcctctgatcgggcctgaaaccttggtttgccatgaagtagatttggatgatttggatgaaaaggataagaccagcattgaggatgtagcagttgaaagctctgagtctaactctcttgtttctattccacctgccctacctcctgtagtccaacataacttttcagtagcttcaccacttactcttagtcaagatgagtctcgaagcgtaaaaagtgagagtgatataacgattgaagttgatagtattgctgaagaatctcaagaaggtctctgtgagagggaatcggcaaatggatttgaaactaatgttgcctctggtacctgtagtataattgtacaagagagagagagcagagagaagggtcagaagaggccaagtgatggaaatagtggattaatggcaaaaaagcaaaagcgtaccccaaagcgaacaagtgctgcagccaaaaatgaaaagaatggaacaggacaaagcagtgatagtgaagatcttcctgtcctagacaattcaagtaaatgtaccccagtaaagcatcttaatgtatctaagccacagaaacttgcacgatctcctgcaagaatatccccgcacatcaaagatggagagaaagataaacacagagaaaaacatccgaattcatcccctaggacatataaatggagctttcagctcaatgaattagataatatgaacagtacagagagaatctcatttctccaagaaaaactacaggaaatcagaaaatattatatgtctttgaagtctgaagttgcaaccatagacaggaggagaaaaagattaaaaaagaaagacagggaagtgtctcatgcgggagcctccatgtcatctgcttcatcagacactggaatgagtccctcatcatcatctcccccacaaaatgtacttgctgtagaatgcaggtgataaacattttctctaccttcccagcagtttgctgccatggacataaatccccaaaccctgaattacaaccacagaaagcactcaactggtttgacattgctaagtatatcctgtatacttttccaggctggattgtatctattcccctctctcttcttttttcttgttgcaaaaaataagctgattaataagtgaaggttaagcagcctgccatatttgtcataatttttcctctttacttttgtttttcgtttgttgtgatatagaacaaagggcacttagcaaatttgaatttgtataataaagctttcaggtgttacagaaatcgtagacaagcaagtgcacatgataaacatcaaaatattacccagctgaatagttactgctgcactttcactaagatgtatttgaacacttggtgagtagggggtttatgttgtgttttttttcattatcgttttttttatttttgtggaagcacttgctatttagaactgccaaagtatatgttcagcagtgtgcccaggattgaaggtgtaaatgggacaaaataaattgtgaaaggaagtgtagttgactgaaaactacagttgtaataagtcttccactttttataggatttttgagcacaaaattatgcaaatattttaatgtttattaatgtttacagtggaattgtgaataagttttcagtggactatcttatcccttgacaaaaatattttgtcttttttctatgtaatttcagagtttttattttgttacaaaaagacaaaaatgaaatatataacaacaatgaagttatttaacaagatttctaaagctgaaatttttgtgtaaaataaggtattatcttgcaacttgttaaatatatttattcagacattggatgttgtatttttatgtattttttaaaatattaataaaatttaaaaaaagaaaattctaggttaattcactctttggatgacaatagctctcagctgtcctttttacaggaggttgcatcctgcagccttgcctgtgttaaagggagtctgtctcagtccatcaaacagtatagaactataaatgggcatctggatcattaaagtatgtccttgtttagaaactttggcagtcctagtatttaaactgttttgaggatcaaatttttggttgcccttaagatactttgtcacagtttttatgtttgctatactgccgaatgaatttatatctcccaaagttgagatgcaacaactaagtaaagcaactatgtatgctttgtctgtgaattgttccacagactgatagattttgtaaataattcttccaaaatcatgtatttaaagcagttttgcatatacattatgtaaaaaggtgattttataaaagcagtttttaaattcatgtttgtacattgaaaggggttttttttttaaacctccttttctgtgtttaatatgctgtagaataataacctagatgctctagactgtatatcaggatctgatttacaagaaaaagtcagagctaaacactagtgatggcatagcattactgaaatcattgtttcttaatttcattttactacattgtgaacttgtgattcagattccattttctcagagaattaaaaacaaaaaaagtactcttgtaaaatgcacttttctgtcttttctttgcaaagcagaagtatctcaatgtaaaataaaaatggagctcagtgggcagtattaataaaggccatgttttaaacata

SEQ ID NO: 2571 - DNA, 4051 bp, Homo sapiens
  source 1..4051: mol_type = unassigned DNA
attgtggcagtaaatcggggcgagtggggaacccggcgcaggaactgcagccgcggctgggagtggtgctgcccggacgggggcccacggaggtcagaggggaggaggactctggagctgacagcgcgcacttcacccgcagttgttctagcgactgcgaagatagctcgctgagctggaaccccacagatcaccaacaaaaatgaaggcggcagatgagcctgcctacctgacagtgggaaccgatgtcagtgccaagtaccgaggtgccttctgtgaggcaaagattaagactgtgaaaaggctggtgaaagttaaggtactcctgaaacaggataataccacacaattggtacaagatgaccaagtaaagggtcctttaagagttggagctattgttgaaacaaggacatctgatggatcttttcaggaagctattatcagcaagttgacagatgctagttggtataccgtggtgtttgatgatggtgatgagcgaacattgagacgtacctcactttgtctgaaaggagagagacattttgcagagagtgagacacttgaccagcttccattaacaaatccagagcattttggaactccagtaattgcaaagaagacgaacagaggaaggagatcttctcttcctgttactgaagatgaaaaggaagaagaaagcagtgaagaggaagatgaagacaagcgccgtctcaatgatgaattactaggaaaagttgtaagtgtggtgtctgcaacggagaggactgaatggtatcctgctttggtaatatctcccagctgtaatgatgacatcacagtgaaaaaggatcagtgtttagttcgatcatttattgattctaaattttactctatagcaagaaaggacattaaggaagtagacattctcaatctaccggaatctgagctctccactaaaccagggcttcagaaagcaagcatcttcttaaaaactagagttgttcctgataattggaaaatggatataagtgaaatccttgagtcatccagtagtgatgatgaagatggcccagctgaagaaaatgatgaagagaaggaaaaggaggccaaaaagacagaagaagaggtgcctgaggaagaacttgatcctgaagagagggacaacttcctccagcagctttataagtttatggaagacagaggtactccaatcaacaaaccacctgttttgggctataaagatctcaatctcttcaaactcttcagactggtttatcatcagggtggatgtgacaatattgatagtggtgctgtatggaagcaaatttatatggaccttggcattcctattttgaattcagctgcttcctacaatgtaaaaactgcttatagaaagtatctctatggttttgaggagtactgccgttcggcaaatattcagttcagaactgttcatcaccatgaaccaaaagtaaaagaggaaaaaaaagacttagaagaatcaatggaagaggctctcaaattagatcaagaaatgcctttaacagaagtgaagagtgaacctgaggaaaatatcgattcaaacagtgaaagtgaaagagaagagatagaattaaaatctccgaggggacgaaggagaattgctcgagatgtaaattctattaaaaaggaaattgaagaagagaaaacagaagacaaattaaaagataatgatacagaaaataaggatgtagatgatgactatgaaactgcagagaaaaaagaaaatgagctactactggggagaaaaaatacaccaaagcaaaaagagaagaaaattaaaaaacaggaggattctgacaaagactcagatgaagaggaagagaaaagccaagagagggaagaaactgaaagcaaatgtgactctgaaggagaggaagatgaggaagacatggaaccctgcctaacaggaaccaaagtgaaagtaaaatatggacgagggaagactcagaaaatttatgaagccagtattaaaagcactgaaattgatgacggagaagttttatatttggtacattactatggatggaatgtcaggtatgatgagtgggtgaaggctgacaggataatctggcctttggacaaaggtggaccaaagaaaaaacagaagaaaaaagctaaaaataaagaagatagtgaaaaggacgaaaagagagatgaggagaggcagaagtcaaaacggggacgacctcctttaaaatcaaccctctcatcaaacatgccgtatggcttatctaagacagcaaacagtgaaggaaaatcagactcttgttcatctgatagtgaaacagaagatgctttagaaaagaatttaataaatgaagaactttctcttaaagatgaactagaaaaaaatgaaaatttgaatgatgataagctagatgaagaaaatccaaagatttctgcacatatattaaaagaaaatgataggactcaaatgcagcctttagaaaccctgaagttagaagttggagagaatgaacaaatagtacagatttttgggaacaaaatggaaaaaacagaagaagttaagaaagaagccgaaaaatctccaaaaggaaagggaagacgaagcaagacaaaagatctttctttagaaattataaagatttcatcatttggccagaatgaagcaggaagtgaacctcatatagaagctcatagtcttgaattgtcttcattagacaataaaaacttttcttctgctacagaagatgaaattgaccaatgtgtgaaagaaaagaagttgaaacggaaaatactaggacaatcatcgccagagaaaaaaataagaattgagaatggaatggaaatgacaaatactgtatctcaagaaaggaccagtgattgtattggatctgagggaatgaaaaacttaaattttgaacagcactttgaaagagaaaatgaaggaatgccatcattgatagcagagtcaaaccaatgcatccaacaactgactagtgaaagatttgatagtccagctgaagaaactgtaaatattccactaaaagaagatgaggatgcaatgcctctgatcgggcctgaaaccttggtttgccatgaagtagatttggatgatttggatgaaaaggataagaccagcattgaggatgtagcagttgaaagctctgagtctaactctcttgtttctattccacctgccctacctcctgtagtccaacataacttttcagtagcttcaccacttactcttagtcaagatgagtctcgaagcgtaaaaagtgagagtgatataacgattgaagttgatagtattgctgaagaatctcaagaaggtctctgtgagagggaatcggcaaatggatttgaaactaatgttgcctctggtacctgtagtataattgtacaagagagagagagcagagagaagggtcagaagaggccaagtgatggaaatagtggattaatggcaaaaaagcaaaagcgtaccccaaagcgaacaagtgctgcagccaaaaatgaaaagaatggaacaggacaaagcagtgatagtgaagatcttcctgtcctagacaattcaaatgaattagataatatgaacagtacagagagaatctcatttctccaagaaaaactacaggaaatcagaaaatattatatgtctttgaagtctgaagttgcaaccatagacaggaggagaaaaagattaaaaaagaaagacagggaagtgtctcatgcgggagcctccatgtcatctgcttcatcagacactggaatgagtccctcatcatcatctcccccacaaaatgtacttgctgtagaatgcaggtgataaacattttctctaccttcccagcagtttgctgccatggacataaatccccaaaccctgaattacaaccacagaaagcactcaactggtttgacattgctaagtatatcctgtatacttttccaggctggattgtatctattcccctctctcttcttttttcttgttgcaaaaaataagctgattaataagtgaaggttaagcagcctgccatatttgtcataatttttcctcttt

SEQ ID NO: 2572 - DNA, 582 bp, Homo sapiens
  source 1..582: mol_type = unassigned DNA
ggcgccgtgacactccgctgccgccaccgcgggcccggggcgggccgagggggccgagcggcggaggcggggcgcgggccgaagtcggggtatccgggggaccgcggagcggaggctcggcggtcgtctccgcgggggacctggggaagcccgaagggagctctggccttttccggagctatctgtcctggagctccgagttgagcattccgggtcaaagtggccagcgaggcgggggcgcggtgggccgctggcgagctccggggcggaacgggctgccctttggcgctcgtggggttctcgctgccccctcagctcctgcgtcctggctgccctcgtaaggggtcttgtcccttggctgttctagcgactgcgaagatagctcgctgagctggaaccccacagatcaccaacaaaaatgaaggcggcagatgagcctgcctacctgacagtgggaaccgatgtcagtgccaagtaccgaggtgccttctgtgaggcaaagattaagactgtgaaaaggctggtgaaagttaaggtactcctgaaacaggataataccacacaattggtacaagatgacca

SEQ ID NO: 2573 - DNA, 5783 bp, Homo sapiens
  source 1..5783: mol_type = unassigned DNA
attccgggtcaaagtggccagcgaggcgggggcgcggtgggccgctggcgagctccggggcggaacgggctgccctttggcgctcgtggggttctcgctgccccctcagctcctgcgtcctggctgccctcgtaaggggtcttgtcccttggctggtgaggattctgcccctccccgctggcgtttgtttactttctttcccttggtcgctccccgcagttgactgattatgtctgtgcctgtctttccccctccccatagttctagcgactgcgaagatagctcgctgagctggaaccccacagatcaccaacaaaaatgaaggcggcagatgagcctgcctacctgacagtgggaaccgatgtcagtgccaagtaccgaggtgccttctgtgaggcaaagattaagactgtgaaaaggctggtgaaagttaaggtactcctgaaacaggataataccacacaattggtacaagatgaccaagtaaagggtcctttaagagttggagctattgttgaaacaaggacatctgatggatcttttcaggaagctattatcagcaagttgacagatgctagttggtataccgtggtgtttgatgatggtgatgagcgaacattgagacgtacctcactttgtctgaaaggagagagacattttgcagagagtgagacacttgaccagcttccattaacaaatccagagcattttggaactccagtaattgcaaagaagacgaacagaggaaggagatcttctcttcctgttactgaagatgaaaaggaagaagaaagcagtgaagaggaagatgaagacaagcgccgtctcaatgatgaattactaggaaaagttgtaagtgtggtgtctgcaacggagaggactgaatggtatcctgctttggtaatatctcccagctgtaatgatgacatcacagtgaaaaaggatcagtgtttagttcgatcatttattgattctaaattttactctatagcaagaaaggacattaaggaagtagacattctcaatctaccggaatctgagctctccactaaaccagggcttcagaaagcaagcatcttcttaaaaactagagttgttcctgataattggaaaatggatataagtgaaatccttgagtcatccagtagtgatgatgaagatggcccagctgaagaaaatgatgaagagaaggaaaaggaggccaaaaagacagaagaagaggtgcctgaggaagaacttgatcctgaagagagggacaacttcctccagcagctttataagtttatggaagacagaggtactccaatcaacaaaccacctgttttgggctataaagatctcaatctcttcaaactcttcagactggtttatcatcagggtggatgtgacaatattgatagtggtgctgtatggaagcaaatttatatggaccttggcattcctattttgaattcagctgcttcctacaatgtaaaaactgcttatagaaagtatctctatggttttgaggagtactgccgttcggcaaatattcagttcagaactgttcatcaccatgaaccaaaagtaaaagaggaaaaaaaagacttagaagaatcaatggaagaggctctcaaattagatcaagaaatgcctttaacagaagtgaagagtgaacctgaggaaaatatcgattcaaacagtgaaagtgaaagagaagagatagaattaaaatctccgaggggacgaaggagaattgctcgagatgtaaattctattaaaaaggaaattgaagaagagaaaacagaagacaaattaaaagataatgatacagaaaataaggatgtagatgatgactatgaaactgcagagaaaaaagaaaatgagctactactggggagaaaaaatacaccaaagcaaaaagagaagaaaattaaaaaacaggaggattctgacaaagactcagatgaagaggaagagaaaagccaagagagggaagaaactgaaagcaaatgtgactctgaaggagaggaagatgaggaagacatggaaccctgcctaacaggaaccaaagtgaaagtaaaatatggacgagggaagactcagaaaatttatgaagccagtattaaaagcactgaaattgatgacggagaagttttatatttggtacattactatggatggaatgtcaggtatgatgagtgggtgaaggctgacaggataatctggcctttggacaaaggtggaccaaagaaaaaacagaagaaaaaagctaaaaataaagaagatagtgaaaaggacgaaaagagagatgaggagaggcagaagtcaaaacggggacgacctcctttaaaatcaaccctctcatcaaacatgccgtatggcttatctaagacagcaaacagtgaaggaaaatcagactcttgttcatctgatagtgaaacagaagatgctttagaaaagaatttaataaatgaagaactttctcttaaagatgaactagaaaaaaatgaaaatttgaatgatgataagctagatgaagaaaatccaaagatttctgcacatatattaaaagaaaatgataggactcaaatgcagcctttagaaaccctgaagttagaagttggagagaatgaacaaatagtacagatttttgggaacaaaatggaaaaaacagaagaagttaagaaagaagccgaaaaatctccaaaaggaaagggaagacgaagcaagacaaaagatctttctttagaaattataaagatttcatcatttggccagaatgaagcaggaagtgaacctcatatagaagctcatagtcttgaattgtcttcattagacaataaaaacttttcttctgctacagaagatgaaattgaccaatgtgtgaaagaaaagaagttgaaacggaaaatactaggacaatcatcgccagagaaaaaaataagaattgagaatggaatggaaatgacaaatactgtatctcaagaaaggaccagtgattgtattggatctgagggaatgaaaaacttaaattttgaacagcactttgaaagagaaaatgaaggaatgccatcattgatagcagagtcaaaccaatgcatccaacaactgactagtgaaagatttgatagtccagctgaagaaactgtaaatattccactaaaagaagatgaggatgcaatgcctctgatcgggcctgaaaccttggtttgccatgaagtagatttggatgatttggatgaaaaggataagaccagcattgaggatgtagcagttgaaagctctgagtctaactctcttgtttctattccacctgccctacctcctgtagtccaacataacttttcagtagcttcaccacttactcttagtcaagatgagtctcgaagcgtaaaaagtgagagtgatataacgattgaagttgatagtattgctgaagaatctcaagaaggtctctgtgagagggaatcggcaaatggatttgaaactaatgttgcctctggtacctgtagtataattgtacaagagagagagagcagagagaagggtcagaagaggccaagtgatggaaatagtggattaatggcaaaaaagcaaaagcgtaccccaaagcgaacaagtgctgcagccaaaaatgaaaagaatggaacagatgaattagataatatgaacagtacagagagaatctcatttctccaagaaaaactacaggaaatcagaaaatattatatgtctttgaagtctgaagttgcaaccatagacaggaggagaaaaagattaaaaaagaaagacagggaagtgtctcatgcgggagcctccatgtcatctgcttcatcagacactggaatgagtccctcatcatcatctcccccacaaaatgtacttgctgtagaatgcaggtgataaacattttctctaccttcccagcagtttgctgccatggacataaatccccaaaccctgaattacaaccacagaaagcactcaactggtttgacattgctaagtatatcctgtatacttttccaggctggattgtatctattcccctctctcttcttttttcttgttgcaaaaaataagctgattaataagtgaaggttaagcagcctgccatatttgtcataatttttcctctttacttttgtttttcgtttgttgtgatatagaacaaagggcacttagcaaatttgaatttgtataataaagctttcaggtgttacagaaatcgtagacaagcaagtgcacatgataaacatcaaaatattacccagctgaatagttactgctgcactttcactaagatgtatttgaacacttggtgagtagggggtttatgttgtgttttttttcattatcgttttttttatttttgtggaagcacttgctatttagaactgccaaagtatatgttcagcagtgtgcccaggattgaaggtgtaaatgggacaaaataaattgtgaaaggaagtgtagttgactgaaaactacagttgtaataagtcttccactttttataggatttttgagcacaaaattatgcaaatattttaatgtttattaatgtttacagtggaattgtgaataagttttcagtggactatcttatcccttgacaaaaatattttgtcttttttctatgtaatttcagagtttttattttgttacaaaaagacaaaaatgaaatatataacaacaatgaagttatttaacaagatttctaaagctgaaatttttgtgtaaaataaggtattatcttgcaacttgttaaatatatttattcagacattggatgttgtatttttatgtattttttaaaatattaataaaatttaaaaaaagaaaattctaggttaattcactctttggatgacaatagctctcagctgtcctttttacaggaggttgcatcctgcagccttgcctgtgttaaagggagtctgtctcagtccatcaaacagtatagaactataaatgggcatctggatcattaaagtatgtccttgtttagaaactttggcagtcctagtatttaaactgttttgaggatcaaatttttggttgcccttaagatactttgtcacagtttttatgtttgctatactgccgaatgaatttatatctcccaaagttgagatgcaacaactaagtaaagcaactatgtatgctttgtctgtgaattgttccacagactgatagattttgtaaataattcttccaaaatcatgtatttaaagcagttttgcatatacattatgtaaaaaggtgattttataaaagcagtttttaaattcatgtttgtacattgaaaggggttttttttttaaacctccttttctgtgtttaatatgctgtagaataataacctagatgctctagactgtatatcaggatctgatttacaagaaaaagtcagagctaaacactagtgatggcatagcattactgaaatcattgtttcttaatttcattttactacattgtgaacttgtgattcagattccattttctcagagaattaaaaacaaaaaaagtactcttgtaaaatgcacttttctgtcttttctttgcaaagcagaagtatctcaatgtaaaataaaaatggagctcagtgggcagtattaataaaggccatgttttaaacataggctttatacttttagttttcatttaagtgattgcttttttcctaagtgcttgtaacttacagttggaaaatcagatttcacaaaaccaagcattttagtatattcagcctttacaataaaatatttctactaattataaaaatgaaaaaaaaa

SEQ ID NO: 2574 - DNA, 6067 bp, Homo sapiens
  source 1..6067: mol_type = unassigned DNA
aaagggggggaacctagagtcggtgggggggaagcgatgtttgcccgtcagtcgagtccggagtgaggagctcggtcgccgaagcggagggagactcttgagcttcatcttgccgccgccacggccaccgcctggacctttgcccggagggagctgcagagggtccatcgccgccgtcctctggagggcagcgcgattgggggcccggacctccagtccgggggggatttttcgtcgtccccctccccccaaccagggagcccgagcggccgccaaacaaaggtaccagtcgccgccgcgggaggaggaggagccggagcctctgcctcagcagccgctggacccgccgcccttcttccccatctctcccccgggcctgctggttttgggggggagaaggagagaggggactctggacgtgccagggtcagatctcgcctccgaggaaggtgcagctgaacctggtgttttagaggataccttggtcccagagtcatcatgaaggcccttgatgagcctccctatttgacagtgggcactgatgtgagtgctaaatacagaggagccttttgtgaagccaagatcaagacagcaaaaagacttgtcaaagtcaaggtgacatttagacatgattcttcaacagtggaagttcaggatgaccacataaagggcccactaaaggtaggagctattgtggaagtgaagaatcttgatggtgcatatcaggaagctgttatcaataaactaacagatgcgagttggtacactgtagtttttgatgacggagatgagaagacactgagacgatcttcactgtgcctgaaaggagagaggcattttgctgaaagtgaaacattagaccagctcccactcaccaaccctgagcattttggcactccagtcataggaaagaaaacaaatagaggaagaagatctaatcatataccagaggaagagtcttcatcatcctccagtgatgaagatgaggatgataggaaacagattgatgagctactaggcaaagttgtatgtgtagattacattagtttggataaaaagaaagcactgtggtttcctgcattggtggtttgtcctgattgtagtgatgagattgctgtaaaaaaggacaatattcttgttcgatctttcaaagatggaaaatttacttcagttccaagaaaagatgtccatgaaattactagtgacactgcaccaaagcctgatgctgttttaaagcaagcctttgaacaggcacttgaatttcacaaaagtagaactattcctgctaactggaagactgaattgaaagaagatagctctagcagtgaagcagaggaagaagaggaggaggaagatgatgaaaaagaaaaggaggataatagcagtgaagaagaagaagaaatagaaccatttccagaagaaagggagaactttcttcagcaattgtacaaatttatggaagatagaggtacacctattaacaaacgacctgtacttggatatcgaaatttgaatctctttaagttattcagacttgtacacaaacttggaggatttgataatattgaaagtggagctgtttggaaacaagtctaccaagatcttggaatccctgtcttaaattcagctgcaggatacaatgttaaatgtgcttataaaaaatacttatatggttttgaggagtactgtagatcagccaacattgaatttcagatggcattgccagagaaagttgttaacaagcaatgtaaggagtgtgaaaatgtaaaagaaataaaagttaaggaggaaaatgaaacagagatcaaagaaataaagatggaggaggagaggaatataataccaagagaagaaaagcctattgaggatgaaattgaaagaaaagaaaatattaagccctctctgggaagtaaaaagaatttattagaatctatacctacacattctgatcaggaaaaagaagttaacattaaaaaaccagaagacaatgaaaatctggatgacaaagatgatgacacaactagggtagatgaatccctcaacataaaggtagaagctgaggaagaaaaagcaaaatctggagatgaaacgaataaagaagaagatgaagatgatgaagaagcagaagaggaggaggaggaggaagaagaagaagaggatgaagatgatgatgacaacaatgaggaagaggagtttgagtgctatccaccaggcatgaaagtccaagtgcggtatggacgagggaaaaatcaaaaaatgtatgaagctagtattaaagattctgatgtcgaaggtggagaggtcctttacttggtgcattactgcggatggaatgtgagatacgatgaatggattaaagcagataaaatagtaagacctgctgataaaaatgtgccaaagataaaacatcggaagaaaataaagaataaattagacaaagaaaaagacaaagatgaaaaatactctccaaaaaactgtaaacttcggcgcttgtccaaaccaccatttcagacaaatccatctcctgaaatggtatccaaactggatctcactgatgccaaaaactctgatactgctcatattaagtccatagaaattacttcgatccttaatggacttcaagcttctgaaagttctgctgaagacagtgagcaggaagatgagagaggtgctcaagacatggataataatggcaaagaggaatctaagattgatcatttgaccaacaacagaaatgatcttatttcaaaggaggaacagaacagttcatctttgctagaagaaaacaaagttcatgcagatttggtaatatccaaaccagtgtcaaaatctccagaaagattaaggaaagatatagaagtattatccgaagatactgattatgaagaagatgaagtcacaaaaaagagaaaggatgtcaagaaggacacaacagataaatcttcaaaaccacaaataaaacgtggtaaaagaaggtattgcaatacagaagagtgtctaaaaactggatcacctggcaaaaaggaagagaaggccaagaacaaagaatcactttgcatggaaaacagtagcaacagctcttcagatgaagatgaagaagaaacaaaagcaaagatgacaccaactaagaaatacaatggtttggaggaaaaaagaaaatctctacggacaactggtttctattcaggattttcagaagtggcagaaaaaaggattaaacttttaaataactctgatgaaagacttcaaaacagcagggccaaagatcgaaaagatgtctggtcaagtattcagggacagtggcctaaaaaaacgctgaaagagcttttttcagactctgatactgaggctgcagcttccccaccgcatcctgccccagaggagggggtggcagaggagtcactgcagactgtggctgaagaggagagttgttcacccagtgtagaactagaaaaaccacctccagtcaatgtcgatagtaaacccattgaagaaaaaacagtagaggtcaatgacagaaaagcagaatttccaagtagtggcagtaattcagtgctaaatacccctcctactacacctgaatcgccttcatcagtcactgtaacagaaggcagccggcagcagtcttctgtaacagtatcagaaccactggctccaaaccaagaagaggttcgaagtatcaagagtgaaactgatagcacaattgaggtggatagtgttgctggggagctccaagacctccagtctgaagggaatagctcgccagcaggttttgatgccagtgtgagctcaagcagtagtaatcagccagaaccagaacatcctgaaaaagcctgtacaggtcagaaaagagtgaaagatgctcagggaggaggaagttcatcaaaaaagcagaaaagaagccataaagcaacagtggtaaacaacaaaaagaagggaaaaggcacaaatagtagtgatagtgaagaactttcagctggtgaaagtataactaagagtcagccagtcaaatcagtttccactggaatgaagtctcatagtaccaaatctcccgcaaggacgcagtctccaggaaaatgtggaaagaatggtgataaggatcctgatctcaaggaacccagtaatcgattacccaaagtttacaaatggagttttcagatgtcggacctggaaaatatgacaagtgccgaacgcatcacaattcttcaagaaaaacttcaagaaatcagaaaacattatctgtcattaaaatctgaagtagcttccattgatcggaggagaaagcgtttaaagaagaaagagagagaaagtgctgctacatcctcatcctcctcttcaccttcatccagttccataacagctgctgttatgttaactttagctgaaccgtcaatgtccagcgcatcacaaaatggaatgtcagttgagtgcaggtgacagcaggacttgctaaagcactttgcacttaatggctgttgagggccactttttttttatactgcacagtggcacaaaaaaatatcagacaagcactattttatatttaaaaattgtttcttgacaagctgacttggcacttaagtgcacttttttatgaagaaaaagtacaatgaactgcttttcctcaagcaataattgtttccaacttgtctgggaattgtgtgtctggtaactggaaggccttccactgtggcaaatggaggcttttcactgcctgtagagacaatacagtaagcatagttaaggggtgggtcagaacatgttaagataacttactgtatatgtattcccttgtattttgttaaagctggaacatttgatatttttccatttatttatgaaaaaatatgaacctattttcatttgtacaaggtaattgttttttaaagcaagtcaccttagggtggctttaattgtataagtcaagcacatgtaataaattcaaaacctgcagttaacaggatattagacatcaatcctggtaaccaaatattaaagattctctttaaaaaagactgaacatgtttacaggtttgaattaggctaaaaggtcttgcagtggcttttcatggcccttcaaattggaatggaactactgtactttgccatttttctataaatcagtatttttttttaattttgatatacattgtgtgaaaaaagaaaatggctaataaactgtattaaatcttaaacaatgtataaagattgtacttagccagttcaaagtgtatatttattcataatgaattataacagttatatttttgtgttttcttgtaaatgtttcttttcccttaaatacagataattcatttgtattgcttattttattatgagctacaacaaaaggacttcaggaacaagtaatgtattagtatggttcaagattgttgataggaactgtctcaaaaggatggtggttattttaaatataaatagctaatgggggtggtaggcctataaaattaaatgccttgtataaaatccaaaatgaatgcaaaattgttttcacttgtattgactttatgttgtatgattccaatctctgttctgtttggcacttgtatttaattcttcacctttgtaagacatttgtatattgtggatgtgttcattcaagctatttaatatctggcactgttaatacacagtactttattgtacagactgttttactgttttaattgtagttctgtgtactttttttggatggggctggcatgttttctttgtttcctggcaatacgacgtgggaatttcaatgcgttttgttgtagatgctaacgtgtcagaatcctttacattcaacttttctaagaaaagcattttcagtcttgtagtgtgtgcttacagtaactaattttgttgaaaatggtttcaagttattcaaatttgtacaggactgtaaagatttgttgacagcaaaatgttgaagaaaaaagcttatagaataaaagctataaagtatatattaggatctgcaaacaatgaagaattatgtaatatattgtacaaatgtaagcaaaggctctgaaataaaatgccatagtttgtgaatccttga

SEQ ID NO: 2575 - DNA, 5811 bp, Homo sapiens
  source 1..5811: mol_type = unassigned DNA
agaaagggggggaacctagagtcggtgggggggaagcgatgtttgcccgtcagtcgagtccggagtgaggagctcggtcgccgaagcggagggagactcttgagcttcatcttgccgccgccacggccaccgcctggacctttgcccggagggagctgcagagggtccatcgccgccgtcctctggagggcagcgcgattgggggcccggacctccagtccgggggggatttttcgtcgtccccctccccccaaccagggagcccgagcggccgccaaacaaaggtaccagtcgccgccgcgggaggaggaggagccggagcctctgcctcagcagccgctggacccgccgcccttcttccccatctctcccccgggcctgctggttttgggggggagaaggagagaggggactctggacgtgccagggtcagatctcgcctccgaggaaggtgcagctgaacctggtgttttagaggataccttggtcccagagtcatcatgaaggcccttgatgagcctccctatttgacagtgggcactgatgtgagtgctaaatacagaggagccttttgtgaagccaagatcaagacagcaaaaagacttgtcaaagtcaaggtgacatttagacatgattcttcaacagtggaagttcaggatgaccacataaagggcccactaaaggtaggagctattgtggaagtgaagaatcttgatggtgcatatcaggaagctgttatcaataaactaacagatgcgagttggtacactgtagtttttgatgacggagatgagaagacactgagacgatcttcactgtgcctgaaaggagagaggcattttgctgaaagtgaaacattagaccagctcccactcaccaaccctgagcattttggcactccagtcataggaaagaaaacaaatagaggaagaagatctaatcatataccagaggaagagtcttcatcatcctccagtgatgaagatgaggatgataggaaacagattgatgagctactaggcaaagttgtatgtgtagattacattagtttggataaaaagaaagcactgtggtttcctgcattggtggtttgtcctgattgtagtgatgagattgctgtaaaaaaggacaatattcttgttcgatctttcaaagatggaaaatttacttcagttccaagaaaagatgtccatgaaattactagtgacactgcaccaaagcctgatgctgttttaaagcaagcctttgaacaggcacttgaatttcacaaaagtagaactattcctgctaactggaagactgaattgaaagaagatagctctagcagtgaagcagaggaagaagaggaggaggaagatgatgaaaaagaaaaggaggataatagcagtgaagaagaagaagaaatagaaccatttccagaagaaagggagaactttcttcagcaattgtacaaatttatggaagatagaggtacacctattaacaaacgacctgtacttggatatcgaaatttgaatctctttaagttattcagacttgtacacaaacttggaggatttgataatattgaaagtggagctgtttggaaacaagtctaccaagatcttggaatccctgtcttaaattcagctgcaggatacaatgttaaatgtgcttataaaaaatacttatatggttttgaggagtactgtagatcagccaacattgaatttcagatggcattgccagagaaagttgttaacaagcaatgtaaggagtgtgaaaatgtaaaagaaataaaagttaaggaggaaaatgaaacagagatcaaagaaataaagatggaggaggagaggaatataataccaagagaagaaaagcctattgaggatgaaattgaaagaaaagaaaatattaagccctctctgggaagtaaaaagaatttattagaatctatacctacacattctgatcaggaaaaagaagttaacattaaaaaaccagaagacaatgaaaatctggatgacaaagatgatgacacaactagggtagatgaatccctcaacataaaggtagaagctgaggaagaaaaagcaaaatctggatacgatgaatggattaaagcagataaaatagtaagacctgctgataaaaatgtgccaaagataaaacatcggaagaaaataaagaataaattagacaaagaaaaagacaaagatgaaaaatactctccaaaaaactgtaaacttcggcgcttgtccaaaccaccatttcagacaaatccatctcctgaaatggtatccaaactggatctcactgatgccaaaaactctgatactgctcatattaagtccatagaaattacttcgatccttaatggacttcaagcttctgaaagttctgctgaagacagtgagcaggaagatgagagaggtgctcaagacatggataataatggcaaagaggaatctaagattgatcatttgaccaacaacagaaatgatcttatttcaaaggaggaacagaacagttcatctttgctagaagaaaacaaagttcatgcagatttggtaatatccaaaccagtgtcaaaatctccagaaagattaaggaaagatatagaagtattatccgaagatactgattatgaagaagatgaagtcacaaaaaagagaaaggatgtcaagaaggacacaacagataaatcttcaaaaccacaaataaaacgtggtaaaagaaggtattgcaatacagaagagtgtctaaaaactggatcacctggcaaaaaggaagagaaggccaagaacaaagaatcactttgcatggaaaacagtagcaacagctcttcagatgaagatgaagaagaaacaaaagcaaagatgacaccaactaagaaatacaatggtttggaggaaaaaagaaaatctctacggacaactggtttctattcaggattttcagaagtggcagaaaaaaggattaaacttttaaataactctgatgaaagacttcaaaacagcagggccaaagatcgaaaagatgtctggtcaagtattcagggacagtggcctaaaaaaacgctgaaagagcttttttcagactctgatactgaggctgcagcttccccaccgcatcctgccccagaggagggggtggcagaggagtcactgcagactgtggctgaagaggagagttgttcacccagtgtagaactagaaaaaccacctccagtcaatgtcgatagtaaacccattgaagaaaaaacagtagaggtcaatgacagaaaagcagaatttccaagtagtggcagtaattcagtgctaaatacccctcctactacacctgaatcgccttcatcagtcactgtaacagaaggcagccggcagcagtcttctgtaacagtatcagaaccactggctccaaaccaagaagaggttcgaagtatcaagagtgaaactgatagcacaattgaggtggatagtgttgctggggagctccaagacctccagtctgaagggaatagctcgccagcaggttttgatgccagtgtgagctcaagcagtagtaatcagccagaaccagaacatcctgaaaaagcctgtacaggtcagaaaagagtgaaagatgctcagggaggaggaagttcatcaaaaaagcagaaaagaagccataaagcaacagtggtaaacaacaaaaagaagggaaaaggcacaaatagtagtgatagtgaagaactttcagctggtgaaagtataactaagagtcagccagtcaaatcagtttccactggaatgaagtctcatagtaccaaatctcccgcaaggacgcagtctccaggaaaatgtggaaagaatggtgataaggatcctgatctcaaggaacccagtaatcgattacccaaagtttacaaatggagttttcagatgtcggacctggaaaatatgacaagtgccgaacgcatcacaattcttcaagaaaaacttcaagaaatcagaaaacattatctgtcattaaaatctgaagtagcttccattgatcggaggagaaagcgtttaaagaagaaagagagagaaagtgctgctacatcctcatcctcctcttcaccttcatccagttccataacagctgctgttatgttaactttagctgaaccgtcaatgtccagcgcatcacaaaatggaatgtcagttgagtgcaggtgacagcaggacttgctaaagcactttgcacttaatggctgttgagggccactttttttttatactgcacagtggcacaaaaaaatatcagacaagcactattttatatttaaaaattgtttcttgacaagctgacttggcacttaagtgcacttttttatgaagaaaaagtacaatgaactgcttttcctcaagcaataattgtttccaacttgtctgggaattgtgtgtctggtaactggaaggccttccactgtggcaaatggaggcttttcactgcctgtagagacaatacagtaagcatagttaaggggtgggtcagaacatgttaagataacttactgtatatgtattcccttgtattttgttaaagctggaacatttgatatttttccatttatttatgaaaaaatatgaacctattttcatttgtacaaggtaattgttttttaaagcaagtcaccttagggtggctttaattgtataagtcaagcacatgtaataaattcaaaacctgcagttaacaggatattagacatcaatcctggtaaccaaatattaaagattctctttaaaaaagactgaacatgtttacaggtttgaattaggctaaaaggtcttgcagtggcttttcatggcccttcaaattggaatggaactactgtactttgccatttttctataaatcagtatttttttttaattttgatatacattgtgtgaaaaaagaaaatggctaataaactgtattaaatcttaaacaatgtataaagattgtacttagccagttcaaagtgtatatttattcataatgaattataacagttatatttttgtgttttcttgtaaatgtttcttttcccttaaatacagataattcatttgtattgcttattttattatgagctacaacaaaaggacttcaggaacaagtaatgtattagtatggttcaagattgttgataggaactgtctcaaaaggatggtggttattttaaatataaatagctaatgggggtggtaggcctataaaattaaatgccttgtataaaatccaaaatgaatgcaaaattgttttcacttgtattgactttatgttgtatgattccaatctctgttctgtttggcacttgtatttaattcttcacctttgtaagacatttgtatattgtggatgtgttcattcaagctatttaatatctggcactgttaatacacagtactttattgtacagactgttttactgttttaattgtagttctgtgtactttttttggatggggctggcatgttttctttgtttcctggcaatacgacgtgggaatttcaatgcgttttgttgtagatgctaacgtgtcagaatcctttacattcaacttttctaagaaaagcattttcagtcttgtagtgtgtgcttacagtaactaattttgttgaaaatggtttcaagttattcaaatttgtacaggactgtaaagatttgttgacagcaaaatgttgaagaaaaaagcttatagaataaaagctataaagtatatattaggatctgcaaacaatgaagaattatgtaatatattgtacaaatgtaagcaaaggctctgaaataaaatgccatagtttgtgaatccttga

SEQ ID NO: 2576 - DNA, 5946 bp, Homo sapiens
  source 1..5946: mol_type = unassigned DNA
ggcggggccagatgttgatctcgctcccacttgtcgggtctgagcccggaacgggacgtgggcaggggctctgtggcgggccggtcctgcccgcggcccacaggccctcctggcccctcggtggcccccggccggcctctcgctcggacgcggcgcgtgggggcgcggattcgctcggccgggcgccgaggccctaggggagagcggccggccctgcgccggacgccgggcttgttgtgagtttcttctctgacagaaatggcgtcattgtcgtagacgggaaactccgtcgggtctcgacaatggggacgggaagctgccgagctgtgtgcagctgaacctggtgttttagaggataccttggtcccagagtcatcatgaaggcccttgatgagcctccctatttgacagtgggcactgatgtgagtgctaaatacagaggagccttttgtgaagccaagatcaagacagcaaaaagacttgtcaaagtcaaggtgacatttagacatgattcttcaacagtggaagttcaggatgaccacataaagggcccactaaaggtaggagctattgtggaagtgaagaatcttgatggtgcatatcaggaagctgttatcaataaactaacagatgcgagttggtacactgtagtttttgatgacggagatgagaagacactgagacgatcttcactgtgcctgaaaggagagaggcattttgctgaaagtgaaacattagaccagctcccactcaccaaccctgagcattttggcactccagtcataggaaagaaaacaaatagaggaagaagatctaatcatataccagaggaagagtcttcatcatcctccagtgatgaagatgaggatgataggaaacagattgatgagctactaggcaaagttgtatgtgtagattacattagtttggataaaaagaaagcactgtggtttcctgcattggtggtttgtcctgattgtagtgatgagattgctgtaaaaaaggacaatattcttgttcgatctttcaaagatggaaaatttacttcagttccaagaaaagatgtccatgaaattactagtgacactgcaccaaagcctgatgctgttttaaagcaagcctttgaacaggcacttgaatttcacaaaagtagaactattcctgctaactggaagactgaattgaaagaagatagctctagcagtgaagcagaggaagaagaggaggaggaagatgatgaaaaagaaaaggaggataatagcagtgaagaagaagaagaaatagaaccatttccagaagaaagggagaactttcttcagcaattgtacaaatttatggaagatagaggtacacctattaacaaacgacctgtacttggatatcgaaatttgaatctctttaagttattcagacttgtacacaaacttggaggatttgataatattgaaagtggagctgtttggaaacaagtctaccaagatcttggaatccctgtcttaaattcagctgcaggatacaatgttaaatgtgcttataaaaaatacttatatggttttgaggagtactgtagatcagccaacattgaatttcagatggcattgccagagaaagttgttaacaagcaatgtaaggagtgtgaaaatgtaaaagaaataaaagttaaggaggaaaatgaaacagagatcaaagaaataaagatggaggaggagaggaatataataccaagagaagaaaagcctattgaggatgaaattgaaagaaaagaaaatattaagccctctctgggaagtaaaaagaatttattagaatctatacctacacattctgatcaggaaaaagaagttaacattaaaaaaccagaagacaatgaaaatctggatgacaaagatgatgacacaactagggtagatgaatccctcaacataaaggtagaagctgaggaagaaaaagcaaaatctggagatgaaacgaataaagaagaagatgaagatgatgaagaagcagaagaggaggaggaggaggaagaagaagaagaggatgaagatgatgatgacaacaatgaggaagaggagtttgagtgctatccaccaggcatgaaagtccaagtgcggtatggacgagggaaaaatcaaaaaatgtatgaagctagtattaaagattctgatgtcgaaggtggagaggtcctttacttggtgcattactgcggatggaatgtgagatacgatgaatggattaaagcagataaaatagtaagacctgctgataaaaatgtgccaaagataaaacatcggaagaaaataaagaataaattagacaaagaaaaagacaaagatgaaaaatactctccaaaaaactgtaaacttcggcgcttgtccaaaccaccatttcagacaaatccatctcctgaaatggtatccaaactggatctcactgatgccaaaaactctgatactgctcatattaagtccatagaaattacttcgatccttaatggacttcaagcttctgaaagttctgctgaagacagtgagcaggaagatgagagaggtgctcaagacatggataataatggcaaagaggaatctaagattgatcatttgaccaacaacagaaatgatcttatttcaaaggaggaacagaacagttcatctttgctagaagaaaacaaagttcatgcagatttggtaatatccaaaccagtgtcaaaatctccagaaagattaaggaaagatatagaagtattatccgaagatactgattatgaagaagatgaagtcacaaaaaagagaaaggatgtcaagaaggacacaacagataaatcttcaaaaccacaaataaaacgtggtaaaagaaggtattgcaatacagaagagtgtctaaaaactggatcacctggcaaaaaggaagagaaggccaagaacaaagaatcactttgcatggaaaacagtagcaacagctcttcagatgaagatgaagaagaaacaaaagcaaagatgacaccaactaagaaatacaatggtttggaggaaaaaagaaaatctctacggacaactggtttctattcaggattttcagaagtggcagaaaaaaggattaaacttttaaataactctgatgaaagacttcaaaacagcagggccaaagatcgaaaagatgtctggtcaagtattcagggacagtggcctaaaaaaacgctgaaagagcttttttcagactctgatactgaggctgcagcttccccaccgcatcctgccccagaggagggggtggcagaggagtcactgcagactgtggctgaagaggagagttgttcacccagtgtagaactagaaaaaccacctccagtcaatgtcgatagtaaacccattgaagaaaaaacagtagaggtcaatgacagaaaagcagaatttccaagtagtggcagtaattcagtgctaaatacccctcctactacacctgaatcgccttcatcagtcactgtaacagaaggcagccggcagcagtcttctgtaacagtatcagaaccactggctccaaaccaagaagaggttcgaagtatcaagagtgaaactgatagcacaattgaggtggatagtgttgctggggagctccaagacctccagtctgaagggaatagctcgccagcaggttttgatgccagtgtgagctcaagcagtagtaatcagccagaaccagaacatcctgaaaaagcctgtacaggtcagaaaagagtgaaagatgctcagggaggaggaagttcatcaaaaaagcagaaaagaagccataaagcaacagtggtaaacaacaaaaagaagggaaaaggcacaaatagtagtgatagtgaagaactttcagctggtgaaagtataactaagagtcagccagtcaaatcagtttccactggaatgaagtctcatagtaccaaatctcccgcaaggacgcagtctccaggaaaatgtggaaagaatggtgataaggatcctgatctcaaggaacccagtaatcgattacccaaagtttacaaatggagttttcagatgtcggacctggaaaatatgacaagtgccgaacgcatcacaattcttcaagaaaaacttcaagaaatcagaaaacattatctgtcattaaaatctgaagtagcttccattgatcggaggagaaagcgtttaaagaagaaagagagagaaagtgctgctacatcctcatcctcctcttcaccttcatccagttccataacagctgctgttatgttaactttagctgaaccgtcaatgtccagcgcatcacaaaatggaatgtcagttgagtgcaggtgacagcaggacttgctaaagcactttgcacttaatggctgttgagggccactttttttttatactgcacagtggcacaaaaaaatatcagacaagcactattttatatttaaaaattgtttcttgacaagctgacttggcacttaagtgcacttttttatgaagaaaaagtacaatgaactgcttttcctcaagcaataattgtttccaacttgtctgggaattgtgtgtctggtaactggaaggccttccactgtggcaaatggaggcttttcactgcctgtagagacaatacagtaagcatagttaaggggtgggtcagaacatgttaagataacttactgtatatgtattcccttgtattttgttaaagctggaacatttgatatttttccatttatttatgaaaaaatatgaacctattttcatttgtacaaggtaattgttttttaaagcaagtcaccttagggtggctttaattgtataagtcaagcacatgtaataaattcaaaacctgcagttaacaggatattagacatcaatcctggtaaccaaatattaaagattctctttaaaaaagactgaacatgtttacaggtttgaattaggctaaaaggtcttgcagtggcttttcatggcccttcaaattggaatggaactactgtactttgccatttttctataaatcagtatttttttttaattttgatatacattgtgtgaaaaaagaaaatggctaataaactgtattaaatcttaaacaatgtataaagattgtacttagccagttcaaagtgtatatttattcataatgaattataacagttatatttttgtgttttcttgtaaatgtttcttttcccttaaatacagataattcatttgtattgcttattttattatgagctacaacaaaaggacttcaggaacaagtaatgtattagtatggttcaagattgttgataggaactgtctcaaaaggatggtggttattttaaatataaatagctaatgggggtggtaggcctataaaattaaatgccttgtataaaatccaaaatgaatgcaaaattgttttcacttgtattgactttatgttgtatgattccaatctctgttctgtttggcacttgtatttaattcttcacctttgtaagacatttgtatattgtggatgtgttcattcaagctatttaatatctggcactgttaatacacagtactttattgtacagactgttttactgttttaattgtagttctgtgtactttttttggatggggctggcatgttttctttgtttcctggcaatacgacgtgggaatttcaatgcgttttgttgtagatgctaacgtgtcagaatcctttacattcaacttttctaagaaaagcattttcagtcttgtagtgtgtgcttacagtaactaattttgttgaaaatggtttcaagttattcaaatttgtacaggactgtaaagatttgttgacagcaaaatgttgaagaaaaaagcttatagaataaaagctataaagtatatattaggatctgcaaacaatgaagaattatgtaatatattgtacaaatgtaagcaaaggctctgaaataaaatgccatagtttgtgaatccttga

SEQ ID NO: 2577 - DNA, 3957 bp, Homo sapiens
  source 1..3957: mol_type = unassigned DNA
aaagggggggaacctagagtcggtgggggggaagcgatgtttgcccgtcagtcgagtccggagtgaggagctcggtcgccgaagcggagggagactcttgagcttcatcttgccgccgccacggccaccgcctggacctttgcccggagggagctgcagagggtccatcgccgccgtcctctggagggcagcgcgattgggggcccggacctccagtccgggggggatttttcgtcgtccccctccccccaaccagggagcccgagcggccgccaaacaaaggtaccagtcgccgccgcgggaggaggaggagccggagcctctgcctcagcagccgctggacccgccgcccttcttccccatctctcccccgggcctgctggttttgggggggagaaggagagaggggactctggacgtgccagggtcagatctcgcctccgaggaaggtgcagctgaacctggtgttttagaggataccttggtcccagagtcatcatgaaggcccttgatgagcctccctatttgacagtgggcactgatgtgagtgctaaatacagaggagccttttgtgaagccaagatcaagacagcaaaaagacttgtcaaagtcaaggtgacatttagacatgattcttcaacagtggaagttcaggatgaccacataaagggcccactaaaggtaggagctattgtggaagtgaagaatcttgatggtgcatatcaggaagctgttatcaataaactaacagatgcgagttggtacactgtagtttttgatgacggagatgagaagacactgagacgatcttcactgtgcctgaaaggagagaggcattttgctgaaagtgaaacattagaccagctcccactcaccaaccctgagcattttggcactccagtcataggaaagaaaacaaatagaggaagaagatctaatcatataccagaggaagagtcttcatcatcctccagtgatgaagatgaggatgataggaaacagattgatgagctactaggcaaagttgtatgtgtagattacattagtttggataaaaagaaagcactgtggtttcctgcattggtggtttgtcctgattgtagtgatgagattgctgtaaaaaaggacaatattcttgttcgatctttcaaagatggaaaatttacttcagttccaagaaaagatgtccatgaaattactagtgacactgcaccaaagcctgatgctgttttaaagcaagcctttgaacaggcacttgaatttcacaaaagtagaactattcctgctaactggaagactgaattgaaagaagatagctctagcagtgaagcagaggaagaagaggaggaggaagatgatgaaaaagaaaaggaggataatagcagtgaagaagaagaagaaatagaaccatttccagaagaaagggagaactttcttcagcaattgtacaaatttatggaagatagaggtacacctattaacaaacgacctgtacttggatatcgaaatttgaatctctttaagttattcagacttgtacacaaacttggaggatttgataatattgaaagtggagctgtttggaaacaagtctaccaagatcttggaatccctgtcttaaattcagctgcaggatacaatgttaaatgtgcttataaaaaatacttatatggttttgaggagtactgtagatcagccaacattgaatttcagatggcattgccagagaaagttgttaacaagcaatgtaaggagtgtgaaaatgtaaaagaaataaaagttaaggaggaaaatgaaacagagatcaaagaaataaagatggaggaggagaggaatataataccaagagaagaaaagcctattgaggatgaaattgaaagaaaagaaaatattaagccctctctgggaagtaaaaagaatttattagaatctatacctacacattctgatcaggaaaaagaagttaacattaaaaaaccagaagacaatgaaaatctggatgacaaagatgatgacacaactagggtagatgaatccctcaacataaaggtagaagctgaggaagaaaaagcaaaatctggagatgaaacgaataaagaagaagatgaagatgatgaagaagcagaagaggaggaggaggaggaagaagaagaagaggatgaagatgatgatgacaacaatgaggaagaggagtttgagtgctatccaccaggcatgaaagtccaagtgcggtatggacgagggaaaaatcaaaaaatgtatgaagctagtattaaagattctgatgtcgaaggtggagaggtcctttacttggtgcattactgcggatggaatgtgagatacgatgaatggattaaagcagataaaatagtaagacctgctgataaaaatgtgccaaagataaaacatcggaagaaaataaagaataaattagacaaagaaaaagacaaagatgaaaaatactctccaaaaaactgtaaacttcggcgcttgtccaaaccaccatttcagacaaatccatctcctgaaatggtatccaaactggatctcactgatgccaaaaactctgatactgctcatattaagtccatagaaattacttcgatccttaatggacttcaagcttctgaaagttctgctgaagacagtgagcaggaagatgagagaggtgctcaagacatggataataatggcaaagaggaatctaagattgatcatttgaccaacaacagaaatgatcttatttcaaaggaggaacagaacagttcatctttgctagaagaaaacaaagttcatgcagatttggtaatatccaaaccagtgtcaaaatctccagaaagattaaggaaagatatagaagtattatccgaagatactgattatgaagaagatgaagtcacaaaaaagagaaaggatgtcaagaaggacacaacagataaatcttcaaaaccacaaataaaacgtggtaaaagaaggtattgcaatacagaagagtgtctaaaaactggatcacctggcaaaaaggaagagaaggccaagaacaaagaatcactttgcatggaaaacagtagcaacagctcttcagatgaagatgaagaagaaacaaaagcaaagatgacaccaactaagaaatacaatggtttggaggaaaaaagaaaatctctacggacaactggtttctattcaggattttcagaagtggcagaaaaaaggattaaacttttaaataactctgatgaaagacttcaaaacagcagggccaaagatcgaaaagatgtctggtcaagtattcagggacagtggcctaaaaaaacgctgaaagagcttttttcagactctgatactgaggctgcagcttccccaccgcatcctgccccagaggagggggtggcagaggagtcactgcagactgtggctgaagaggagagttgttcacccagtgtagaactagaaaaaccacctccagtcaatgtcgatagtaaacccattgaagaaaaaacagtagaggtcaatgacagaaaagcagaatttccaagtagtggcagtaattcagtgctaaatacccctcctactacacctgaatcgccttcatcagtcactgtaacagaaggcagccggcagcagtcttctgtaacagtatcagaaccactggctccaaaccaagaagaggttcgaagtatcaagagtgaaactgatagcacaattgaggtggatagtgttgctggggagctccaagacctccagtctgaagggaatagctcgccagcaggttttgatgccagtgtgagctcaagcagtagtaatcagccagaaccagaacatcctgaaaaagcctgtacaggtcagaaaagagtgaaagatgctcagggaggaggaagttcatcaaaaaagcagaaaagaagccataaagcaacagtggtaaacaacaaaaagaagggaaaaggcattttaccccac

SEQ ID NO: 2578 - DNA, 1759 bp, Homo sapiens
  source 1..1759: mol_type = unassigned DNA
ggtgggggggaagcgatgtttgcccgtcagtcgagtccggagtgaggagctcggtcgccgaagcggagggagactcttgagcttcatcttgccgccgccacggccaccgcctggacctttgcccggagggagctgcagagggtccatcgccgccgtcctctggagggcagcgcgattgggggcccggacctccagtccgggggggatttttcgtcgtccccctccccccaaccagggagcccgagcggccgccaaacaaaggtgcagctgaacctggtgttttagaggataccttggtcccagagtcatcatgaaggcccttgatgagcctccctatttgacagtgggcactgatgtgagtgctaaatacagaggagccttttgtgaagccaagatcaagacagcaaaaagacttgtcaaagtcaaggtgacatttagacatgattcttcaacagtggaagttcaggatgaccacataaagggcccactaaaggtaggagctattgtggaagtgaagaatcttgatggtgcatatcaggaagctgttatcaataaactaacagatgcgagttggtacactgtagtttttgatgacggagatgagaagacactgagacgatcttcactgtgcctgaaaggagagaggcattttgctgaaagtgaaacattagaccagctcccactcaccaaccctgagcattttggcactccagtcataggaaagaaaacaaatagaggaagaagatctaatcatataccagaggaagagtcttcatcatcctccagtgatgaagatgaggatgataggaaacagattgatgagctactaggcaaagttgtatgtgtagattacattagtttggataaaaagaaagcactgtggtttcctgcattggtggtttgtcctgattgtagtgatgagattgctgtaaaaaaggacaatattcttgttcgatctttcaaagatggaaaatttacttcagttccaagaaaagatgtccatgaaattactagtgacactgcaccaaagcctgatgctgttttaaagcaagcctttgaacaggcacttgaatttcacaaaagtagaactattcctgctaactggaagactgaattgaaagaagatagctctagcagtgaagcagaggaagaagaggaggaggaagatgatgaaaaagaaaaggaggataatagcagtgaagaagaagaagaaatagaaccatttccagaagaaagggagaactttcttcagcaattgtacaaatttatggaagatagaggtacacctattaacaaacgacctgtacttggatatcgaaatttgaatctctttaagttattcagacttgtacacaaacttggaggatttgataatattgaaagtggagctgtttggaaacaagtctaccaagatcttggaatccctgtcttaaattcagctgcaggatacaatgttaaatgtgcttataaaaaatacttatatggttttgaggagtactgtagatcagccaacattgaatttcagatggcattgccagagaaagttgttaacaagcaatgtaaggagtgtgaaaatgtaaaagaaataaaagttaaggaggaaaatgaaacagagatcaaagaaataaagatggaggaggagaggaatataataccaagagaagaaaagcctattgaggatgaaattgaaagaaaagaaaatattaagccctctctgggaagtaaaaagaatttattagaatctatacctacacattct

SEQ ID NO: 2579 - DNA, 2463 bp, Homo sapiens
  source 1..2463: mol_type = unassigned DNA
aaagggggggaacctagagtcggtgggggggaagcgatgtttgcccgtcagtcgagtccggagtgaggagctcggtcgccgaagcggagggagactcttgagcttcatcttgccgccgccacggccaccgcctggacctttgcccggagggagctgcagagggtccatcgccgccgtcctctggagggcagcgcgattgggggcccggacctccagtccgggggggatttttcgtcgtccccctccccccaaccagggagcccgagcggccgccaaacaaaggtaccagtcgccgccgcgggaggaggaggagccggagcctctgcctcagcagccgctggacccgccgcccttcttccccatctctcccccgggcctgctggttttgggggggagaaggagagaggggactctggacgtgccagggtcagatctcgcctccgaggaaggtgcagctgaacctggtgttttagaggataccttggtcccagagtcatcatgaaggcccttgatgagcctccctatttgacagtgggcactgatgtgagtgctaaatacagaggagccttttgtgaagccaagatcaagacagcaaaaagacttgtcaaagtcaaggtgacatttagacatgattcttcaacagtggaagttcaggatgaccacataaagggcccactaaaggtaggagctattgtggaagtgaagaatcttgatggtgcatatcaggaagctgttatcaataaactaacagatgcgagttggtacactgtagtttttgatgacggagatgagaagacactgagacgatcttcactgtgcctgaaaggagagaggcattttgctgaaagtgaaacattagaccagctcccactcaccaaccctgagcattttggcactccagtcataggaaagaaaacaaatagaggaagaagatctaatcatataccagaggaagagtcttcatcatcctccagtgatgaagatgaggatgataggaaacagattgatgagctactaggcaaagttgtatgtgtagattacattagtttggataaaaagaaagcactgtggtttcctgcattggtggtttgtcctgattgtagtgatgagattgctgtaaaaaaggacaatattcttgttcgatctttcaaagatggaaaatttacttcagttccaagaaaagatgtccatgaaattactagtgacactgcaccaaagcctgatgctgttttaaagcaagcctttgaacaggcacttgaatttcacaaaagtagaactattcctgctaactggaagactgaattgaaagaagatagctctagcagtgaagcagaggaagaagaggaggaggaagatgatgaaaaagaaaaggaggataatagcagtgaagaagaagaagaaatagaaccatttccagaagaaagggagaactttcttcagcaattgtacaaatttatggaagatagaggtacacctattaacaaacgacctgtacttggatatcgaaatttgaatctctttaagttattcagacttgtacacaaacttggaggatttgataatattgaaagtggagctgtttggaaacaagtctaccaagatcttggaatccctgtcttaaattcagctgcaggatacaatgttaaatgtgcttataaaaaatacttatatggttttgaggagtactgtagatcagccaacattgaatttcagatggcattgccagagaaagttgttaacaagcaatgtaaggagtgtgaaaatgtaaaagaaataaaagttaaggaggaaaatgaaacagagatcaaagaaataaagatggaggaggagaggaatataataccaagagaagaaaagcctattgaggatgaaattgaaagaaaagaaaatattaagccctctctgggaagtaaaaagaatttattagaatctatacctacacattctgatcaggaaaaagaagttaacattaaaaaaccagaagacaatgaaaatctggatgacaaagatgatgacacaactagggtagatgaatccctcaacataaaggtagaagctgaggaagaaaaagcaaaatctggagatgaaacgaataaagaagaagatgaagatgatgaagaagcagaagaggaggaggaggaggaagaagaagaagaggatgaagatgatgatgacaacaatgaggaagaggagtttgagtgctatccaccaggcatgaaagtccaagtgcggtatggacgagggaaaaatcaaaaaatgtatgaagctagtattaaagattctgatgtcgaaggtggagaggtcctttacttggtgcattactgcggatggaatgtgagatacgatgaatggattaaagcagataaaatagtaagacctgctgataaaaatgtgccaaagataaaacatcggaagaaaataaagaactccgtctacaaaaaaaaaaaaaaaaaaaagaataag

SEQ ID NO: 2580 - DNA, 2188 bp, Homo sapiens
  source 1..2188: mol_type = unassigned DNA
agtatctcagagagcgcggggtccggacagccgcgcgctgagggtctcggggcgggcgccgcgggacctctccgggccatggcagcccctgtcaaagggaacaggaagcagtccacggagggtgacgccctagacccacctgcatcccccaaacctgctggcaagcagaacggaatccagaaccccatctcgctggaggactcccccgaggcaggcggggagcgggaggaggagcaggagcgggaggaggagcaggccttcctggtcagcctctacaagttcatgaaggagcgacacacgcccatcgagagggtgccccatctcggcttcaagcagattaacctgtggaagatctacaaagcagtggagaagctgggggcctatgagctggtgaccgggcgccgcctctggaagaacgtgtacgacgagctggggggcagcccaggcagcaccagcgcggccacgtgcacgcgccgccactacgagaggctggtcctgccatacgtgcggcacctgaagggggaggatgacaagccgctgcccacctccaagcccaggaaacagtacaagatggctaaggagaacaggggggatgatggggccaccgagaggccgaagaaggccaaggaggagcggcgcatggaccagatgatgccaggaaagaccaaagcagatgctgctgacccagcaccacttcccagccaggagccccccaggaacagcacagaacagcagggcctggcctctgggtcttctgtgtcctttgtgggtgccagcggctgtcctgaggcctacaagcggctcctatccagcttctactgcaaggggacacacggcatcatgtcaccactggccaaaaagaagctcctggcccaggtgagcaaggtggaggccttgcagtgccaggaggagggctgccgccatggggcagagccccaggcgtccccagctgttcacctcccagagagtccccagagccccaaagggctgactgagaactccaggcaccggctgacccctcaggagggattgcaggccccaggtggcagcctcagagaggaggcgcaggcaggcccctgcccggcagcccccatcttcaagggctgcttctacacccaccccaccgaggtgctgaagcctgtcagccagcaccccagggacttcttctctagacttaaagatggggtgctattggggcctcctggcaaagaggggctgtcagtgaaagagccccagctggtgtggggcggagacgctaaccgcccttctgcgttccataaaggtggctccagaaagggcatcctctaccccaagcccaaagcctgctgggtgtcccccatggccaaggtcccagccgagagccccacgctcccgcccaccttccccagtagcccaggcctgggcagcaagcgcagcctggaggaagagggtgctgcccacagtgggaagagactgcgggccgtgtctccctttcttaaggaggcggatgccaagaagtgtggggccaaacctgcagggtccggcctggtctcctgccttctgggcccagccctggggcctgtgcccccagaggcctacaggggcaccatgctgcactgcccgctgaacttcactggcaccccgggccccttgaagggccaggctgcactccccttcagccccctggtcatcccggccttcccggcccacttcctggccaccgcaggcccctcgcccatggccgctggcctgatgcacttccccccaacgtccttcgacagtgccctccgccacagactttgcccggcctcatctgcctggcacgcaccaccagtcacaacctatgcagcgccccacttcttccacctcaacaccaagctgtaggccagcccatggtgttgtgtacactgtggagtcgacaggggcctacaacaggcaggtactgctgccagggggctctgaactagtgcctgctacccaggacacccgggccatgcccctggctgggcagcctggcacaagtgaagaagaaggcagtgggaaaactgggtttatctcaaggcagcagcctgagcccaggagcagaggacccagttgttataaggcgctgggagaggatgggcagctcccactgccccagagcggagctcgaagcacccaggttgcccacggaaaatccaataaaaagacaccagtgtgaatccacgta

SEQ ID NO: 2581 - DNA, 1996 bp, Homo sapiens
  source 1..1996: mol_type = unassigned DNA
atctcagagagcgcggggtccggacagccgcgcgctgagggtctcggggcgggcgccgcgggacctctccgggccatggcagcccctgtcaaagggaacaggaagcagtccacggagggtgacgccctagacccacctgcatcccccaaacctgctggcaagcagaacggaatccagaaccccatctcgctggaggactcccccgaggcaggcggggagcgggaggaggagcaggagcgggaggaggagcaggccttcctggtcagcctctacaagttcatgaaggagcgacacacgcccatcgagagggtgccccatctcggcttcaagcagattaacctgtggaagatctacaaagcagtggagaagctgggggcctatgagctggtgaccgggcgccgcctctggaagaacgtgtacgacgagctggggggcagcccaggcagcaccagcgcggccacgtgcacgcgccgccactacgagaggctggtcctgccatacgtgcggcacctgaagggggaggatgacaagccgctgcccacctccaagcccaggaaacagtacaagatggctaaggagaacaggggggatgatggggccaccgagaggccgaagaaggccaaggaggagcggcgcatggaccagatgatgccaggaaagaccaaagcagatgctgctgacccagcaccacttcccagccaggagccccccaggaacagcacagaacagcagggcctggcctctgggtcttctgtgtcctttgtgggtgccagcggctgtcctgaggcctacaagcggctcctatccagcttctactgcaaggggacacacggcatcatgtcaccactggccaaaaagaagctcctggcccaggtgagcaaggtggaggccttgcagtgccaggaggagggctgccgccatggggcagagccccaggcgtccccagctgttcacctcccagagagtccccagagccccaaagggctgactgagaactccaggcaccggctgacccctcaggagggattgcaggccccaggtggcagcctcagagaggaggcgcaggcaggcccctgcccggcagcccccatcttcaagggctgcttctacacccaccccaccgaggtgctgaagcctgtcagccagcaccccagggacttcttctctagacttaaagatggggtgctattggggcctcctggcaaagaggggctgtcagtgaaagagccccagctggtgtggggcggagacgctaaccgcccttctgcgttccataaaggtggctccagaaagggcatcctctaccccaagcccaaagcctgctgggtgtcccccatggccaaggtcccagccgagagccccacgctcccgcccaccttccccagtagcccaggcctgggcagcaagcgcagcctggaggaagagggtgctgcccacagtgggaagagactgcgggccgtgtctccctttcttaaggaggcggatgccaagaagtgtggggccaaacctgcagggtccggcctggtctcctgccttctgggcccagccctggggcctgtgcccccagaggcctacaggggcaccatgctgcactgcccgctgaacttcactggcacgcaccaccagtcacaacctatgcagcgccccacttcttccacctcaacaccaagctgtaggccagcccatggtgttgtgtacactgtggagtcgacaggggcctacaacaggcaggtactgctgccagggggctctgaactagtgcctgctacccaggacacccgggccatgcccctggctgggcagcctggcacaagtgaagaagaaggcagtgggaaaactgggtttatctcaaggcagcagcctgagcccaggagcagaggacccagttgttataaggcgctgggagaggatgggcagctcccactgccccagagcggagctcgaagcacccaggttgcccacggaaaatccaataaaaagacaccagtgtgaatcc

SEQ ID NO: 2582 - DNA, 2548 bp, Homo sapiens
  source 1..2548: mol_type = unassigned DNA
agagtcttgggccagtaaggagtgctccgcgggccccaggggaggacaacaggtgcctcttgccccacccgggctcctctggtgggagcccacacgcacggtggcgtcactgcgcctacaggcaacgctagagcacaggaggggtgggaggtcggggctcgagggcttcaccccgcagcagagctcagagcccaatccaggccttagggacccgcctggggcctagaacttggtgtggcagaggtagaaagggcctccgataatctgcttctacagttgagagacgtcaactggcacctctgagcctctgccccgtaggtgaaatgggaacacacgaaaccatctgaggagctctcactgtccgtcaccaccaaatgtggcccagactccgtggggagggacagtcccatcctggaactggggcttttaggacatcccagagcccgcagcccctgtcaaagggaacaggaagcagtccacggagggtgacgccctagacccacctgcatcccccaaacctgctggcaagcagaacggaatccagaaccccatctcgctggaggactcccccgaggcaggcggggagcgggaggaggagcaggagcgggaggaggagcaggccttcctggtcagcctctacaagttcatgaaggagcgacacacgcccatcgagagggtgccccatctcggcttcaagcagattaacctgtggaagatctacaaagcagtggagaagctgggggcctatgagctggtgaccgggcgccgcctctggaagaacgtgtacgacgagctggggggcagcccaggcagcaccagcgcggccacgtgcacgcgccgccactacgagaggctggtcctgccatacgtgcggcacctgaagggggaggatgacaagccgctgcccacctccaagcccaggaaacagtacaagatggctaaggagaacaggggggatgatggggccaccgagaggccgaagaaggccaaggaggagcggcgcatggaccagatgatgccaggaaagaccaaagcagatgctgctgacccagcaccacttcccagccaggagccccccaggaacagcacagaacagcagggcctggcctctgggtcttctgtgtcctttgtgggtgccagcggctgtcctgaggcctacaagcggctcctatccagcttctactgcaaggggacacacggcatcatgtcaccactggccaaaaagaagctcctggcccaggtgagcaaggtggaggccttgcagtgccaggaggagggctgccgccatggggcagagccccaggcgtccccagctgttcacctcccagagagtccccagagccccaaagggctgactgagaactccaggcaccggctgacccctcaggagggattgcaggccccaggtggcagcctcagagaggaggcgcaggcaggcccctgcccggcagcccccatcttcaagggctgcttctacacccaccccaccgaggtgctgaagcctgtcagccagcaccccagggacttcttctctagacttaaagatggggtgctattggggcctcctggcaaagaggggctgtcagtgaaagagccccagctggtgtggggcggagacgctaaccgcccttctgcgttccataaaggtggctccagaaagggcatcctctaccccaagcccaaagcctgctgggtgtcccccatggccaaggtcccagccgagagccccacgctcccgcccaccttccccagtagcccaggcctgggcagcaagcgcagcctggaggaagagggtgctgcccacagtgggaagagactgcgggccgtgtctccctttcttaaggaggcggatgccaagaagtgtggggccaaacctgcagggtccggcctggtctcctgccttctgggcccagccctggggcctgtgcccccagaggcctacaggggcaccatgctgcactgcccgctgaacttcactggcaccccgggccccttgaagggccaggctgcactccccttcagccccctggtcatcccggccttcccggcccacttcctggccaccgcaggcccctcgcccatggccgctggcctgatgcacttccccccaacgtccttcgacagtgccctccgccacagactttgcccggcctcatctgcctggcacgcaccaccagtcacaacctatgcagcgccccacttcttccacctcaacaccaagctgtaggccagcccatggtgttgtgtacactgtggagtcgacaggggcctacaacaggcaggtactgctgccagggggctctgaactagtgcctgctacccaggacacccgggccatgcccctggctgggcagcctggcacaagtgaagaagaaggcagtgggaaaactgggtttatctcaaggcagcagcctgagcccaggagcagaggacccagttgttataaggcgctgggagaggatgggcagctcccactgccccagagcggagctcgaagcacccaggttgcccacggaaaatccaataaaaagacaccagtgtgaatcca

SEQ ID NO: 2583 - DNA, 7891 bp, Homo sapiens
  source 1..7891: mol_type = unassigned DNA
atcagacgatatcccagacaggagcggttagagagagaggaatcacatctccacacagttttagggtgctttttatttttacaaatcttcttgtgtgttttttgccttgatccatcctcttcccgccgagatcgtatggcgcctttctctcgattatgaatttgatcaatccatctttggaagaaaacccacatagttttttcaggagctgaaaattgagtcgttatagaaatattaggacatattttcaatcatttcggtgcccgaagggaggcaagagctcagttttatattgagacattacgccggctgaaggcagagaatgcgtttccctgccaggacctgatgcaatccattcaagccaacaagtttggagagaatgttgagttcaatcaattcagaacgtcgagatggagcccaactcactccagtgggtcggctcaccgtgtggcttgcacggaccttacattttctacaaggcttttcaattccaccttgaaggcaaaccaagaattttgtcccttggcgactttttctttgtaagatgtacgccaaaggatccgatttgcatagcggagctccagctgttgtgggaagagaggaccagccggcaacttttatccagctctaaactttatttcctcccagaagacactccccagggcagaaatagcgaccatggcgaggatgaagtcattgctgtttccgaaaaggtgattgtgaagcttgaagacctggtcaagtgggtacattctgatttctccaagtggagatgtggcttccacgctggaccagtgaaaactgaggccttgggaaggaatggacagaaggaagctctgctgaagtacaggcagtcaaccctaaacagtggactcaacttcaaagacgttctcaaggagaaggcagacctgggggaggacgaggaagaaacgaacgtgatagttctcagctacccccagtactgccggtaccgctcgatgctgaaacgcatccaggataagccatcttccattctaacggaccagtttgcattggccctggggggcattgcagtggtcagcaggaaccctcagatcctgtactgtcgggacacctttgaccacccgactctcatagaaaacgagagtatatgcgatgagtttgcgccaaatcttaaaggcagaccacgcaaaaagaaaccatgcccacaaagaagagattcattcagtggtgttaaggattccaacaacaattccgatggcaaagccgttgccaaggtgaaatgtgaggccaggtcagccttgaccaagccgaagaataaccataactgtaaaaaagtctcaaatgaagaaaaaccaaaggttgccattggtgaagagtgcagggcagatgaacaagccttcttggtggcactttataaatacatgaaagaaaggaaaacgccgatagaacgaataccctatttaggttttaaacagattaacctttggactatgtttcaagctgctcaaaaactgggaggatatgaaacaataacagcccgccgtcagtggaaacatatttatgatgaattaggcggtaatcctgggagcaccagcgctgccacttgtacccgcagacattatgaaagattaatcctaccatatgaaagatttattaaaggagaagaagataagcccctgcctccaatcaaacctcggaaacaggagaacagttcacaggaaaatgagaacaaaacaaaagtatctggaaccaaacgcatcaaacatgaaatacctaaaagcaagaaagaaaaagaaaatgccccaaagccccaggatgcagcagaggtttcatcagagcaagaaaaagaacaagagactttaataagccagaaaagcatccctgagcctctcccagcagcagacatgaagaaaaaaatagaagggtatcaggaattttcagcgaagcccctggcatccagagtagacccagagaaggacaacgaaacagaccaaggttccaacagtgagaaggtggcagaggaggcgggagagaaggggcccacacctccactcccaagtgctcctctggccccagaaaaagattcagccttggtccctggggccagcaaacagccactcacctctcctagtgccctggtggactcaaaacaagaatccaaactgtgctgttttacagagagccctgaaagtgaaccccaagaagcatccttccccagcttccccaccacacagccaccgctggcaaaccagaatgagacggaggatgacaaactgcccgccatggcagattacattgccaactgcaccgtgaaggtggaccagctgggcagtgacgacatccacaatgcgctcaagcagaccccaaaggtccttgtggtccagtcgtttgacatgttcaaagacaaagacctgactgggcccatgaacgagaaccatggacttaattacacgcccctgctctactctaggggcaacccaggcatcatgtccccactggccaagaaaaagcttttgtcccaagtgagtggggccagcctctccagcagctacccttatggctccccaccccctttgatcagcaaaaagaaactgattgctagggatgacttgtgttccagtttgtcccagacccaccatggccaaagcactgaccatatggcggtcagccggccatcagtgattcagcacgtccagagtttcagaagcaagccctcggaagagagaaagaccatcaatgacatctttaagcatgagaaactgagtcgatcagatccccaccgctgcagcttctccaagcatcaccttaacccccttgctgactcctacgtcctgaagcaagaaattcaggagggcaaggataaactcttagagaaaagggccctcccccattcccacatgcctagcttcctggctgacttctactcgtcccctcatctccatagcctctacagacacaccgagcaccatcttcataatgaacagacatccaaatacccttccagggacatgtacagggaatcggaaaacagttcttttccttcccacagacaccaagaaaagctccatgtaaattatctcacgtccctgcacctgcaagacaaaaagtcggcggcagcagaagcccctacggatgatcagcctacagatctgagccttcccaagaacccgcacaaacctaccggcaaggtcctgggcctggctcattccaccacagggccccaggagagcaaaggcatctcccagttccaggtcttaggcagccagagtcgagactgtcaccccaaagcctgtcgggtatcacccatgaccatgtcaggccctaaaaaataccctgaatcgctttcaagatcaggaaaacctcaccatgtgagactggagaatttcaggaagatggaaggcatggtccacccaatcctgcaccggaaaatgagcccgcagaacattggggcggcgcggccgatcaagcgcagcctggaggatttggaccttgtgattgcagggaaaaaggcccgggcagtgtctcccttagacccatccaaggaggtctctgggaaggagaaggcctctgagcaggagagtgaaggcagcaaagcagcgcacggtgggcattccgggggcggatcagaaggccacaagcttcccctctcctcccctatcttcccaggtctgtattccgggagcctgtgtaactcgggcctcaactccaggctcccggctgggtattctcattctctgcagtacttgaaaaaccagactgtgctttctccactcatgcagcccctggctttccactcgcttgtgatgcaaagaggaatttttacatcaccgacaaattctcagcagctgtacagacacttggctgcggctacacctgtaggaagttcatatggggaccttttgcataacagcatttaccctttagctgctataaatcctcaagctgcctttccatcttcccagctgtcatccgtgcaccccagtacaaaactgtaggctcagctctgcccagcagtccaaagcggcatggccaacagagcttcactccttacccaggagtgctggcttatagagttagaagtcagtatttcttctaatctgaggctatgatcagtcccagctgtaggggcccagaggggaggtgaacatgcctgatttttgtgggacaactctagcccacaaactgactggctggtgagtcttgactcccttccaacacagatgcccaggcacctccagatcattcacttcgcacgtgggccttgtgaagggatttgtgaatatccaggaagaacttagaggaccccatctgagttcggatggtcaggaaacaatctgggcaaaaaagaggcaggcatttcaaaggaaggggcaaggaagactggcaaacagatggcaagggatgcccctctttttcataaaactctccaaggttcaatcaatgcaatgtatagtgaaacttcaatagatctttcattttgacactattaaacaatccagagaagtaaacactgttaaattgactgtatatatttgcttcttaaaactacctgtatcactgtttgctcacctaatttatatacaggtagttccattttctcccagttccttctcgtctttttttttttttttttttttttttttattaaatggtattgcttttgtttgcaggtctttttgtttttgttttgtttttgaggctgactgactgtcctagttgttgtgtgtttgtaatttttccacatcttattttgagcagctttgggtggtaaagttattgtttacaaattgaagcaactgattctagtggaacaaatgaaaaagaaacagtcaagcacacaatagtgcaaagaacgttcctttgtagatccgcaacttaaggattttgttcctcataaatggcatagttgaaagagcttatacactgcttacccagccaaatgctttgctttgaagtattgggttctgtgaaaatattgagcattgtacttaccttatctaggctgtgaaactgtcctacataccagagaatcataaaaacaaaaacctcactggcagcaagctgccgaataacaacagagtctagaggacatatttgtgggctgcacagatattttaggaatttcagaaattagaacaggagccaaaatgatttacattggcgttggcactgattcctttaaatggtctgggaaagggggttgggaagaggatggagctcaactggccagaagaggagcagctgcagtcctgatagcttctctagcctcggtcttttgagtgataagtagtcatgttgttttcatccagttggtttcttgtcattcccaagaagaatctcccaggccacatctttggggataactgacatactggattagccttttcaaaagaaaagtcatcctatttggttttatggggtgtgagttttgtgtgtacacacacagaaacatgtaaggtggtttgggtcatgtttttaaccacctggcaatacagtccactttctggtttcttttattgtgggaagtaaatggtcaagctgctcaggcagtgaaaagatgtggagaatgtccgttgtcattcttgccactgtattccatttgctaccgagatataacattaaggtggacacattttctaactgtattaattaaaagtcaatggatacagagagtggattttctccccaagtcccatccctgctgaagaccgcttggatgaactccccaacccactgtgcccctcccgcaacactaccagtagactttagaaccatagttaactaagtcttttacctctgagatacttaattctgggaaaattggtgacaattttcaacttctaaataggtaactcgactgcaaaataatcaaaactgataacaatgaaactgcggctcttaaacaaagccatgcatgccgtgcatttgtattgaaatgtctccatgatatgaagccaaatattcaatgtaacatacttaatatccaaaggtggaaacaaaagaatgtagagatccagtgttaagagttccatttgcttcaattaattatttaccttcctgtggaataatatatatatatatatttaatagaaccatagatagactagtagaatttagattataaatgtgtgagtgcagattatcctgctattgcacaagctagaggggggaaaaatctcaattccagctggcaagatgctagccaggacacatataagaaagttgcactagattgaatggtcacagaatcggaggacatggaagaaaaaggaaacttcggtggttctgcagcagacatgggctaggtcatatgtggtttctatgagttcgtgtctcaaaaaaaaaaggagggggggcatctgtccccggtggagctcacctatttggaatatggggcatttgttttttccactgcaatgatttcagtctggtttcatcatgttggaattcgatcacaccattttcaaacaatgttaacatagtccagcttttgtttttctcatctcttctgagaggagactcactgtttctgtctgaggaagctcataccctcggcaaaacatcaggacaaataaagagaaatgggggtacgcattcccaacagaagcagtgtgttatttgttttaaaactctgaacagagatcttggaaatctttcaaaaagaccattgaattcttcattggctgagaacgacgttttaaaatgtcttaaataaggctttgtttgcattgtttgagttcaaggggccttattattgaatggaattgcacaagcctttctttgtgcaatcaaaccattgttattggtagttctgtaaaggaaactgtggaatcgaattggcagtggagtcataaatctatttactgagtgtggcttccaagaaatgttgcaattcaaaatgcactaagtctgtgatttattggagatttggagattctaaataatatttttaaaaaacttccatgcaacttctggtttaatgtttggcaactccacatgataaaaaaataaaaacagcccaaccgagtttcggaattaagtattcttctagtaagtgattcaaacttgtaatatttgccacaggactgacttatttatttactagctagaagctcttaagttcacttgtttatcagggcatatacagaagggtttgttaaaactcgatgttaactttacaactttctgacctggtgcatgaattctcaagtactgtatttcactgtgttggtgtgtctgatggaaatttcgaggtggtcccacaaaaatattttatgtagtgtgccttcaaagagaaccatttatttctcttcacttatcgtcccacaaagtcacatttggtggtggtcagccaagtcgcatctggtctagttttactcttgtcccaattttaaagagaaatgggaatgagtttgccctggtgagacccataccattgcaatgattatcttgagcacttaaagtccagtgttggctgttagtgtatttgatattctgcctgtctcctcatggttgaaatatgtctgaagaatagcagcataatctcttggctgtttatacttttttaaactttcctgtgttgtaaatattgtatacttttggtgattccagctatgtaacctctatgctctgtaaggtgattatttgtatatagcaacatggcccagtgatattatatagtttcccaatggagaggttattgagtaacctttgcattagtttaaacactaccagaagaatgctgagccaactataaacactcaattttgtatgttttccaaattgtacttattactgcttttgatactgtattacgtgccaatagtttcccaatcacatagcaggcaagagatattttgtactttttgatccactgtaatatttaataaaaaatgttactatctgtttc

SEQ ID NO: 2584 - DNA, 3141 bp, Homo sapiens
  source 1..3141: mol_type = unassigned DNA
agagccctccctgccagtctggcaactccagcaaagtcctcaggctcatcccacacactcggtgctagtcactgctgtgtgtttacatgagtaatggagctgccgggggaggggagttgtaagcagagcgctgagcctcgcagctcgcattcggagggaagctgacatccacaccaagtcgagacttccagggatgtggccggggagcagtcacatgctgtagctttcatgagcacaggcatcagtcaggcagatgtttgtcgactggaatggcgccaaatcttaaaggcagaccacgcaaaaagaaaccatgcccacaaagaagagattcattcagtggtgttaaggattccaacaacaattccgatggcaaagccgttgccaaggtgaaatgtgaggccaggtcagccttgaccaagccgaagaataaccataactgtaaaaaagtctcaaatgaagaaaaaccaaaggttgccattggtgaagagtgcagggcagatgaacaagccttcttggtggcactttataaatacatgaaagaaaggaaaacgccgatagaacgaataccctatttaggttttaaacagattaacctttggactatgtttcaagctgctcaaaaactgggaggatatgaaacaataacagcccgccgtcagtggaaacatatttatgatgaattaggcggtaatcctgggagcaccagcgctgccacttgtacccgcagacattatgaaagattaatcctaccatatgaaagatttattaaaggagaagaagataagcccctgcctccaatcaaacctcggaaacaggagaacagttcacaggaaaatgagaacaaaacaaaagtatctggaaccaaacgcatcaaacatgaaatacctaaaagcaagaaagaaaaagaaaatgccccaaagccccaggatgcagcagaggtttcatcagagcaagaaaaagaacaagagactttaataagccagaaaagcatccctgagcctctcccagcagcagacatgaagaaaaaaatagaagggtatcaggaattttcagcgaagcccctggcatccagagtagacccagagaaggacaacgaaacagaccaaggttccaacagtgagaaggtggcagaggaggcgggagagaaggggcccacacctccactcccaagtgctcctctggccccagaaaaagattcagccttggtccctggggccagcaaacagccactcacctctcctagtgccctggtggactcaaaacaagaatccaaactgtgctgttttacagagagccctgaaagtgaaccccaagaagcatccttccccagcttccccaccacacagccaccgctggcaaaccagaatgagacggaggatgacaaactgcccgccatggcagattacattgccaactgcaccgtgaaggtggaccagctgggcagtgacgacatccacaatgcgctcaagcagaccccaaaggtccttgtggtccagtcgtttgacatgttcaaagacaaagacctgactgggcccatgaacgagaaccatggacttaattacacgcccctgctctactctaggggcaacccaggcatcatgtccccactggccaagaaaaagcttttgtcccaagtgagtggggccagcctctccagcagctacccttatggctccccaccccctttgatcagcaaaaagaaactgattgctagggatgacttgtgttccagtttgtcccagacccaccatggccaaagcactgaccatatggcggtcagccggccatcagtgattcagcacgtccagagtttcagaagcaagccctcggaagagagaaagaccatcaatgacatctttaagcatgagaaactgagtcgatcagatccccaccgctgcagcttctccaagcatcaccttaacccccttgctgactcctacgtcctgaagcaagaaattcaggagggcaaggataaactcttagagaaaagggccctcccccattcccacatgcctagcttcctggctgacttctactcgtcccctcatctccatagcctctacagacacaccgagcaccatcttcataatgaacagacatccaaatacccttccagggacatgtacagggaatcggaaaacagttcttttccttcccacagacaccaagaaaagctccatgtaaattatctcacgtccctgcacctgcaagacaaaaagtcggcggcagcagaagcccctacggatgatcagcctacagatctgagccttcccaagaacccgcacaaacctaccggcaaggtcctgggcctggctcattccaccacagggccccaggagagcaaaggcatctcccagttccaggtcttaggcagccagagtcgagactgtcaccccaaagcctgtcgggtatcacccatgaccatgtcaggccctaaaaaataccctgaatcgctttcaagatcaggaaaacctcaccatgtgagactggagaatttcaggaagatggaaggcatggtccacccaatcctgcaccggaaaatgagcccgcagaacattggggcggcgcggccgatcaagcgcagcctggaggatttggaccttgtgattgcagggaaaaaggcccgggcagtgtctcccttagacccatccaaggaggtctctgggaaggagaaggcctctgagcaggagagtgaaggcagcaaagcagcgcacggtgggcattccgggggcggatcagaaggccacaagcttcccctctcctcccctatcttcccaggtctgtattccgggagcctgtgtaactcgggcctcaactccaggctcccggctgggtattctcattctctgcagtacttgaaaaaccagactgtgctttctccactcatgcagcccctggctttccactcgcttgtgatgcaaagaggaatttttacatcaccgacaaattctcagcagctgtacagacacttggctgcggctacacctgtaggaagttcatatggggaccttttgcataacagcatttaccctttagctgctataaatcctcaagctgcctttccatcttcccagctgtcatccgtgcaccccagtacaaaactgtaggctcagctctgcccagcagtccaaagcggcatgg

SEQ ID NO: 2585 - DNA, 1564 bp, Homo sapiens
  source 1..1564: mol_type = unassigned DNA
accccccaccccctcctccctgcacacaaaagcagcataaattaaccgtcttcgggaagccgagcctctgccagccctgagctgggaagaagcagctacctcggaggcagggcgcgcaggcgggcggcgatgagagggggcgcagccgcagccccgcgctggggagcccaccgctaaccctgcaccccacccacccctgcacaaaagagctggcgggcgctggccacgtcgccctgggtgaccttcctcggatgcagaatccgcccctgcgagcatcctcttcctcctaggctctgaaggcccggggagcgtgagcgatgcccagctgcacccgggcagggctcgcctttgtttgccagtaaggaggagaggctgtctcagctgcagaggggtcatccctgcttcaagccagtgcctcttcccagctcccatggggaccaccgaagccacgctccggatggaaaacgtggacgtgaaggaggaatggcaggacgaagatcttcccaggccactcccagaagagacgggggtggaactgcttggcagcccggtggaagacacatcctctcctcccaacacgctaaatttcaacggagcgcatcgtaagaggaagacgctggtggccccagagatcaacatttctctggatcagagtgaggggtccctgctgtccgatgacttcttggatacccctgatgacctggatattaacgtggatgacatcgagacccccgatgagaccgactcgctggagttcctggggaatggcaacgaactggagtgggaagacgacacccccgtggccaccgccaagaacatgcccggggacagcgcggatctatttggggacggcacgacggaggacggcagcgccgccaacgggcgcctgtggcggacagtgatcatcggggagcaagagcaccgtatagacctgcacatgatccggccttacatgaaagtggtcacccacggagggtactacggcgaaggcctcaacgccatcatcgtcttcgcagcctgcttccttccagacagcagcctccccgactaccactacatcatggagaacctcttcctgtacgtcatcagcagcttagagctcctggtggctgaggactacatgatcgtgtacctgaacggtgccacgccccggcggaggatgcctggaatcggctggctgaagaagtgctaccagatgatcgaccggaggttgcggaaaaacctgaagtccttgatcatcgtccacccctcgtggttcattcggactgtgctggccatctctcgccctttcatcagcgtcaagttcatcaacaagatccagtacgtgcacagcttggaagacctggagcaactcatccctatggaacacgtccagatcccagactgcgtcctgcaatacgaagaggaaagactgaaggccaggagggagagcgcgaggccccagccggagtttgtgctgcccaggtctgaagagaagccagaggtggcaccagtggaaaacaggtctgctctggtctcagaagatcaggaaacaagcctccagcccctgcacagatcaagctga

SEQ ID NO: 2586 - DNA, 1543 bp, Homo sapiens
  source 1..1543: mol_type = unassigned DNA
accccccaccccctcctccctgcacacaaaagcagcataaattaaccgtcttcgggaagccgagcctctgccagccctgagctgggaagaagcagctacctcggaggcagggcgcgcaggcgggcggcgatgagagggggcgcagccgcagccccgcgctggggagcccaccgctaaccctgcaccccacccacccctgcacaaaagagctggcgggcgctggccacgtcgccctgggtgaccttcctcggatgcagaatccgcccctgcgagcatcctcttcctcctaggctctgaaggcccggggagcgtgagcgatgcccagctgcacccgggcagggctcgcctttgtttgccagtaaggaggagaggctgtctcagctgcagaggggtcatccctgcttcaagccagtgcctcttcccagctcccatggggaccaccgaagccacgctccggatggaaaacgtggacgtgaaggaggaatggcaggacgaagatcttcccaggccactcccagaagagacgggggtggaactgcttggcagcccggtggaagacacatcctctcctcccaacacgctaaatttcaacggagcgcatcgtaagaggaagacgctggtggccccagagatcaacatttctctggatcagagtgaggggtccctgctgtccgatgacttcttggatacccctgatgacctggatattaacgtggatgacatcgagacccccgatgagaccgactcgctggagttcctggggaatggcaacgaactggagtgggaagacgacacccccgtggccaccgccaagaacatgcccggggacagcgcggatctatttggggacggcacgacggaggacggcagcgccgccaacgggcgcctgtggcggacagtgatcatcggggagcaagagcaccgtatagacctgcacatgatccggccttacatgaaagtggtcacccacggagggtactacggcgaaggcctcaacgccatcatcgtcttcgcagcctgcttccttccagacagcagcctccccgactaccactacatcatggagaacctcttcctgtacgtcatcagcagcttagagctcctggtggctgaggactacatgatcgtgtacctgaacggtgccacgccccggcggaggatgcctggaatcggctggctgaagaagtgctaccagatgatcgaccggaggttgcggaaaaacctgaagtccttgatcatcgtccacccctcgtggttcattcggactgtgctggccatctctcgccctttcatcagcgtcaagttcatcaacaagatccagtacgtgcacagcttggaagacctggagcaactcatccctatggaacacgtccagatcccagactgcgtcctgcaatacgaagaggaaagactgaaggccaggagggagagcgcgaggccccagccggagtttgtgctgcccaggtctgaagagaagccagaggtggcaccagtggaaaacaggtctgctctggtctcagaagatcaggaaacaagaatgtcc

SEQ ID NO: 2587 - DNA, 1957 bp, Homo sapiens
  source 1..1957: mol_type = unassigned DNA
ctctgccagccctgagctgggaagaagcagctacctcggaggcagggcgcgcaggcgggcggcgatgagagggggcgcagccgcagccccgcgctggggagcccaccgctaaccctgcaccccacccacccctgcacaaaagagctggcgggcgctggccacgtcgccctgggtgaccttcctcggatgcagaatccgcccctgcgagcatcctcttcctcctaggctctgaaggcccggggagcgtgagcgatgcccagctgcacccgggcagggctcgcctttgtttgccagtaaggaggagaggctgtctcagctgcagaggggtcatccctgcttcaagccagtgcctcttcccagctcccatggggaccaccgaagccacgctccggatggaaaacgtggacgtgaaggaggaatggcaggacgaagatcttcccagccaggaattgctttgcacaatcctgggaaccaccaagtccaaaatccacagggcaggctggaaactgtcaggccactcccagaagagacgggggtggaactgcttggcagcccggtggaagacacatcctctcctcccaacacgctaaatttcaacggagcgcatcgtaagaggaagacgctggtggccccagagatcaacatttctctggatcagagtgaggggtccctgctgtccgatgacttcttggatacccctgatgacctggatattaacgtggatgacatcgagacccccgatgagaccgactcgctggagttcctggggaatggcaacgaactggagtgggaagacgacacccccgtggccaccgccaagaacatgcccggggacagcgcggatctatttggggacggcacgacggaggacggcagcgccgccaacgggcgcctgtggcggacagtgatcatcggggagcaagagcaccgtatagacctgcacatgatccggccttacatgaaagtggtcacccacggagggtactacggcgaaggcctcaacgccatcatcgtcttcgcagcctgcttccttccagacagcagcctccccgactaccactacatcatggagaacctcttcctgtacgtcatcagcagcttagagctcctggtggctgaggactacatgatcgtgtacctgaacggtgccacgccccggcggaggatgcctggaatcggctggctgaagaagtgctaccagatgatcgaccggaggttgcggaaaaacctgaagtccttgatcatcgtccacccctcgtggttcattcggactgtgctggccatctctcgccctttcatcagcgtcaagttcatcaacaagatccagtacgtgcacagcttggaagacctggagcaactcatccctatggaacacgtccagatcccagactgcgtcctgcaatacgaagaggaaagactgaaggccaggagggagagcgcgaggccccagccggagtttgtgctgcccaggtctgaagagaagccagaggtggcaccagtggaaaacaggtctgctctggtctcagaagatcaggaaacaagcatgtcctgaggcgacgtgagcataacaaaggacatggaagaagattccagatgccagaaaacctctgtcagacgcccactggccccagatctcatcctgcctcatcctgagtcccaatcttccaagggtgccagcccctccgttcatctctgaaacccagcatccttttcagctgcttgaaaacattgtattttttttttttaacgatgcagtatttgtgcgttccagaaaagggcccagctctgagcccctcacccttccacactcacgaactctcagccgaggaaggcaagaagcgcagggggtggcccgcgtggcgtcggtggcctccgctcctgctcgcagcctctgtggtcagagctggatacaagattcaagacccttctcttgcttgtcacccgctccaggttggag

SEQ ID NO: 2588 - DNA, 5032 bp, Homo sapiens
  source 1..5032: mol_type = unassigned DNA
accccccaccccctcctccctgcacacaaaagcagcataaattaaccgtcttcgggaagccgagcctctgccagccctgagctgggaagaagcagctacctcggaggcagggcgcgcaggcgggcggcgatgagagggggcgcagccgcagccccgcgctggggagcccaccgctaaccctgcaccccacccacccctgcacaaaagagctggcgggcgctggccacgtcgccctgggtgaccttcctcggatgcagaatccgcccctgcgagcatcctcttcctcctaggctctgaaggcccggggagcgtgagcgatgcccagctgcacccgggcagggctcgcctttgtttgccagtaaggaggagaggctgtctcagctgcagaggggtcatccctgcttcaagccagtgcctcttcccagctcccatggggaccaccgaagccacgctccggatggaaaacgtggacgtgaaggaggaatggcaggacgaagatcttcccaggccactcccagaagagacgggggtggaactgcttggcagcccggtggaagacacatcctctcctcccaacacgctaaatttcaacggagcgcatcgtaagaggaagacgctggtggccccagagatcaacatttctctggatcagagtgaggggtccctgctgtccgatgacttcttggatacccctgatgacctggatattaacgtggatgacatcgagacccccgatgagaccgactcgctggagttcctggggaatggcaacgaactggagtgggaagacgacacccccgtggccaccgccaagaacatgcccggggacagcgcggatctatttggggacggcacgacggaggacggcagcgccgccaacgggcgcctgtggcggacagtgatcatcggggagcaagagcaccgtatagacctgcacatgatccggccttacatgaaagtggtcacccacggagggtactacggcgaaggcctcaacgccatcatcgtcttcgcagcctgcttccttccagacagcagcctccccgactaccactacatcatggagaacctcttcctgtacgtcatcagcagcttagagctcctggtggctgaggactacatgatcgtgtacctgaacggtgccacgccccggcggaggatgcctggaatcggctggctgaagaagtgctaccagatgatcgaccggaggttgcggaaaaacctgaagtccttgatcatcgtccacccctcgtggttcattcggactgtgctggccatctctcgccctttcatcagcgtcaagttcatcaacaagatccagtacgtgcacagcttggaagacctggagcaactcatccctatggaacacgtccagatcccagactgcgtcctgcaatacgaagaggaaagactgaaggccaggagggagagcgcgaggccccagccggagtttgtgctgcccaggtctgaagagaagccagaggtggcaccagtggaaaacaggtctgctctggtctcagaagatcaggaaacaagcatgtcctgaggcgacgtgagcataacaaaggacatggaagaagattccagatgccagaaaacctctgtcagacgcccactggccccagatctcatcctgcctcatcctgagtcccaatcttccaagggtgccagcccctccgttcatctctgaaacccagcatccttttcagctgcttgaaaacattgtattttttttttttaacgatgcagtatttgtgcgttccagaaaagggcccagctctgagcccctcacccttccacactcacgaactctcagccgaggaaggcaagaagcgcagggggtggcccgcgtggcgtcggtggcctccgctcctgctcgcagcctctgtggtcagagctggatacaagattcaagacccttctcttgcttgtcacccgctccaggttggagccacagacacccaccgccaccccggctgggtctgcgtcctttcctgtgcctttccctccagaatgcggcctcagacctagaagctcaacccccctatgagggccacgtcctggggtagctcctgacctccgaccttatgtccaaatttcacacccatggtttttcatttgacccgcccccttctcgctcataatgacacccagctcctttgagaggatcagagcccattgcacaagaagagccgctgccaaccatccttgtcctccgattgcaaaatgacaccccagtaatctagaacattctcaagcccctttaactcagatgtcaagccaccgggcaaaccccgtcaatacctcccaccaaggaatgagatatgtggacctcactgctcccccaacccagcgtcaggctgggacacgccaacgctgttccgggttggaacagcagaggctcagaaactggctctgaaataggcagacctagcaagaggaagatacagggtatcgggcgtttgagtgtttcagaagtcattcgggaagataaatccagtgcgctggccgcagccacctgcattcaaagcttggaccagcgggttcttgttcgggaggcaaatttccctaggaaaaagaagacagacttttctaatgtggtccaaatgcggatcactggtcagatggactctagaagcactgagctccctgtctctggaagtatttaagaaaaggctgggccaggcacgatggctcacgcctgtaatcccagactttgggaggccgaggcaggcggatcacctgaggtgaggagtttgagaacagcctggccaacatggtgaaacctcatctctactaaaaatacaaaaattagccaggcgtggtggcaggtgcctgtaatcccagctacttgggaggctgaggcatgagaatcacttaaacctgagaggcagaggttacagtgagccaagatcgtgccactgcattccagcctgggcgacagagcaagactctgtctcaaaaaaaataaaaaataatcagggcacagtggctcatgcctgtaatcccagcactctgggaggctgaggtgggtggatcacctgaggtcaggagttcaagaccagcctggtgaacatggcgaaaccccgtctctaataaaaatacaaaaattagccgggcatggtggtgcatgcctgtaatcccagctactcgggaggctgaggcaggagaactgcttgaacccaggaggcagaggttgcagtgatccaagatcatgccactgcactccagcctgggcaacaagagcaaaactccgtctcaaaataaaaagaaaagaaaagaatggacagtgtttgcagagagttgctcacgagtttccctctaatcctaaatgtcttcatgtctatcagtctgagcagacggtgagtagggcgggcacattctccaggcccttcttcctagctctgtggttgacctctcagcaagtgctatccaggctgggccaaccagacccacaattaactgagcctcagtgaaagcgtccagtgcatcttgacctgagacagcaaggaattgcatttggggttattccaacgatgatggcagggaactggtggtatttagtgctgaggggcagtgatacagaaagatttgccctgtgggacagggtcctgcgcgagtcccatccccaaaagccagcagctcctgccatgaggaagacggggtttctgagcaggcttatgcctgcaggttcctgtggagccaccggctgtgacgggacacctctgggtctcagcattgccctggggaggctgggacatttagggacatggtagggttttaacatttgtttcccaaatgtcaaatcccgggcacaggggcaagaccctgtcccgaattcccaccccagtgaatggtgtcgctgccaaagccaacacaagatgacaaaagtggctgggtacggtggctcacgcctataatcccagcactttgggagaccgagacaggtggatcacctgaggtcaggagttcgagaccaggctggccaacatggtgaaaccccatctctactaaaaatacaaaaattagctgggtgtggtggcgcgcacctgtagtcccagctactcaggaggctgaggtagaagaatagctggaacccaggaggcagagattgcagtcagccgagattgcaccactgcactccagcctgggagacagagcaagactgactcaaaagaaaaaaaatgacagaagcctgattatcagactgcccggaggagacaggctccagcagatagatgccagccaggcccagctgccacgatttgtcccaggtgaccaaaggcacgcagctccagcatgaatcgttctaacccaacagtgacaagaactgctgggccttaaccgtcatggaagactggggccgcttccaagtcacagacaggagacggggacaggaaagaactcattccacccaatcggacacctaataattgagtgtctacagcagcaatcaagtgacaagtgaggccctacctgacccagaaggtgcctgccggctaaacattctgcccccaccagaaactccagggggtccgcccgttatgccgtggcccacccacgcccctttggatcaccagcagtcacagacaacaggcaggcgaaactgaagaccccaactcagccccagcggaccctccagagcaaaagaggcccccggcgaggccacctgtcggcaggcatgccgaggtcaaacagccggggccaccgttcccagctgggccacgacctgcaccgtccacagatgggctttgagatggatttgtatcagggtggggggtgtggtttggccaaaatgcaatggaccccgacccctcctcgtaaaaggatgttgggtttccctctggtgacacatgggatgcgtcataaaccctcccccaaagtcctggtcagcagcccatccttccaacgatgagttttgcggtttttcagaacagaaatgatcactacgattgacgacggtcgtgatgttaagacgtcgtctccatgagctttggggggacttttatgtggaataaagaaactatcactg

SEQ ID NO: 2589 - DNA, 1047 bp, Homo sapiens
  source 1..1047: mol_type = unassigned DNA
atggggaccaccgaagccacgctccggatggaaaacgtggacgtgaaggaggaatggcaggacgaagatcctcctcccaacacgctaaatttcaacggagcgcatcgtaagaggaagacgctggtggccccagagatcaacatttctctggatcagagtgaggggtccctgctgtccgatgacttcttggatacccctgatgacctggatattaacgtggatgacatcgagacccccgatgagaccgactcgctggagttcctggggaatggcaacgaactggagtgggaagacgacacccccgtggccaccgccaagaacatgcccggggacagcgcggatctatttggggacggcacgacggaggacggcagcgccgccaacgggcgcctgtggcggacagtgatcatcggggagcaagagcaccgtatagacctgcacatgatccggccttacatgaaagtggtcacccacggagggtactacggcgaaggcctcaacgccatcatcgtcttcgcagcctgcttccttccagacagcagcctccccgactaccactacatcatggagaacctcttcctgtacgtcatcagcagcttagagctcctggtggctgaggactacatgatcgtgtacctgaacggtgccacgccccggcggaggatgcctggaatcggctggctgaagaagtgctaccagatgatcgaccggaggttgcggaaaaacctgaagtccttgatcatcgtccacccctcgtggttcattcggactgtgctggccatctctcgccctttcatcagcgtcaagttcatcaacaagatccagtacgtgcacagcttggaagacctggagcaactcatccctatggaacacgtccagatcccagactgcgtcctgcaatacgaagaggaaagactgaaggccaggagggagagcgcgaggccccagccggagtttgtgctgcccaggtctgaagagaagccagaggtggcaccagtggaaaacaggtctgctctggtctcagaagatcaggaaacaagaatgtcc

SEQ ID NO: 2590 - DNA, 10603 bp, Homo sapiens
  source 1..10603: mol_type = unassigned DNA
ctactacagtggcggagccgtacaggacctgtttcactgcagggggatccaaaacaagccccgtggagcagcagccagagcaacagcagccgcaagacattgtttctctccctctgcccccccttccccacgcaaccccagatccatttacactttacagttttacctcacaaaaactactacaagcaccaagctccctgatggaaaggagcatcgtgcatcaagtcaccagggtggtccattcaagctgcagatttgtttgtcatccttgtacagcaatctcctcctccactgccactacagggaagtgcatcacatgtcagcatactggagcatagtgaaagagtctattttgaagcttcaaacttagtgctgctgcagaccaggaacaagagagaaagagtggatttcagcctgcacggatggtcttgaaacacaaatggtttttggtctaggcgttttacactgagattctccactgccaccctttctactcaagcaaaatcttcgtgaaaagatctgctgcaaggaactgatagcttatggttctccattgtgatgaaagcacatggtacagttttccaaagaaattagaccattttcttcgtgagaaagaaatcgacgtgctgttttcataggggtatttctcacttctctgtgaaaggaagaaagaacacgcctgagcccaagagccctcaggagccctccagagcctgtgggaagtctccatggtgaagtataggctgaggctacctgtgaacagtacgcagtgaatgttcatccagagctgctgttggcggattgtacccacggggagatgattcctcatgaagagcctggatcccctacagaaatcaaatgtgactttccgtttatcagactaaaatcagagccatccagacagtgaaacagtcaccgtggaggggggacggcgaaaaatgaaatccaaccaagagcggagcaacgaatgcctgcctcccaagaagcgcgagatccccgccaccagccggtcctccgaggagaaggcccctaccctgcccagcgacaaccaccgggtggagggcacagcatggctcccgggcaaccctggtggccggggccacgggggcgggaggcatgggccggcagggacctcggtggagcttggtttacaacagggaataggtttacacaaagcattgtccacagggctggactactccccgcccagcgctcccaggtctgtccccgtggccaccacgctgcctgccgcgtacgccaccccgcagccagggaccccggtgtcccccgtgcagtacgctcacctgccgcacaccttccagttcattgggtcctcccaatacagtggaacctatgccagcttcatcccatcacagctgatccccccaaccgccaaccccgtcaccagtgcagtggcctcggccgcaggggccaccactccatcccagcgctcccagctggaggcctattccactctgctggccaacatgggcagtctgagccagacgccgggacacaaggctgagcagcagcagcagcagcagcagcagcagcagcagcagcatcagcatcagcagcagcagcagcagcagcagcagcagcagcagcagcagcacctcagcagggctccggggctcatcaccccggggtcccccccaccagcccagcagaaccagtacgtccacatttccagttctccgcagaacaccggccgcaccgcctctcctccggccatccccgtccacctccacccccaccagacgatgatcccacacacgctcaccctggggcccccctcccaggtcgtcatgcaatacgccgactccggcagccactttgtccctcgggaggccaccaagaaagctgagagcagccggctgcagcaggccatccaggccaaggaggtcctgaacggtgagatggagaagagccggcggtacggggccccgtcctcagccgacctgggcctgggcaaggcaggcggcaagtcggttcctcacccgtacgagtccaggcacgtggtggtccacccgagcccctcagactacagcagtcgtgatccttcgggggtccgggcctctgtgatggtcctgcccaacagcaacacgcccgcagctgacctggaggtgcaacaggccactcatcgtgaagcctccccttctaccctcaacgacaaaagtggcctgcatttagggaagcctggccaccggtcctacgcgctctcaccccacacggtcattcagaccacacacagtgcttcagagccactcccggtgggactgccagccacggccttctacgcagggactcaaccccctgtcatcggctacctgagcggccagcagcaagcaatcacctacgccggcagcctgccccagcacctggtgatccccggcacacagcccctgctcatcccggtcggcagcactgacatggaagcgtcgggggcagccccggccatagtcacgtcatccccccagtttgctgcagtgcctcacacgttcgtcaccaccgcccttcccaagagcgagaacttcaaccctgaggccctggtcacccaggccgcctacccagccatggtgcaggcccagatccacctgcctgtggtgcagtccgtggcctccccggcggcggctccccctacgctgcctccctacttcatgaaaggctccatcatccagttggccaacggggagctaaagaaggtggaagacttaaaaacagaagatttcatccagagtgcagagataagcaacgacctgaagatcgactccagcaccgtagagaggattgaagacagccatagcccgggcgtggccgtgatacagttcgccgtcggggagcaccgagcccaggtcagcgttgaagttttggtagagtatcctttttttgtgtttggacagggctggtcatcctgctgtccggagagaaccagccagctctttgatttgccgtgttccaaactctcagttggggatgtctgcatctcgcttaccctcaagaacctgaagaacggctctgttaaaaagggccagcccgtggatcccgccagcgtcctgctgaagcactcaaaggccgacggcctggcgggcagcagacacaggtatgccgagcaggaaaacggaatcaaccaggggagtgcccagatgctctctgagaatggcgaactgaagtttccagagaaaatgggattgcctgcagcgcccttcctcaccaaaatagaacccagcaagcccgcggcaacgaggaagaggaggtggtcggcgccagagagccgcaaactggagaagtcagaagacgaaccacctttgactcttcctaagccttctctaattcctcaggaggttaagatttgcattgaaggccggtctaatgtaggcaagtagaggcagcgtgggggaaaggaaacgtggctctcccttatcatttgtatccagattactgtactgtaggctaaaataacacagtatttacatgttatcttcttaattttaggtttctgttctaaccttgtcattagagttacagcaggtgtgtcgcaggagactggtgcatatgctttttccacgagtgtctgtcagtgagcgggcgggaggaagggcacagcaggagcggtcagggctccaggcatccccggggaagaaaggaacggggcttcacagtgcctgccttctctagcggcacagaagcagccgggggcgctgactcccgctagtgtcaggagaaaagtcccgtgggaagggtcctgcaggggtgcagggttgcacgcatgtgggggtgcacaggcgctgtggcggcgagtgagggtctctttttctctgcctccctctgcctcactctcttgctatcggcatgggccgggggggttcagagcagtgtcctcctggggttcccacgtgcaaaatcaacatcaggaacccagcttcagggcatcgcggagacgcgtcagatggcagatttggaaagttaaccatttaaaagaacatttttctctccaacatattttacaataaaagcaacttttaattgtatagatatatatttccccctatggggcctgactgcactgatatatattttttttaaagagcaactgccacatgcgggatttcatttctgctttttactagtgcagcgatgtcaccagggtgttgtggtggacagggaagcccctgctgtcatggccccacatggggtaaggggggttgggggtgggggagagggagagagcgaacacccacgctggtttctgtgcagtgttaggaaaaccaatcaggttattgcattgacttcactcccaagaggtagatgcaaactgcccttcagtgagagcaacagaagctcttcacgttgagtttgcgaaatctttttgtctttgaactctagtactgtttatagttcatgactatggacaactcgggtgccactttttttttttttcagattccagtgtgacatgaggaattagattttgaagatgagcatatattactatctttaagcatttaaaaatactgttcacactttattaccaagcatcttggtctctcattcaacaagtactgtatctcactttaaactctttggggaaaaaacaaaaacaaaaaaaactaagttgctttctttttttcaacactgtaactacatttcagctctgcagaattgctgaagagcaagatattgaaagtttcaatgtggtttaaagggatgaatgtgaattatgaactagtatgtgacaataaatgaccaccaagtactacctgacgggaggcacttttcactttgatgtctgagaatcagttcaaggcatatgcagagttggcagagaaactgagagaaaagggatggagaagagaatactcatttttgtccagtgtttttctttttaagatgaacttttaaagaaccttgcgatttgcacatattgagtttataacttgtgtgatattcctgcagtttttatccaataacattgtgggaaaggtttgggggactgaacgagcataaataaatgtagcaaaatttctttctaacctgcctaaactctaggccattttataaggttatgttcctttgaaaattcattttggtctttttaccacatctgtcacaaaaagccaggtcttagcgggctcttagaaactctgagaattttcttcagattcattgagagagttttccataaagacatttatatatgtgagcaagattttttttaaacaattactttattattgttgttattaatgttattttcagaatggcttttttttttctattcaaaatcaaatcgagatttaatgtttggtacaaacccagaaagggtatttcatagtttttaaacctttcattcccagagatccgaaatatcatttgtgggttttgaatgcatctttaaagtgctttaaaaaaaagttttataagtagggagaaatttttaaatattcttacttggatggctgcaactaaactgaacaaatacctgacttttcttttaccccattgaaaatagtactttcttcgtttcacaaattaaaaaaaaaatctggtatcaacccacattttggctgtctagtattcatttacatttagggttcaccaggactaatgatttttataaaccgttttctggggtgtaccaaaaacatttgaataggtttagaatagctagaatagttccttgactttcctcgaatttcattaccctctcagcatgcttgcagagagctgggtgggctcattcttgcagtcatactgcttatttagtgctgtattttttaaacgtttctgttcagagaacttgcttaatcttccatatattctgctcagggcacttgcaattattaggttttgtttttctttttgttttttagcctttgatggtaagaggaatacgggctgccacatagactttgttctcattaatatcactatttacaactcatgtggactcagaaaaacacacaccaccttttggcttacttcgagtattgaattgactggatccactaaaccaacactaagatgggaaaacacacatggtttggagcaataggaacatcatcataatttttgtggttctatttcaggtataggaattataaaataattggttctttctaaacacttgtcccatttcattctcttgcttttttagcatgtgcaatactttctgtgccaatagagtctgaccagtgtgctatatagttaaagctcattcccttttggctttttccttgtttggttgatcttccccattctggccagagcagggctggagggaaggagccaggagggagagagcctcccacctttcccctgctgcggatgctgagtgctggggcggggagccttcaggagccccgtgcgtctgccgccacgttgcagaaagagccagccaaggagacccgggggaggaaccgcagtgtcccctgtcaccacacggaatagtgaatgtggagtgtggagaggaaggaggcagattcatttctaagacgcactctggagccatgtagcctggagtcaacccattttccacggtcttttctgcaagtgggcaggcccctcctcggggtctgtgtccttgagacttggagccctgcctctgagcctggacgggaagtgtggcctgttgtgtgtgtgcgttctgagcgtgttggccagtggctgtggaggggaccacctgccacccacggtcaccactcccttgtggcagctttctcttcaaataggaagaacgcacagagggcaggagcctcctgtttgcagacgttggcgggccccgaggctcccagagcagcctctgtcaccgcttctgtgtagcaaacattaacgatgacaggggtagaaattcttcggtgccgttcagcttacaaggatcagccatgtgcctctgtactatgtccactttgcaatatttaccgacagccgtcttttgttctttctttcctgttttccatttttaaactagtaacagcaggccttttgcgtttacaatggaacacaatcaccaagaaattagtcagggcgaaaagaaaaaaataatactattaataagaaaccaacaaacaagaacctctctttctagggatttctaaatatataaaatgactgttccttagaatgtttaacttaagaattatttcagtttgtctgggccacactggggcagaggggggagggagggatacagagatggatgccacttacctcagatcttttaaagtggaaatccaaattgaattttcatttggactttcaggataattttctatgttggtcaacttttcgttttccctaactcacccagtttagtttgggatgatttgatttctgttgttgttgatcccatttctaacttggaattgtgagcctctatgttttctgttaggtgagtgtgttgggttttttccccccaccaggaagtggcagcatccctccttctcccctaaagggactctgcggaacctttcacacctctttctcagggacggggcaggtgtgtgtgtggtacactgacgtgtccagaagcagcactttgactgctctggagtagggttgtacaatttcaaggaatgtttggatttcctgcatcttgtggattactccttagataccgcatagattgcaatataatgctgcatgttcaagatgaacagtagctcctagtaatcataaaatccactctttgcacagtttgatctttactgaaatatgttgccaaaatttatttttgttgttgtagctctggattttgttttgttttgttttttaaggaaacgattgacaataccctttaacatctgtgactactaaggaaacctatttctttcatagagagaaaaatctccaatgcttttgaagacactaataccgtgctatttcagatatgggtgaggaagcagagctctcggtaccgaaggccgggcttcttgagctgtgttggttgtcatggctactgtttcatgaaccacaagcagctcaacagactggtctgttgccttctgaaaccctttgcacttcaatttgcaccaggtgaaaacagggccagcagactccatggcccaattcggtttcttcggtggtgatgtgaaaggagagaattacactttttttttttttaagtggcgtggaggcctttgcttccacatttgtttttaacccagaatttctgaaatagagaatttaagaacacatcaagtaataaatatacagagaatatacttttttataaagcacatgcatctgctattgtgttgggttggtttcctctcttttccacggacagtgttgtgtttctggcatagggaaactccaaacaacttgcacacctctactccggagctgagatttcttttacatagatgacctcgcttcaaatacgttaccttactgatgataggatcttttcttgtagcactataccttgtgggaatttttttttaaatgtacacctgatttgagaagctgaagaaaacaaaattttgaagcactcactttgaggagtacaggtaatgttttaaaaaattgcacaaaagaaaaatgaatgtcgaaatgattcattcagtgtttgaaagatatggctctgttgaaacaatgagtttcatactttgtttgtaaaaaaaaaaaagcagagaagggttgaaagttacatgtttttttgtatatagaaatttgtcatgtctaaatgatcagatttgtatggttatggcctggaagaattactacgtaaaaggctcttaaactatacctatgcttattgttatttttgttacatatagccctcgtctgagggaggggaactcggtattctgcgatttgagaatactgttcattcctatgctgaaagtacttctctgagctcccttcttagtctaaactcttaagccattgcaacttctttttcttcagagatgatgtttgacattttcagcacttcctgttcctataaacccaaagaatataatcttgaacacgaagtgtttgtaacaagggatccaggctaccaatcaaacaggactcattatggggacaaaaaaaaaaattatttcaccttctttccccccacacctcatttaaatggggggagtaaaaacatgatttcaatgtaaatgcctcattttattttagttttattttgatttttatttaatataaagaggccagaataaatacggagcatcttctcagaatagtattcctgtccaaaaatcaagccggacagtggaaactggacagctgtggggatattaagcacccccacttacaattcttaaattcagaatctcgtcccctcccttctcgttgaaggcaactgttctggtagctaactttctcctgtgtaatggcgggagggaacaccggcttcagtttttcatgtccccatgacttgcatacaaatggttcaactgtattaaaattaagtgcatttggccaataggtagtatctatacaataacaacaatctctaagaatttccataacttttcttatctgaaaggactcaagtcttccactgcagatacattggaggcttcacccacgttttctttccctttagtttgtttgctgtctggatggccaatgagcctgtctccttttctgtggccaatctgaaggccttcgttggaagtgttgtttacagtaatccttaccaagataacatactgtcctccagaataccaagtattaggtgacactagctcaagctgttgtcttcagagcagttaccaagaagctcggtgcacaggttttctctggttcttacaggaaccacctactctttcagttttctggcccaggagtggggtaaatcctttagttagtgcatttgaacttgatacctgtgcattcagttctgtgaatactgccctttttggcggggtttcctcatctccccagcctgaactgctcaactctaaacccaaattagtgtcagccgaaaggaggtttcaagatagtcctgtcagtatttgtggtgaccttcagattagacagtcttcatttccagccagtggagtcctggctccagagccatctctgagactcgtactactggatgttttaatatcagatcattacccaccatatgcctcccacaggccaagggaaaacagacaccagaacttgggttgagggcactaccagactgacatggccagtacagaggagaactagggaaggaatgatgttttgcaccttattgaaaagaaaattttaagtgcatacataatagttaagagcttttattgtgacaggagaacttttttccatatgcgtgcatactctctgtaattccagtgtaaaatattgtacttgcactagcttttttaaacaaatattaaaaaatggaagaattcatattctattttctaatcgtggtgtgtctatttgtaggatacactcgagtctgtttattgaattttatggtccctttctttgatggtgcttgcaggttttctaggtagaaattatttcattattataataaaacaatgtttgattcaaaatttgaacaaaattgttttaaataaattgtctgtataccagtacaagtttattgtttcagtatactcgtactaataaaataacagtgccaattgca

SEQ ID NO: 2591 - DNA, 10587 bp, Homo sapiens
  source 1..10587: mol_type = unassigned DNA
gaggagagagcagagtataccgcagacatcatttctactacagtggcggagccgtacaggacctgtttcactgcagggggatccaaaacaagccccgtggagcagcagccagagcaacagcagccgcaagacattgtttctctccctctgcccccccttccccacgcaaccccagatccatttacactttacagagcatcgtgcatcaagtcaccagggtggtccattcaagctgcagatttgtttgtcatccttgtacagcaatctcctcctccactgccactacagggaagtgcatcacatgtcagcatactggagcatagtgaaagagtctattttgaagcttcaaacttagtgctgctgcagaccaggaacaagagagaaagagtggatttcagcctgcacggatggtcttgaaacacaaatggtttttggtctaggcgttttacactgagattctccactgccaccctttctactcaagcaaaatcttcgtgaaaagatctgctgcaaggaactgatagcttatggttctccattgtgatgaaagcacatggtacagttttccaaagaaattagaccattttcttcgtgagaaagaaatcgacgtgctgttttcatagggtatttctcacttctctgtgaaaggaagaaagaacacgcctgagcccaagagccctcaggagccctccagagcctgtgggaagtctccatggtgaagtataggctgaggctacctgtgaacagtacgcagtgaatgttcatccagagctgctgttggcggattgtacccacggggagatgattcctcatgaagagcctggatcccctacagaaatcaaatgtgactttccgtttatcagactaaaatcagagccatccagacagtgaaacagtcaccgtggaggggggacggcgaaaaatgaaatccaaccaagagcggagcaacgaatgcctgcctcccaagaagcgcgagatccccgccaccagccggtcctccgaggagaaggcccctaccctgcccagcgacaaccaccgggtggagggcacagcatggctcccgggcaaccctggtggccggggccacgggggcgggaggcatgggccggcagggacctcggtggagcttggtttacaacagggaataggtttacacaaagcattgtccacagggctggactactccccgcccagcgctcccaggtctgtccccgtggccaccacgctgcctgccgcgtacgccaccccgcagccagggaccccggtgtcccccgtgcagtacgctcacctgccgcacaccttccagttcattgggtcctcccaatacagtggaacctatgccagcttcatcccatcacagctgatccccccaaccgccaaccccgtcaccagtgcagtggcctcggccgcaggggccaccactccatcccagcgctcccagctggaggcctattccactctgctggccaacatgggcagtctgagccagacgccgggacacaaggctgagcagcagcagcagcagcagcagcagcagcagcagcagcatcagcatcagcagcagcagcagcagcagcagcagcagcagcagcagcagcacctcagcagggctccggggctcatcaccccggggtcccccccaccagcccagcagaaccagtacgtccacatttccagttctccgcagaacaccggccgcaccgcctctcctccggccatccccgtccacctccacccccaccagacgatgatcccacacacgctcaccctggggcccccctcccaggtcgtcatgcaatacgccgactccggcagccactttgtccctcgggaggccaccaagaaagctgagagcagccggctgcagcaggccatccaggccaaggaggtcctgaacggtgagatggagaagagccggcggtacggggccccgtcctcagccgacctgggcctgggcaaggcaggcggcaagtcggttcctcacccgtacgagtccaggcacgtggtggtccacccgagcccctcagactacagcagtcgtgatccttcgggggtccgggcctctgtgatggtcctgcccaacagcaacacgcccgcagctgacctggaggtgcaacaggccactcatcgtgaagcctccccttctaccctcaacgacaaaagtggcctgcatttagggaagcctggccaccggtcctacgcgctctcaccccacacggtcattcagaccacacacagtgcttcagagccactcccggtgggactgccagccacggccttctacgcagggactcaaccccctgtcatcggctacctgagcggccagcagcaagcaatcacctacgccggcagcctgccccagcacctggtgatccccggcacacagcccctgctcatcccggtcggcagcactgacatggaagcgtcgggggcagccccggccatagtcacgtcatccccccagtttgctgcagtgcctcacacgttcgtcaccaccgcccttcccaagagcgagaacttcaaccctgaggccctggtcacccaggccgcctacccagccatggtgcaggcccagatccacctgcctgtggtgcagtccgtggcctccccggcggcggctccccctacgctgcctccctacttcatgaaaggctccatcatccagttggccaacggggagctaaagaaggtggaagacttaaaaacagaagatttcatccagagtgcagagataagcaacgacctgaagatcgactccagcaccgtagagaggattgaagacagccatagcccgggcgtggccgtgatacagttcgccgtcggggagcaccgagcccaggtcagcgttgaagttttggtagagtatcctttttttgtgtttggacagggctggtcatcctgctgtccggagagaaccagccagctctttgatttgccgtgttccaaactctcagttggggatgtctgcatctcgcttaccctcaagaacctgaagaacggctctgttaaaaagggccagcccgtggatcccgccagcgtcctgctgaagcactcaaaggccgacggcctggcgggcagcagacacaggtatgccgagcaggaaaacggaatcaaccaggggagtgcccagatgctctctgagaatggcgaactgaagtttccagagaaaatgggattgcctgcagcgcccttcctcaccaaaatagaacccagcaagcccgcggcaacgaggaagaggaggtggtcggcgccagagagccgcaaactggagaagtcagaagacgaaccacctttgactcttcctaagccttctctaattcctcaggaggttaagatttgcattgaaggccggtctaatgtaggcaagtagaggcagcgtgggggaaaggaaacgtggctctcccttatcatttgtatccagattactgtactgtaggctaaaataacacagtatttacatgttatcttcttaattttaggtttctgttctaaccttgtcattagagttacagcaggtgtgtcgcaggagactggtgcatatgctttttccacgagtgtctgtcagtgagcgggcgggaggaagggcacagcaggagcggtcagggctccaggcatccccggggaagaaaggaacggggcttcacagtgcctgccttctctagcggcacagaagcagccgggggcgctgactcccgctagtgtcaggagaaaagtcccgtgggaagggtcctgcaggggtgcagggttgcacgcatgtgggggtgcacaggcgctgtggcggcgagtgagggtctctttttctctgcctccctctgcctcactctcttgctatcggcatgggccgggggggttcagagcagtgtcctcctggggttcccacgtgcaaaatcaacatcaggaacccagcttcagggcatcgcggagacgcgtcagatggcagatttggaaagttaaccatttaaaagaacatttttctctccaacatattttacaataaaagcaacttttaattgtatagatatatatttccccctatggggcctgactgcactgatatatattttttttaaagagcaactgccacatgcgggatttcatttctgctttttactagtgcagcgatgtcaccagggtgttgtggtggacagggaagcccctgctgtcatggccccacatggggtaaggggggttgggggtgggggagagggagagagcgaacacccacgctggtttctgtgcagtgttaggaaaaccaatcaggttattgcattgacttcactcccaagaggtagatgcaaactgcccttcagtgagagcaacagaagctcttcacgttgagtttgcgaaatctttttgtctttgaactctagtactgtttatagttcatgactatggacaactcgggtgccactttttttttttttcagattccagtgtgacatgaggaattagattttgaagatgagcatatattactatctttaagcatttaaaaatactgttcacactttattaccaagcatcttggtctctcattcaacaagtactgtatctcactttaaactctttggggaaaaaacaaaaacaaaaaaaactaagttgctttctttttttcaacactgtaactacatttcagctctgcagaattgctgaagagcaagatattgaaagtttcaatgtggtttaaagggatgaatgtgaattatgaactagtatgtgacaataaatgaccaccaagtactacctgacgggaggcacttttcactttgatgtctgagaatcagttcaaggcatatgcagagttggcagagaaactgagagaaaagggatggagaagagaatactcatttttgtccagtgtttttctttttaagatgaacttttaaagaaccttgcgatttgcacatattgagtttataacttgtgtgatattcctgcagtttttatccaataacattgtgggaaaggtttgggggactgaacgagcataaataaatgtagcaaaatttctttctaacctgcctaaactctaggccattttataaggttatgttcctttgaaaattcattttggtctttttaccacatctgtcacaaaaagccaggtcttagcgggctcttagaaactctgagaattttcttcagattcattgagagagttttccataaagacatttatatatgtgagcaagattttttttaaacaattactttattattgttgttattaatgttattttcagaatggcttttttttttctattcaaaatcaaatcgagatttaatgtttggtacaaacccagaaagggtatttcatagtttttaaacctttcattcccagagatccgaaatatcatttgtgggttttgaatgcatctttaaagtgctttaaaaaaaagttttataagtagggagaaatttttaaatattcttacttggatggctgcaactaaactgaacaaatacctgacttttcttttaccccattgaaaatagtactttcttcgtttcacaaattaaaaaaaaaatctggtatcaacccacattttggctgtctagtattcatttacatttagggttcaccaggactaatgatttttataaaccgttttctggggtgtaccaaaaacatttgaataggtttagaatagctagaatagttccttgactttcctcgaatttcattaccctctcagcatgcttgcagagagctgggtgggctcattcttgcagtcatactgcttatttagtgctgtattttttaaacgtttctgttcagagaacttgcttaatcttccatatattctgctcagggcacttgcaattattaggttttgtttttctttttgttttttagcctttgatggtaagaggaatacgggctgccacatagactttgttctcattaatatcactatttacaactcatgtggactcagaaaaacacacaccaccttttggcttacttcgagtattgaattgactggatccactaaaccaacactaagatgggaaaacacacatggtttggagcaataggaacatcatcataatttttgtggttctatttcaggtataggaattataaaataattggttctttctaaacacttgtcccatttcattctcttgcttttttagcatgtgcaatactttctgtgccaatagagtctgaccagtgtgctatatagttaaagctcattcccttttggctttttccttgtttggttgatcttccccattctggccagagcagggctggagggaaggagccaggagggagagagcctcccacctttcccctgctgcggatgctgagtgctggggcggggagccttcaggagccccgtgcgtctgccgccacgttgcagaaagagccagccaaggagacccgggggaggaaccgcagtgtcccctgtcaccacacggaatagtgaatgtggagtgtggagaggaaggaggcagattcatttctaagacgcactctggagccatgtagcctggagtcaacccattttccacggtcttttctgcaagtgggcaggcccctcctcggggtctgtgtccttgagacttggagccctgcctctgagcctggacgggaagtgtggcctgttgtgtgtgtgcgttctgagcgtgttggccagtggctgtggaggggaccacctgccacccacggtcaccactcccttgtggcagctttctcttcaaataggaagaacgcacagagggcaggagcctcctgtttgcagacgttggcgggccccgaggctcccagagcagcctctgtcaccgcttctgtgtagcaaacattaacgatgacaggggtagaaattcttcggtgccgttcagcttacaaggatcagccatgtgcctctgtactatgtccactttgcaatatttaccgacagccgtcttttgttctttctttcctgttttccatttttaaactagtaacagcaggccttttgcgtttacaatggaacacaatcaccaagaaattagtcagggcgaaaagaaaaaaataatactattaataagaaaccaacaaacaagaacctctctttctagggatttctaaatatataaaatgactgttccttagaatgtttaacttaagaattatttcagtttgtctgggccacactggggcagaggggggagggagggatacagagatggatgccacttacctcagatcttttaaagtggaaatccaaattgaattttcatttggactttcaggataattttctatgttggtcaacttttcgttttccctaactcacccagtttagtttgggatgatttgatttctgttgttgttgatcccatttctaacttggaattgtgagcctctatgttttctgttaggtgagtgtgttgggttttttccccccaccaggaagtggcagcatccctccttctcccctaaagggactctgcggaacctttcacacctctttctcagggacggggcaggtgtgtgtgtggtacactgacgtgtccagaagcagcactttgactgctctggagtagggttgtacaatttcaaggaatgtttggatttcctgcatcttgtggattactccttagataccgcatagattgcaatataatgctgcatgttcaagatgaacagtagctcctagtaatcataaaatccactctttgcacagtttgatctttactgaaatatgttgccaaaatttatttttgttgttgtagctctggattttgttttgttttgttttttaaggaaacgattgacaataccctttaacatctgtgactactaaggaaacctatttctttcatagagagaaaaatctccaatgcttttgaagacactaataccgtgctatttcagatatgggtgaggaagcagagctctcggtaccgaaggccgggcttcttgagctgtgttggttgtcatggctactgtttcatgaaccacaagcagctcaacagactggtctgttgccttctgaaaccctttgcacttcaatttgcaccaggtgaaaacagggccagcagactccatggcccaattcggtttcttcggtggtgatgtgaaaggagagaattacactttttttttttttaagtggcgtggaggcctttgcttccacatttgtttttaacccagaatttctgaaatagagaatttaagaacacatcaagtaataaatatacagagaatatacttttttataaagcacatgcatctgctattgtgttgggttggtttcctctcttttccacggacagtgttgtgtttctggcatagggaaactccaaacaacttgcacacctctactccggagctgagatttcttttacatagatgacctcgcttcaaatacgttaccttactgatgataggatcttttcttgtagcactataccttgtgggaatttttttttaaatgtacacctgatttgagaagctgaagaaaacaaaattttgaagcactcactttgaggagtacaggtaatgttttaaaaaattgcacaaaagaaaaatgaatgtcgaaatgattcattcagtgtttgaaagatatggctctgttgaaacaatgagtttcatactttgtttgtaaaaaaaaaaaagcagagaagggttgaaagttacatgtttttttgtatatagaaatttgtcatgtctaaatgatcagatttgtatggttatggcctggaagaattactacgtaaaaggctcttaaactatacctatgcttattgttatttttgttacatatagccctcgtctgagggaggggaactcggtattctgcgatttgagaatactgttcattcctatgctgaaagtacttctctgagctcccttcttagtctaaactcttaagccattgcaacttctttttcttcagagatgatgtttgacattttcagcacttcctgttcctataaacccaaagaatataatcttgaacacgaagtgtttgtaacaagggatccaggctaccaatcaaacaggactcattatggggacaaaaaaaaaaattatttcaccttctttccccccacacctcatttaaatggggggagtaaaaacatgatttcaatgtaaatgcctcattttattttagttttattttgatttttatttaatataaagaggccagaataaatacggagcatcttctcagaatagtattcctgtccaaaaatcaagccggacagtggaaactggacagctgtggggatattaagcacccccacttacaattcttaaattcagaatctcgtcccctcccttctcgttgaaggcaactgttctggtagctaactttctcctgtgtaatggcgggagggaacaccggcttcagtttttcatgtccccatgacttgcatacaaatggttcaactgtattaaaattaagtgcatttggccaataggtagtatctatacaataacaacaatctctaagaatttccataacttttcttatctgaaaggactcaagtcttccactgcagatacattggaggcttcacccacgttttctttccctttagtttgtttgctgtctggatggccaatgagcctgtctccttttctgtggccaatctgaaggccttcgttggaagtgttgtttacagtaatccttaccaagataacatactgtcctccagaataccaagtattaggtgacactagctcaagctgttgtcttcagagcagttaccaagaagctcggtgcacaggttttctctggttcttacaggaaccacctactctttcagttttctggcccaggagtggggtaaatcctttagttagtgcatttgaacttgatacctgtgcattcagttctgtgaatactgccctttttggcggggtttcctcatctccccagcctgaactgctcaactctaaacccaaattagtgtcagccgaaaggaggtttcaagatagtcctgtcagtatttgtggtgaccttcagattagacagtcttcatttccagccagtggagtcctggctccagagccatctctgagactcgtactactggatgttttaatatcagatcattacccaccatatgcctcccacaggccaagggaaaacagacaccagaacttgggttgagggcactaccagactgacatggccagtacagaggagaactagggaaggaatgatgttttgcaccttattgaaaagaaaattttaagtgcatacataatagttaagagcttttattgtgacaggagaacttttttccatatgcgtgcatactctctgtaattccagtgtaaaatattgtacttgcactagcttttttaaacaaatattaaaaaatggaagaattcatattctattttctaatcgtggtgtgtctatttgtaggatacactcgagtctgtttattgaattttatggtccctttctttgatggtgcttgcaggttttctaggtagaaattatttcattattataataaaacaatgtttgattcaaaatttgaacaaaattgttttaaataaattgtctgtataccagtacaagtttattgtttcagtatactcgtactaataaaataacagtgccaattgca

SEQ ID NO: 2592 - DNA, 10636 bp, Homo sapiens
  source 1..10636: mol_type = unassigned DNA
gaggagagagcagagtataccgcagacatcatttctactacagtggcggagccgtacaggacctgtttcactgcagggggatccaaaacaagccccgtggagcagcagccagagcaacagcagccgcaagacattgtttctctccctctgcccccccttccccacgcaaccccagatccatttacactttacagttttacctcacaaaaactactacaagcaccaagctccctgatggaaaggagcatcgtgcatcaagtcaccagggtggtccattcaagctgcagatttgtttgtcatccttgtacagcaatctcctcctccactgccactacagggaagtgcatcacatgtcagcatactggagcatagtgaaagagtctattttgaagcttcaaacttagtgctgctgcagaccaggaacaagagagaaagagtggatttcagcctgcacggatggtcttgaaacacaaatggtttttggtctaggcgttttacactgagattctccactgccaccctttctactcaagcaaaatcttcgtgaaaagatctgctgcaaggaactgatagcttatggttctccattgtgatgaaagcacatggtacagttttccaaagaaattagaccattttcttcgtgagaaagaaatcgacgtgctgttttcatagggtatttctcacttctctgtgaaaggaagaaagaacacgcctgagcccaagagccctcaggagccctccagagcctgtgggaagtctccatggtgaagtataggctgaggctacctgtgaacagtacgcagtgaatgttcatccagagctgctgttggcggattgtacccacggggagatgattcctcatgaagagcctggatcccctacagaaatcaaatgtgactttccgtttatcagactaaaatcagagccatccagacagtgaaacagtcaccgtggaggggggacggcgaaaaatgaaatccaaccaagagcggagcaacgaatgcctgcctcccaagaagcgcgagatccccgccaccagccggtcctccgaggagaaggcccctaccctgcccagcgacaaccaccgggtggagggcacagcatggctcccgggcaaccctggtggccggggccacgggggcgggaggcatgggccggcagggacctcggtggagcttggtttacaacagggaataggtttacacaaagcattgtccacagggctggactactccccgcccagcgctcccaggtctgtccccgtggccaccacgctgcctgccgcgtacgccaccccgcagccagggaccccggtgtcccccgtgcagtacgctcacctgccgcacaccttccagttcattgggtcctcccaatacagtggaacctatgccagcttcatcccatcacagctgatccccccaaccgccaaccccgtcaccagtgcagtggcctcggccgcaggggccaccactccatcccagcgctcccagctggaggcctattccactctgctggccaacatgggcagtctgagccagacgccgggacacaaggctgagcagcagcagcagcagcagcagcagcagcagcagcagcatcagcatcagcagcagcagcagcagcagcagcagcagcagcagcagcagcacctcagcagggctccggggctcatcaccccggggtcccccccaccagcccagcagaaccagtacgtccacatttccagttctccgcagaacaccggccgcaccgcctctcctccggccatccccgtccacctccacccccaccagacgatgatcccacacacgctcaccctggggcccccctcccaggtcgtcatgcaatacgccgactccggcagccactttgtccctcgggaggccaccaagaaagctgagagcagccggctgcagcaggccatccaggccaaggaggtcctgaacggtgagatggagaagagccggcggtacggggccccgtcctcagccgacctgggcctgggcaaggcaggcggcaagtcggttcctcacccgtacgagtccaggcacgtggtggtccacccgagcccctcagactacagcagtcgtgatccttcgggggtccgggcctctgtgatggtcctgcccaacagcaacacgcccgcagctgacctggaggtgcaacaggccactcatcgtgaagcctccccttctaccctcaacgacaaaagtggcctgcatttagggaagcctggccaccggtcctacgcgctctcaccccacacggtcattcagaccacacacagtgcttcagagccactcccggtgggactgccagccacggccttctacgcagggactcaaccccctgtcatcggctacctgagcggccagcagcaagcaatcacctacgccggcagcctgccccagcacctggtgatccccggcacacagcccctgctcatcccggtcggcagcactgacatggaagcgtcgggggcagccccggccatagtcacgtcatccccccagtttgctgcagtgcctcacacgttcgtcaccaccgcccttcccaagagcgagaacttcaaccctgaggccctggtcacccaggccgcctacccagccatggtgcaggcccagatccacctgcctgtggtgcagtccgtggcctccccggcggcggctccccctacgctgcctccctacttcatgaaaggctccatcatccagttggccaacggggagctaaagaaggtggaagacttaaaaacagaagatttcatccagagtgcagagataagcaacgacctgaagatcgactccagcaccgtagagaggattgaagacagccatagcccgggcgtggccgtgatacagttcgccgtcggggagcaccgagcccaggtcagcgttgaagttttggtagagtatcctttttttgtgtttggacagggctggtcatcctgctgtccggagagaaccagccagctctttgatttgccgtgttccaaactctcagttggggatgtctgcatctcgcttaccctcaagaacctgaagaacggctctgttaaaaagggccagcccgtggatcccgccagcgtcctgctgaagcactcaaaggccgacggcctggcgggcagcagacacaggtatgccgagcaggaaaacggaatcaaccaggggagtgcccagatgctctctgagaatggcgaactgaagtttccagagaaaatgggattgcctgcagcgcccttcctcaccaaaatagaacccagcaagcccgcggcaacgaggaagaggaggtggtcggcgccagagagccgcaaactggagaagtcagaagacgaaccacctttgactcttcctaagccttctctaattcctcaggaggttaagatttgcattgaaggccggtctaatgtaggcaagtagaggcagcgtgggggaaaggaaacgtggctctcccttatcatttgtatccagattactgtactgtaggctaaaataacacagtatttacatgttatcttcttaattttaggtttctgttctaaccttgtcattagagttacagcaggtgtgtcgcaggagactggtgcatatgctttttccacgagtgtctgtcagtgagcgggcgggaggaagggcacagcaggagcggtcagggctccaggcatccccggggaagaaaggaacggggcttcacagtgcctgccttctctagcggcacagaagcagccgggggcgctgactcccgctagtgtcaggagaaaagtcccgtgggaagggtcctgcaggggtgcagggttgcacgcatgtgggggtgcacaggcgctgtggcggcgagtgagggtctctttttctctgcctccctctgcctcactctcttgctatcggcatgggccgggggggttcagagcagtgtcctcctggggttcccacgtgcaaaatcaacatcaggaacccagcttcagggcatcgcggagacgcgtcagatggcagatttggaaagttaaccatttaaaagaacatttttctctccaacatattttacaataaaagcaacttttaattgtatagatatatatttccccctatggggcctgactgcactgatatatattttttttaaagagcaactgccacatgcgggatttcatttctgctttttactagtgcagcgatgtcaccagggtgttgtggtggacagggaagcccctgctgtcatggccccacatggggtaaggggggttgggggtgggggagagggagagagcgaacacccacgctggtttctgtgcagtgttaggaaaaccaatcaggttattgcattgacttcactcccaagaggtagatgcaaactgcccttcagtgagagcaacagaagctcttcacgttgagtttgcgaaatctttttgtctttgaactctagtactgtttatagttcatgactatggacaactcgggtgccactttttttttttttcagattccagtgtgacatgaggaattagattttgaagatgagcatatattactatctttaagcatttaaaaatactgttcacactttattaccaagcatcttggtctctcattcaacaagtactgtatctcactttaaactctttggggaaaaaacaaaaacaaaaaaaactaagttgctttctttttttcaacactgtaactacatttcagctctgcagaattgctgaagagcaagatattgaaagtttcaatgtggtttaaagggatgaatgtgaattatgaactagtatgtgacaataaatgaccaccaagtactacctgacgggaggcacttttcactttgatgtctgagaatcagttcaaggcatatgcagagttggcagagaaactgagagaaaagggatggagaagagaatactcatttttgtccagtgtttttctttttaagatgaacttttaaagaaccttgcgatttgcacatattgagtttataacttgtgtgatattcctgcagtttttatccaataacattgtgggaaaggtttgggggactgaacgagcataaataaatgtagcaaaatttctttctaacctgcctaaactctaggccattttataaggttatgttcctttgaaaattcattttggtctttttaccacatctgtcacaaaaagccaggtcttagcgggctcttagaaactctgagaattttcttcagattcattgagagagttttccataaagacatttatatatgtgagcaagattttttttaaacaattactttattattgttgttattaatgttattttcagaatggcttttttttttctattcaaaatcaaatcgagatttaatgtttggtacaaacccagaaagggtatttcatagtttttaaacctttcattcccagagatccgaaatatcatttgtgggttttgaatgcatctttaaagtgctttaaaaaaaagttttataagtagggagaaatttttaaatattcttacttggatggctgcaactaaactgaacaaatacctgacttttcttttaccccattgaaaatagtactttcttcgtttcacaaattaaaaaaaaaatctggtatcaacccacattttggctgtctagtattcatttacatttagggttcaccaggactaatgatttttataaaccgttttctggggtgtaccaaaaacatttgaataggtttagaatagctagaatagttccttgactttcctcgaatttcattaccctctcagcatgcttgcagagagctgggtgggctcattcttgcagtcatactgcttatttagtgctgtattttttaaacgtttctgttcagagaacttgcttaatcttccatatattctgctcagggcacttgcaattattaggttttgtttttctttttgttttttagcctttgatggtaagaggaatacgggctgccacatagactttgttctcattaatatcactatttacaactcatgtggactcagaaaaacacacaccaccttttggcttacttcgagtattgaattgactggatccactaaaccaacactaagatgggaaaacacacatggtttggagcaataggaacatcatcataatttttgtggttctatttcaggtataggaattataaaataattggttctttctaaacacttgtcccatttcattctcttgcttttttagcatgtgcaatactttctgtgccaatagagtctgaccagtgtgctatatagttaaagctcattcccttttggctttttccttgtttggttgatcttccccattctggccagagcagggctggagggaaggagccaggagggagagagcctcccacctttcccctgctgcggatgctgagtgctggggcggggagccttcaggagccccgtgcgtctgccgccacgttgcagaaagagccagccaaggagacccgggggaggaaccgcagtgtcccctgtcaccacacggaatagtgaatgtggagtgtggagaggaaggaggcagattcatttctaagacgcactctggagccatgtagcctggagtcaacccattttccacggtcttttctgcaagtgggcaggcccctcctcggggtctgtgtccttgagacttggagccctgcctctgagcctggacgggaagtgtggcctgttgtgtgtgtgcgttctgagcgtgttggccagtggctgtggaggggaccacctgccacccacggtcaccactcccttgtggcagctttctcttcaaataggaagaacgcacagagggcaggagcctcctgtttgcagacgttggcgggccccgaggctcccagagcagcctctgtcaccgcttctgtgtagcaaacattaacgatgacaggggtagaaattcttcggtgccgttcagcttacaaggatcagccatgtgcctctgtactatgtccactttgcaatatttaccgacagccgtcttttgttctttctttcctgttttccatttttaaactagtaacagcaggccttttgcgtttacaatggaacacaatcaccaagaaattagtcagggcgaaaagaaaaaaataatactattaataagaaaccaacaaacaagaacctctctttctagggatttctaaatatataaaatgactgttccttagaatgtttaacttaagaattatttcagtttgtctgggccacactggggcagaggggggagggagggatacagagatggatgccacttacctcagatcttttaaagtggaaatccaaattgaattttcatttggactttcaggataattttctatgttggtcaacttttcgttttccctaactcacccagtttagtttgggatgatttgatttctgttgttgttgatcccatttctaacttggaattgtgagcctctatgttttctgttaggtgagtgtgttgggttttttccccccaccaggaagtggcagcatccctccttctcccctaaagggactctgcggaacctttcacacctctttctcagggacggggcaggtgtgtgtgtggtacactgacgtgtccagaagcagcactttgactgctctggagtagggttgtacaatttcaaggaatgtttggatttcctgcatcttgtggattactccttagataccgcatagattgcaatataatgctgcatgttcaagatgaacagtagctcctagtaatcataaaatccactctttgcacagtttgatctttactgaaatatgttgccaaaatttatttttgttgttgtagctctggattttgttttgttttgttttttaaggaaacgattgacaataccctttaacatctgtgactactaaggaaacctatttctttcatagagagaaaaatctccaatgcttttgaagacactaataccgtgctatttcagatatgggtgaggaagcagagctctcggtaccgaaggccgggcttcttgagctgtgttggttgtcatggctactgtttcatgaaccacaagcagctcaacagactggtctgttgccttctgaaaccctttgcacttcaatttgcaccaggtgaaaacagggccagcagactccatggcccaattcggtttcttcggtggtgatgtgaaaggagagaattacactttttttttttttaagtggcgtggaggcctttgcttccacatttgtttttaacccagaatttctgaaatagagaatttaagaacacatcaagtaataaatatacagagaatatacttttttataaagcacatgcatctgctattgtgttgggttggtttcctctcttttccacggacagtgttgtgtttctggcatagggaaactccaaacaacttgcacacctctactccggagctgagatttcttttacatagatgacctcgcttcaaatacgttaccttactgatgataggatcttttcttgtagcactataccttgtgggaatttttttttaaatgtacacctgatttgagaagctgaagaaaacaaaattttgaagcactcactttgaggagtacaggtaatgttttaaaaaattgcacaaaagaaaaatgaatgtcgaaatgattcattcagtgtttgaaagatatggctctgttgaaacaatgagtttcatactttgtttgtaaaaaaaaaaaagcagagaagggttgaaagttacatgtttttttgtatatagaaatttgtcatgtctaaatgatcagatttgtatggttatggcctggaagaattactacgtaaaaggctcttaaactatacctatgcttattgttatttttgttacatatagccctcgtctgagggaggggaactcggtattctgcgatttgagaatactgttcattcctatgctgaaagtacttctctgagctcccttcttagtctaaactcttaagccattgcaacttctttttcttcagagatgatgtttgacattttcagcacttcctgttcctataaacccaaagaatataatcttgaacacgaagtgtttgtaacaagggatccaggctaccaatcaaacaggactcattatggggacaaaaaaaaaaattatttcaccttctttccccccacacctcatttaaatggggggagtaaaaacatgatttcaatgtaaatgcctcattttattttagttttattttgatttttatttaatataaagaggccagaataaatacggagcatcttctcagaatagtattcctgtccaaaaatcaagccggacagtggaaactggacagctgtggggatattaagcacccccacttacaattcttaaattcagaatctcgtcccctcccttctcgttgaaggcaactgttctggtagctaactttctcctgtgtaatggcgggagggaacaccggcttcagtttttcatgtccccatgacttgcatacaaatggttcaactgtattaaaattaagtgcatttggccaataggtagtatctatacaataacaacaatctctaagaatttccataacttttcttatctgaaaggactcaagtcttccactgcagatacattggaggcttcacccacgttttctttccctttagtttgtttgctgtctggatggccaatgagcctgtctccttttctgtggccaatctgaaggccttcgttggaagtgttgtttacagtaatccttaccaagataacatactgtcctccagaataccaagtattaggtgacactagctcaagctgttgtcttcagagcagttaccaagaagctcggtgcacaggttttctctggttcttacaggaaccacctactctttcagttttctggcccaggagtggggtaaatcctttagttagtgcatttgaacttgatacctgtgcattcagttctgtgaatactgccctttttggcggggtttcctcatctccccagcctgaactgctcaactctaaacccaaattagtgtcagccgaaaggaggtttcaagatagtcctgtcagtatttgtggtgaccttcagattagacagtcttcatttccagccagtggagtcctggctccagagccatctctgagactcgtactactggatgttttaatatcagatcattacccaccatatgcctcccacaggccaagggaaaacagacaccagaacttgggttgagggcactaccagactgacatggccagtacagaggagaactagggaaggaatgatgttttgcaccttattgaaaagaaaattttaagtgcatacataatagttaagagcttttattgtgacaggagaacttttttccatatgcgtgcatactctctgtaattccagtgtaaaatattgtacttgcactagcttttttaaacaaatattaaaaaatggaagaattcatattctattttctaatcgtggtgtgtctatttgtaggatacactcgagtctgtttattgaattttatggtccctttctttgatggtgcttgcaggttttctaggtagaaattatttcattattataataaaacaatgtttgattcaaaatttgaacaaaattgttttaaataaattgtctgtataccagtacaagtttattgtttcagtatactcgtactaataaaataacagtgccaattgca

SEQ ID NO: 2593 - DNA, 3329 bp, Homo sapiens
  source 1..3329: mol_type = unassigned DNA
ggcgggacttccgccggcgccccctcccccgcggcgccgtctcctcctcccgcctgaggcgagtctgggctcagcctagagctctccggcggcggcgcagcttcagggcagcgcgggctgcagcggcggcggcggttagggctgtgtagggcgaggcctcccccttcctcctcgccatcctactcctccctcctcgtcatcctcccccttcgtcctcctcgccttcctcctcctcgtcaggctcgacccagctgtgagcggcaagatggcggcgcccaggccgccgcctgccaggctgtcgggcgtcatggtgccggcgcccatccaagacctggaggccctgcgcgcgctcacggcgctcttcaaagagcagcggaaccgagaaacagcacccaggactatcttccaaagagttctggatatcctaaagaaatcttctcatgctgttgagcttgcctgcagagatccatcccaagtggaaaacctggcttccagtctgcagttaataacagaatgcttcaggtgtcttcgcaatgcttgcatagagtgttctgtgaaccagaattcaatcaggaacttggatacgattggtgttgctgttgatttgattcttctgtttcgtgaactgcgagtggaacaggaatctctgttgacagcttttcgctgtggcctgcagtttttaggcaacattgcctcacggaatgaagattcccagtctattgtttgggtgcatgctttcccagaactgtttttgtcttgcttaaatcatccggacaaaaaaattgttgcctactcttcaatgattttgtttacatcccttaatcatgaaagaatgaaagaactggaggagaacctcaatattgcaattgatgtcatagatgcttaccaaaaacatcctgaatcagaatggccgttcttgattattacagacctctttctgaaaagcccggaattggtacaagccatgtttcccaaactgaacaatcaagaaagagttacactgttagaccttatgatagccaagataacgagtgatgagccactcaccaaggatgacatccctgtgtttttgcggcatgctgagttgattgcaagcacctttgtggatcagtgcaagactgtgctcaagctggcctctgaggagcctcctgatgatgaggaggcactggctacaattaggcttctcgacgtcctgtgcgaaatgactgtgaatactgagctgctcggctatctgcaggttttccctggcttgctggaaagagtgattgatcttttgcgggtgattcatgtagctggaaaagaaaccacaaacatcttcagtaattgtggttgcgtgagagcagaaggtgacatctccaatgtggccaatgggtttaagtctcatctcattcgtctgattggaaatctgtgttacaagaataaagataaccaagacaaggtaaatgagctggatggtatcccgttgatcctggacaactgcaacatcagtgacagtaacccctttctgacccagtgggtgatatatgccatccgaaaccttaccgaagacaacagccaaaaccaagatttgattgcaaagatggaggaacaggggctggcagatgcatccctacttaaaaaagtgggttttgaagttgaaaagaaaggcgaaaagctgatcctgaaatctactagagacacccctaagccatgaatgaactacatccaaatacctgaatttttggaatctgtttcatggatttttcatcttctaccgtatgtgaaattgcaagtgtttgaagatttataagtacaaatttgggaacatacaaatcttttaggtagtagagtttaacgtgtataagctaaaagtgaaagtaactgagtgttctcttgtttctttgcattaatgtaactgtgtggtttgcctttgtccccctggatagaacgtgcatttaaagaatatattgtacttactgtgacagcagataataaaccagtctcttggagggcacaacccttatttgacaaaacttggatgttggcttgactgtgtttgtcccttcagatggcaagtcagcatcattctttatattcctcttctcattgggttttctgaactctggcaggcggttgaagtagtttctcactgtgattaattctagcaatctcttttcacccctctgcctttccaaaacattgacaagactcatttccagttaattaattcgagaaccctccctcttcattttgggtactgggctgtcttgtcactgagccctatccctttggaatgtggcagggagtgaggttggtgagagaacatgtgggcacttaactcttcatgttccagttcatcccagaagtagacatcccaggacccattctgtgtcaaggtgaatgcctgtgtcctccccagcttcatgcctctgtcatgggggaaggaatagcttatgttctgctctggtgcagtgccgtagattaaaggtacatttctatcttctttgatttaaaaagcaccagtctcataaaggtgccactcagttttagccatgtcttcactgaaattgcaaaagtacttttagggagcaggagtttatttgacatctagttatctgtctgtctgttcatctatctatctgtctgctgtatgagaggtaggactggattaaatgaccactgaactcactgaatccagatcattcatatcatcaacaaaagctctagggggaggtcacgttgtgaatgcttaaaacatattattttcttcaacaaccatatcgctaaactaatatatccagagattttgcacaattcgtgttgaaccttccaaaacaaaaataaagacctgtccaaaagttttgacaaaaatactgattgctcccaaataaagtgcttctaagctttgtgtagacatagtttaactgatttgtaaaaatagcttaagcatgttgagaatgaagtaaaagttttcccatgtgctgtctaatgtactctgtgtaactctgaagacacatcagcttctaggattgcagcaatctatgaataacattttttctctcatttatgactttccatcagtaaagaagccattgcagaatttaaaattacacaaaggagtcattctctcctgggacataaagagttaaagctctgtcctctaaatagaagcctggccaaagggagaaaacagtgggagtcccttttcccttttaacaagtttgcaatagacacttctttttttcctgtctcaatggatgtgtgcacaccagtggaatcgcacaaacttgtcggtatgagctatataataacaaacacaaataaataaaagggagccttgtgagaataca

SEQ ID NO: 2594 - DNA, 3135 bp, Homo sapiens
  source 1..3135: mol_type = unassigned DNA
aggcgggacttccgccggcgccccctcccccgcggcgccgtctcctcctcccgcctgaggcgagtctgggctcagcctagagctctccggcggcggcgcagcttcagggcagcgcgggctgcagcggcggcggcggttagggctgtgtagggcgaggcctcccccttcctcctcgccatcctactcctccctcctcgtcatcctcccccttcgtcctcctcgccttcctcctcctcgtcaggctcgacccagctgtgagcggcaagatggcggcgcccaggccgccgcctgccaggctgtcgggcgtcatggtgccggcgcccatccaagacctggaggccctgcgcgcgctcacggcgctcttcaaagagcagcggaaccggaacttggatacgattggtgttgctgttgatttgattcttctgtttcgtgaactgcgagtggaacaggaatctctgttgacagcttttcgctgtggcctgcagtttttaggcaacattgcctcacggaatgaagattcccagtctattgtttgggtgcatgctttcccagaactgtttttgtcttgcttaaatcatccggacaaaaaaattgttgcctactcttcaatgattttgtttacatcccttaatcatgaaagaatgaaagaactggaggagaacctcaatattgcaattgatgtcatagatgcttaccaaaaacatcctgaatcagaatggccgttcttgattattacagacctctttctgaaaagcccggaattggtacaagccatgtttcccaaactgaacaatcaagaaagagttacactgttagaccttatgatagccaagataacgagtgatgagccactcaccaaggatgacatccctgtgtttttgcggcatgctgagttgattgcaagcacctttgtggatcagtgcaagactgtgctcaagctggcctctgaggagcctcctgatgatgaggaggcactggctacaattaggcttctcgacgtcctgtgcgaaatgactgtgaatactgagctgctcggctatctgcaggttttccctggcttgctggaaagagtgattgatcttttgcgggtgattcatgtagctggaaaagaaaccacaaacatcttcagtaattgtggttgcgtgagagcagaaggtgacatctccaatgtggccaatgggtttaagtctcatctcattcgtctgattggaaatctgtgttacaagaataaagataaccaagacaaggtaaatgagctggatggtatcccgttgatcctggacaactgcaacatcagtgacagtaacccctttctgacccagtgggtgatatatgccatccgaaaccttaccgaagacaacagccaaaaccaagatttgattgcaaagatggaggaacaggggctggcagatgcatccctacttaaaaaagtgggttttgaagttgaaaagaaaggcgaaaagctgatcctgaaatctactagagacacccctaagccatgaatgaactacatccaaatacctgaatttttggaatctgtttcatggatttttcatcttctaccgtatgtgaaattgcaagtgtttgaagatttataagtacaaatttgggaacatacaaatcttttaggtagtagagtttaacgtgtataagctaaaagtgaaagtaactgagtgttctcttgtttctttgcattaatgtaactgtgtggtttgcctttgtccccctggatagaacgtgcatttaaagaatatattgtacttactgtgacagcagataataaaccagtctcttggagggcacaacccttatttgacaaaacttggatgttggcttgactgtgtttgtcccttcagatggcaagtcagcatcattctttatattcctcttctcattgggttttctgaactctggcaggcggttgaagtagtttctcactgtgattaattctagcaatctcttttcacccctctgcctttccaaaacattgacaagactcatttccagttaattaattcgagaaccctccctcttcattttgggtactgggctgtcttgtcactgagccctatccctttggaatgtggcagggagtgaggttggtgagagaacatgtgggcacttaactcttcatgttccagttcatcccagaagtagacatcccaggacccattctgtgtcaaggtgaatgcctgtgtcctccccagcttcatgcctctgtcatgggggaaggaatagcttatgttctgctctggtgcagtgccgtagattaaaggtacatttctatcttctttgatttaaaaagcaccagtctcataaaggtgccactcagttttagccatgtcttcactgaaattgcaaaagtacttttagggagcaggagtttatttgacatctagttatctgtctgtctgttcatctatctatctgtctgctgtatgagaggtaggactggattaaatgaccactgaactcactgaatccagatcattcatatcatcaacaaaagctctagggggaggtcacgttgtgaatgcttaaaacatattattttcttcaacaaccatatcgctaaactaatatatccagagattttgcacaattcgtgttgaaccttccaaaacaaaaataaagacctgtccaaaagttttgacaaaaatactgattgctcccaaataaagtgcttctaagctttgtgtagacatagtttaactgatttgtaaaaatagcttaagcatgttgagaatgaagtaaaagttttcccatgtgctgtctaatgtactctgtgtaactctgaagacacatcagcttctaggattgcagcaatctatgaataacattttttctctcatttatgactttccatcagtaaagaagccattgcagaatttaaaattacacaaaggagtcattctctcctgggacataaagagttaaagctctgtcctctaaatagaagcctggccaaagggagaaaacagtgggagtcccttttcccttttaacaagtttgcaatagacacttctttttttcctgtctcaatggatgtgtgcacaccagtggaatcgcacaaacttgtcggtatgagctatataataacaaacacaaataaataaaagggagccttgtgagaat

SEQ ID NO: 2595 - DNA, 1939 bp, Homo sapiens
  source 1..1939: mol_type = unassigned DNA
agagctctccggcggcggcgcagcttcagggcagcgcgggctgcagcggcggcggcggttagggctgtgtagggcgaggcctcccccttcctcctcgccatcctactcctccctcctcgtcatcctcccccttcgtcctcctcgccttcctcctcctcgtcaggctcgacccagctgtgagcggcaagatggcggcgcccaggccgccgcctgccaggctgtcgggcgtcatggtgccggcgcccatccaagacctggaggccctgcgcgcgctcacggcgctcttcaaagagcagcggaaccgagaaacagcacccaggactatcttccaaagagttctggatatcctaaagaaatcttctcatgctgttgagcttgcctgcagagatccatcccaagtggaaaacctggcttccagtctgcagttaataacagaatgcttcaggtgtcttcgcaatgcttgcatagagtgttctgtgaaccagaattcaatcaggaacttggatacgattggtgttgctgttgatttgattcttctgtttcgtgaactgcgagtggaacaggaatctctgttgacagcttttcgctgtggcctgcagtttttaggcaacattgcctcacggaatgaagattcccagtctattgtttgggtgcatgctttcccagaactgtttttgtcttgcttaaatcatccggacaaaaaaattgttgcctactcttcaatgattttgtttacatcccttaatcatgaaagaatgaaagaactggaggagaacctcaatattgcaattgatgtcatagatgcttaccaaaaacatcctgaatcagaatggccgttcttgattattacagacctctttctgaaaagcccggaattggtacaagccatgtttcccaaactgaacaatcaagaaagagttacactgttagaccttatgatagccaagataacgagtgatgagccactcaccaaggatgacatccctgtgtttttgcggcatgctgagttgattgcaagcacctttgtggatcagtgcaagactgtgctcaagctggcctctgaggagcctcctgtaatgtatccatatatgagaatagttggaaaatttaggcttctcgacgtcctgtgcgaaatgactgtgaatactgagctgctcggctatctgcaggttttccctggcttgctggaaagagttatagatcttttgcgggtgattcatgtagctggaaaagaaaccacaaacatcttcagtaattgtggttgcgtgagagcagaaggtgacatctccaatgtggccaatgggtttaagtctcatctcattcgtctgattggaaatctgtgttacaagaataaagataaccaagacaaggtaaatgagctggatggtatcccgttgatcctggacaactgcaacatcagtgacagtaacccctgttctgacccagtgggtgatatatgccatccgaaaccttaccgaagacaacagccaaaaccaagatttgattgcaaagatggaggaacaggggctggcagatgcatccctacttaaaaaagtgggttttgaagttgaaaagaaaggcgaaaagctgatcctgaaatctactagagacacccctaagccatgaatgaactacatccaaatacctgaatttttggaatctgtttcatggatttttcatcttctaccgtatgtgaaattgcaagtgtttgaagatttataagtacaaatttgggaacatacaaatcttttaggtagtagagtttaacgtgtataagctaaaagtgaaagtaactgagtgttctcttgtttctttgcattaatgtaactgtgtggtttgcctttgtccccctggatagaacgtgcatttaaagaatatattgtacttactgtgacagcagataataaaccagtctcttggagggcacaacccttatttg

SEQ ID NO: 2596 - DNA, 7876 bp, Homo sapiens
  source 1..7876: mol_type = unassigned DNA
ggggggcgctgggtgtggggcggctccggggccggggatggcggcggccgcggttgcggcggctccgggacgagtgagtggatcctgggaagcgctgtgaaatgggctggctcccgagccagccgggaggacacttactacagctgctcagaagcaccactggaaactcagatgtgggcgccccagccagaagcagagaggggtacagggaagctacagagaagccccttctgatgccccagggagcaagtcgactccttccaggctccaggaacaccacaaagcaatatgaaacctgttcatgaaaggagtcaggaatgccttccaccaaagaaacgagacctccccgtgaccagcgaggatatggggagaactaccagctgctccactaaccacacaccctccagtgatgcttctgaatggtcccgaggggttgtggtggctgggcagagccaggcaggagccagagtcagcctggggggtgatggagctgaggccatcaccggtctgacagtggaccagtatggcatgctgtataaggtggctgtgccgcctgccaccttttcaccaactggactcccatctgtggtgaatatgagtcccttgcccccaacgtttaatgtagcgtcttcactaattcaacatccaggcatccactatcctccactccactatgctcagctcccatccacctcgctgcagttcattgggtctccttatagccttccctatgctgtgccacctaatttcctaccgagtcccctcctatctccttctgccaaccttgccacctctcaccttccacactttgtgccatatgcctcacttctggctgaaggagccactcctcccccacaggctccctccccggcccactcatttaacaaagctccctctgccacctccccatctgggcaattgccacatcattcaagtactcagccgctggaccttgctccaggtcggatgcccatttattatcagatgtccaggctacctgctgggtatactttgcatgaaacccctccagcaggtgccagcccagttcttacccctcaggagagccagtctgctctggaagcagctgctgcaaatggaggacagagaccacgagagcgaaatttagtaagacgggaaagtgaagcccttgactcccccaacagcaagggtgaaggccagggactggtgccagtggtagaatgtgtggtggatggacagttgttttcaggttctcagactccacgggtagaggtagcagcaccagcacaccgggggaccccggacactgaccttgaggtccagcgggtggttggcgctttagcttctcaggactatcgtgtggtggcagctcagaggaaggaggaacccagccccctcaacctatcccatcatacccccgaccatcagggtgaggggcgagggtcagccaggaaccctgcagagctggcagagaaaagtcaggcccgtgggttctaccctcagtcccatcaggaaccagtaaaacatagacctttacccaaagcaatggttgtagccaatggcaacctggtgcccactggaactgactcaggcctgctgcctgtgggctcggagatcctggtagcatcaagtctggacgtgcaggccagagccaccttcccagacaaggagccaacgccgccccccattacctcctctcacttgccttcccatttcatgaaaggcgccatcatccagctggctacgggagagctgaagcgggtggaggacctccagacccaggattttgtgcgcagtgccgaagtgagcggggggctgaagattgactctagcacggtcgtggacattcaggagagccaatggcctggatttgtcatgctgcattttgtggttggtgagcagcagagcaaagtgagcatcgaagtgccccccgagcaccccttctttgtatatggccagggttggtcctcttgcagccctgggcggacgacacaactcttctctctgccctgccatcggctacaggtgggagatgtctgcatctctatcagtttacagagcttgaacagtaactcagtttctcaggccagctgtgctcccccaagccagctgggtcccccccgagaaaggcctgagaggacggtcttgggatccagagagctatgtgacagtgaggggaagagccagccggcaggagagggctcccgtgtggtagagccttcccagcctgagtccggtgctcaggcctgctggccagccccgagcttccaaagatacagcatgcaaggggaggaggcacgggctgcgctgctccgtccctctttcattccacaggaggtaaagctgtccattgaagggcgttccaatgcgggaaaatgaacctcttccccagaccaggactggggctttaccccagagcctcgcctcgccgccgtgagcaggcagaggatttgcacacgccgagcagggaatggctttcttggcagtgagatttgggggaaaggggaggcatgaagtcagcctcccaaggcaggatctgttgttcattaccccatggcatcctttcaggacaaccccagagggtgttgtgatggggagcagcaggcctggggcaaggaaggaagggggtgcacacaggagaagaaacattccaaaatcagggcctccctgttctttcctccccatccctagctcctgcaagagaaagtccaggctttgggagcagatggcagagggagggagtaaagaaagagccaaaaatgatgatccacagcttatagtagcagttaaactgtcagaagttttttttcttttttgtggtagaagggcaggaggccccaaggttggaaataagagggttcccacccagaacccttcttgtgagagatgcgcactttaaagggtgattttgttccagatgtctatggctgggtgtgtgggggaggagcactctcatctgcaggactctgcttgatcctctgcttcatagcccttccccatctctcctcaccattctgcctacaaggcttctagcagcacgggggcccggagggagagccccttcagggttcagagtgaagtactaccttgccagggactcagtcaggggactttgggagaaagacttgatagccaggctgactgggttctaggcaggccctctggaaaggtagctcacctaacaaagctcctccatctcagcatgccagacccactttgaaatctcacagaatcttgctggtaatggtgactttagaactagtagaccctttttcccaggcactgaccccccacctttgtctgtgttgtgcccaagtgcctgcgccacccccaccctcctgctgcgctgaccgctgcatggtgtcgtgacctgggcctcatttgtagctgcactgcctttccttgtctgcaaagttggttttgtccactctgaccaagacctctagtttttggtgggtagggggtctctctggtttccccttcagctataatctctatttttaaaatctcaaaatcatgtcccctccacttccactgccaaacagcttggtgaagaaacaagaagggaactatgccctgggccagggcgaatgcgtggctgggcagtgcccatcatggcattttcacatgtcccatatgcccctcctgtcttattccactgcttctcccagcattctggtgcctccaagccatcccctcccaccaccagctctaagattctaggatagtcttgataacatttcagtacctgaatagatgtcattttgtgttggtatattcctctgcaaaaagtattttcaatcttggttgcattggcaccccccctaccccccaccaatgtcttaatcccacattttcttcacaacttttagcatcagctcagaccgtggggttccactgggtattgggaattaggctcccccactagctttcaggtgggtaagtttttttgtttgttttttgggggtctttagactcttgaaggcaactcagggtattgtccacgcagctctctggttagacttctcccaggctatgatcctggcatgtcctttataaggtatacttggattggccgagacctggcctggcatcaggagtccaaacctctgaggtctgatctctgctctgtcaaggactttcggcaagtctcgtgacctctggctctttcacttcctccccacctgccaaatggggataaataatcttacctacctcctggggggaggggaagttctgagaatggagtcattcttagtgttcaggtgctaaaggttgttctcctgggggaacagagtgactgaaactggcttgtttgctacaagccctaccctccactctttcattccttgaaagcagtttgcctggtcagtcagcttttgggggtccatcaaaggaggttgctgacctgaccgtgagtgcttcagtatctggtttgtgtcagaaccagacgccaactttgtactgcatttgggatcatatctttccccttctctgtcccccattctctgaatgctgctttctctggcttgtttcctacagtgggggcctgtggggttgagtcttgaggaatcccctcaaatgagaaggccttgggagaaggcctcatctctggctgtttcatgagcaactcattcctagagttcattgtttgcatgggtttctcacaagcgtccttcctcataggaaggctcatcaactgaatttagtgacatgtacacagtagatgctcaagcagtgtctgcaaggacacaagctgagctttctccttatggggcaaacctatgtctaaccagatacagaccaattagtttagatcaaatcaccttccacttgggctacttgtgactttccaacctggtaacttccactgaattctggaaagagaaattcttgaggaccctggcaagttgggccctgacctttctgttgctgtctcttgctggtgaagcaataccagcagttcctgtaataccacaatatcgttccatgcatatataacatattaatacttgattttgctgagctgcaaaggtatctgtcataaaatatggtccccaggaaaagaatctctgtgctctaaatctcggtcagagctgtggcctcccccttgcctttaacctctagtttagtcttttcctccaggcatgaaaaatatgactaacctgtggtgtgtccattcttccttataggaatttcctgagtttgcaggagacatgagagcagtttttagcgagtattttagtgggaagttgccaactttttaagaatgagcagttgacaagggccagagcctgtcccttgtcagcagtaggacatttccagctcttaggaatagaaaggaggactgctgactgtctggcgctgtataaaaatgtgtataccaatttgggaataggggaacccagtcatggatggataataagccaagtcttgaatcattcctatcaagattagtatacatgaggaagaggtggcatggggggaaggggctctgggagttcagagctgagtacttgtacctgagggagggcccccagccaatctgggctggtccttctatattcttggtcccagttggtcataacaccaagggctttgccctgcgctgctttgccactgctgctgtccgctcactgtcctgcctgctgtcctctacagctccctatccttccatgtctttggccatgtagattaagtgtaggcgtccggttcattcttacctgtgttaggccatgttattttatagcgaagtcatgttcgatagggatggtatgaaatgctgctggtgggctggtaaatccaaagggataaggcttcagtgctgttgggagccctctggctccaaatgtctgactatcttgagggagaaacaagcaggtttctactagtggtgtcttctgttgtattaacttctttcctttgtggtatcttgtatcctgttttaaaaactaaatgaagggaaccacattagggcccatgccagcatcccagtgaagttcgtccagctccagttaggtggattctggagttcggagagggtttaaagtttggctgaaatagcacctcaagtggggtttagttttatttttacctgcgggcatcatgggcgatttagggggaagcacaggatggtggtgtggtttaaacctgcagcaagcaggcatgttgaagagttgagtgatcacgctggagatgaagggttggacatggattgactgggaaaaggcctgggtccattggagtaaagataacctagtcgattgaattggccatgggaagttaggtcacagtcttataaacaaagtaaataggacagagactaagttttagggagacatcttggcctcctaggctaagtttactaaaccacactgaagctatagtaccttccagatgggcaaaagtgtacactacagttgaggagctgaaccttattaggttggatgtcgatcaggaacctgtttgccctttgctgggaagccttcactctccagctttcctggggtagggaaggtctcccacattatgcaataataaaataagcatctgggtctttgcagctgtcagttgctctttcaactctaggatccatctttggaccagaagcctggtctgtgcctaggatgacactggccccagagatgctagagtcgactgcactctctccttagctgcagaccatgcacagtgcctggggcggaaggaggagaggtgttgcggtttgccctgctgcctccccagcaggaacaatagtcataaatgcacttttcacactaaaggtttctttattagttctccagttaaacctagatccctccctggtagattgcgaactcaaagttttgtgatcccaaagccattccactgcaaatgcccagcagtgaagatggcctcaaattgggttcttgcctgcagtgtgtgtggcagcagcccatgtgcctttacctgttgtcaaacttgcaagcatttatttgtctttatgactgtcatggggactgaggttcttcagagaaagagtgtgagctgatgacacagtggttttacacccaccccctgggcagggagtttgcacgtagttgtgagctgtgagtggttagtgcattgctggtattgctgaaggcagggttgatccctcacttgactgatacttgcattcaagagaatctagattgtgttgggggagggactgactgtactcatggctaacttaaagtattaaaataaggctgtcccctacaaccttcttagtcacacaggatccctgtagccaaaacagtatatgatccagctgcagagagcagactgctctcagcttgcacagcaccttaggcgagggaagaatatacggatagggaatggggtggagaaaggatgggaatgttgtcatccaggtggctttagggtcctaaggagtggagaaggatggcactggggaggtctggatggatctgtgtaggagttccctgtagataaattactgatcccccatctactatccccagtatgtaatggctgaattaatatgtaatcaactgcattgtatctaaagccttagaactagtcaggtgctccctccacccaataccatttcttaccctctaatcctacctgatctttaacaaagcattaataattctaaggataatctctattttgttgtgcttttttgtaactgttttaaataaatcaatttgtactgtatatttgtacttttgtgagatcctttttgctgttttaccattttaagtctctgtacttggctacacacagattgtatttttattgttaatgctcttcttatggatacctgcatttaacttgtggactatgtaaacacaatatctatcaatatctatatatctatatatctatctatataaactactagcttttc

SEQ ID NO: 2597 - DNA, 4702 bp, Homo sapiens
  source 1..4702: mol_type = unassigned DNA
acccccgagaaagcaacccagcgcgccgcccgctcctcacgtgtccctcccggccccggggccacctcacgttctgcttccgtctgacccctccgacttccggtaaagagtccctatccgcacctccgctcccacccggcgcctcggcgcgcccgccctccgatgcgctcagcggccgcagctcctcggagtcccgcggtggccaccgagtctcgccgcttcgccgcagccaggtggcccgggtggcgctcgctccagcggccggcgcggcggagcgggcggggcggcggtggcgcggccccgggaccgtatccctccgccgcccctcccccgcccggccccggcccccctccctcccggcagagctcgcctccctccgcctcagactgttttggtagcaacggcaacggcggcggcgcgtttcggcccggctcccggcggctccttggtctcggcgggcctccccgccccttcgtcgtcctccttctccccctcgccagcccgggcgcccctccggccgcgccaacccgcgcctccccgctcggcgcccgcgcgtccccgccgcgttccggcgtctccttggcgcgcccggctcccggctgtccccgcccggcgtgcgagccggtgtatgggcccctcaccatgtcgctgaagccccagcagcagcagcagcagcagcagcagcagcagcagcagcaacagcagcagcagcagcagcagcagcagccgccgcccgcggctgccaatgtccgcaagcccggcggcagcggccttctagcgtcgcccgccgccgcgccttcgccgtcctcgtcctcggtctcctcgtcctcggccacggctccctcctcggtggtcgcggcgacctccggcggcgggaggcccggcctgggcagaggtcgaaacagtaacaaaggactgcctcagtctacgatttcttttgatggaatctatgcaaatatgaggatggttcatatacttacatcagttgttggctccaaatgtgaagtacaagtgaaaaatggaggtatatatgaaggagtttttaaaacttacagtccgaagtgtgatttggtacttgatgccgcacatgagaaaagtacagaatccagttcggggccgaaacgtgaagaaataatggagagtattttgttcaaatgttcagactttgttgtggtacagtttaaagatatggactccagttatgcaaaaagagatgcttttactgactctgctatcagtgctaaagtgaatggcgaacacaaagagaaggacctggagccctgggatgcaggtgaactcacagccaatgaggaacttgaggctttggaaaatgacgtatctaatggatgggatcccaatgatatgtttcgatataatgaagaaaattatggtgtagtgtctacgtatgatagcagtttatcttcgtatacagtgcccttagaaagagataactcagaagaatttttaaaacgggaagcaagggcaaaccagttagcagaagaaattgagtcaagtgcccagtacaaagctcgagtggccctggaaaatgatgataggagtgaggaagaaaaatacacagcagttcagagaaattccagtgaacgtgaggggcacagcataaacactagggaaaataaatatattcctcctggacaaagaaatagagaagtcatatcctggggaagtgggagacagaattcaccgcgtatgggccagcctggatcgggctccatgccatcaagatccacttctcacacttcagatttcaacccgaattctggttcagaccaaagagtagttaatggaggtgttccctggccatcgccttgcccatctccttcctctcgcccaccttctcgctaccagtcaggtcccaactctcttccacctcgggcagccacccctacacggccgccctccaggcccccctcgcggccatccagacccccgtctcacccctctgctcatggttctccagctcctgtctctactatgcctaaacgcatgtcttcagaagggcctccaaggatgtccccaaaggcccagcgacatcctcgaaatcacagagtttctgctgggaggggttccatatccagtggcctagaatttgtatcccacaacccacccagtgaagcagctactcctccagtagcaaggaccagtccctcggggggaacgtggtcatcagtggtcagtggggttccaagattatcccctaaaactcatagacccaggtctcccagacagaacagtattggaaatacccccagtgggccagttcttgcttctccccaagctggtattattccaactgaagctgttgccatgcctattccagctgcatctcctacgcctgctagtcctgcatcgaacagagctgttaccccttctagtgaggctaaagattccaggcttcaagatcagaggcagaactctcctgcagggaataaagaaaatattaaacccaatgaaacatcacctagcttctcaaaagctgaaaacaaaggtatatcaccagttgtttctgaacatagaaaacagattgatgatttaaagaaatttaagaatgattttaggttacagccaagttctacttctgaatctatggatcaactactaaacaaaaatagagagggagaaaaatcaagagatttgatcaaagacaaaattgaaccaagtgctaaggattctttcattgaaaatagcagcagcaactgtaccagtggcagcagcaagccgaatagccccagcatttccccttcaatacttagtaacacggagcacaagaggggacctgaggtcacttcccaaggggttcagacttccagcccagcatgtaaacaagagaaagacgataaggaagagaagaaagacgcagctgagcaagttaggaaatcaacattgaatcccaatgcaaaggagttcaacccacgttccttctctcagccaaagccttctactaccccaacttcacctcggcctcaagcacaacctagcccatctatggtgggtcatcaacagccaactccagtttatactcagcctgtttgttttgcaccaaatatgatgtatccagtcccagtgagcccaggcgtgcaacctttatacccaatacctatgacgcccatgccagtgaatcaagccaagacatatagagcagtaccaaatatgccccaacagcggcaagaccagcatcatcagagtgccatgatgcacccagcgtcagcagcgggcccaccgattgcagccaccccaccagcttactccacgcaatatgttgcctacagtcctcagcagttcccaaatcagccccttgttcagcatgtgccacattatcagtctcagcatcctcatgtctatagtcctgtaatacagggtaatgctagaatgatggcaccaccaacacacgcccagcctggtttagtatcttcttcagcaactcagtacggggctcatgagcagacgcatgcgatgtatgcatgtcccaaattaccatacaacaaggagacaagcccttctttctactttgccatttccacgggctcccttgctcagcagtatgcgcaccctaacgctaccctgcacccacatactccacaccctcagccttcagctacccccactggacagcagcaaagccaacatggtggaagtcatcctgcacccagtcctgttcagcaccatcagcaccaggccgcccaggctctccatctggccagtccacagcagcagtcagccatttaccacgcggggcttgcgccaactccaccctccatgacacctgcctccaacacgcagtcgccacagaatagtttcccagcagcacaacagactgtctttacgatccatccttctcacgttcagccggcgtataccaacccaccccacatggcccacgtacctcaggctcatgtacagtcaggaatggttccttctcatccaactgcccatgcgccaatgatgctaatgacgacacagccacccggcggtccccaggccgccctcgctcaaagtgcactacagcccattccagtctcgacaacagcgcatttcccctatatgacgcacccttcagtacaagcccaccaccaacagcagttgtaaggctgccctggaggaaccgaaaggccaaattccctcctcccttctactgcttctaccaactggaagcacagaaaactagaatttcatttattttgtttttaaaatatatatgttgatttcttgtaacatccaataggaatgctaacagttcacttgcagtggaagatacttggaccgagtagaggcatttaggaacttgggggctattccataattccatatgctgtttcagagtcccgcaggtaccccagctctgcttgccgaaactggaagttatttattttttaataacccttgaaagtcatgaacacatcagctagcaaaagaagtaacaagagtgattcttgctgctattactgctaaaaaaaaaaaaaaaaaaaaatcaagacttggaacgcccttttactaaacttgacaaagtttcagtaaattcttaccgtcaaactgacggattattatttataaatcaagtttgatgaggtgatcactgtctacagtggttcaacttttaagttaagggaaaaacttttactttgtagataatataaaataaaaacttaaaaaaaatttaaaaaataaaaaaagttttaaaaactga

SEQ ID NO: 2598 - DNA, 4587 bp, Homo sapiens
  source 1..4587: mol_type = unassigned DNA
acccccgagaaagcaacccagcgcgccgcccgctcctcacgtgtccctcccggccccggggccacctcacgttctgcttccgtctgacccctccgacttccggtaaagagtccctatccgcacctccgctcccacccggcgcctcggcgcgcccgccctccgatgcgctcagcggccgcagctcctcggagtcccgcggtggccaccgagtctcgccgcttcgccgcagccaggtggcccgggtggcgctcgctccagcggccggcgcggcggagcgggcggggcggcggtggcgcggccccgggaccgtatccctccgccgcccctcccccgcccggccccggcccccctccctcccggcagagctcgcctccctccgcctcagactgttttggtagcaacggcaacggcggcggcgcgtttcggcccggctcccggcggctccttggtctcggcgggcctccccgccccttcgtcgtcctccttctccccctcgccagcccgggcgcccctccggccgcgccaacccgcgcctccccgctcggcgcccgcgcgtccccgccgcgttccggcgtctccttggcgcgcccggctcccggctgtccccgcccggcgtgcgagccggtgtatgggcccctcaccatgtcgctgaagccccagcagcagcagcagcagcagcagcagcagcagcagcagcaacagcagcagcagcagcagcagcagcagccgccgcccgcggctgccaatgtccgcaagcccggcggcagcggccttctagcgtcgcccgccgccgcgccttcgccgtcctcgtcctcggtctcctcgtcctcggccacggctccctcctcggtggtcgcggcgacctccggcggcgggaggcccggcctgggcagaggtcgaaacagtaacaaaggactgcctcagtctacgatttcttttgatggaatctatgcaaatatgaggatggttcatatacttacatcagttgttggctccaaatgtgaagtacaagtgaaaaatggaggtatatatgaaggagtttttaaaacttacagtccgaagtgtgatttggtacttgatgccgcacatgagaaaagtacagaatccagttcggggccgaaacgtgaagaaataatggagagtattttgttcaaatgttcagactttgttgtggtacagtttaaagatatggactccagttatgcaaaaagagatgcttttactgactctgctatcagtgctaaagtgaatggcgaacacaaagagaaggacctggagccctgggatgcaggtgaactcacagccaatgaggaacttgaggctttggaaaatgacgtatctaatggatgggatcccaatgatatgtttcgatataatgaagaaaattatggtgtagtgtctacgtatgatagcagtttatcttcgtatacagtgcccttagaaagagataactcagaagaatttttaaaacgggaagcaagggcaaaccagttagcagaagaaattgagtcaagtgcccagtacaaagctcgagtggccctggaaaatgatgataggagtgaggaagaaaaatacacagcagttcagagaaattccagtgaacgtgaggggcacagcataaacactagggaaaataaatatattcctcctggacaaagaaatagagaagtcatatcctggggaagtgggagacagaattcaccgcgtatgggccagcctggatcgggctccatgccatcaagatccacttctcacacttcagatttcaacccgaattctggttcagaccaaagagtagttaatggaggtgttccctggccatcgccttgcccatctccttcctctcgcccaccttctcgctaccagtcaggtcccaactctcttccacctcgggcagccacccctacacggccgccctccaggcccccctcgcggccatccagacccccgtctcacccctctgctcatggttctccagctcctgtctctactatgcctaaacgcatgtcttcagaagggcctccaaggatgtccccaaaggcccagcgacatcctcgaaatcacagagtttctgctgggaggggttccatatccagtggcctagaatttgtatcccacaacccacccagtgaagcagctactcctccagtagcaaggaccagtccctcggggggaacgtggtcatcagtggtcagtggggttccaagattatcccctaaaactcatagacccaggtctcccagacagaacagtattggaaatacccccagtgggccagttcttgcttctccccaagctggtattattccaactgaagctgttgccatgcctattccagctgcatctcctacgcctgctagtcctgcatcgaacagagctgttaccccttctagtgaggctaaagattccaggcttcaagatcagaggcagaactctcctgcagggaataaagaaaatattaaacccaatgaaacatcacctagcttctcaaaagctgaaaacaaaggtatatcaccagttgtttctgaacatagaaaacagattgatgatttaaagaaatttaagaatgattttaggttacagccaagttctacttctgaatctatggatcaactactaaacaaaaatagagagggagaaaaatcaagagatttgatcaaagacaaaattgaaccaagtgctaaggattctttcattgaaaatagcagcagcaactgtaccagtggcagcagcaagccgaatagccccagcatttccccttcaatacttagtaacacggagcacaagaggggacctgaggtcacttcccaaggggttcagacttccagcccagcatgtaaacaagagaaagacgataaggaagagaagaaagacgcagctgagcaagttaggaaatcaacattgaatcccaatgcaaaggagttcaacccacgttccttctctcagccaaagccttctactaccccaacttcacctcggcctcaagcacaacctagcccatctatggtgggtcatcaacagccaactccagtttatactcagcctgtttgttttgcaccaaatatgatgtatccagtcccagtgagcccaggcgtgcaataccaaatatgccccaacagcggcaagaccagcatcatcagagtgccatgatgcacccagcgtcagcagcgggcccaccgattgcagccaccccaccagcttactccacgcaatatgttgcctacagtcctcagcagttcccaaatcagccccttgttcagcatgtgccacattatcagtctcagcatcctcatgtctatagtcctgtaatacagggtaatgctagaatgatggcaccaccaacacacgcccagcctggtttagtatcttcttcagcaactcagtacggggctcatgagcagacgcatgcgatgtatgcatgtcccaaattaccatacaacaaggagacaagcccttctttctactttgccatttccacgggctcccttgctcagcagtatgcgcaccctaacgctaccctgcacccacatactccacaccctcagccttcagctacccccactggacagcagcaaagccaacatggtggaagtcatcctgcacccagtcctgttcagcaccatcagcaccaggccgcccaggctctccatctggccagtccacagcagcagtcagccatttaccacgcggggcttgcgccaactccaccctccatgacacctgcctccaacacgcagtcgccacagaatagtttcccagcagcacaacagactgtctttacgatccatccttctcacgttcagccggcgtataccaacccaccccacatggcccacgtacctcaggctcatgtacagtcaggaatggttccttctcatccaactgcccatgcgccaatgatgctaatgacgacacagccacccggcggtccccaggccgccctcgctcaaagtgcactacagcccattccagtctcgacaacagcgcatttcccctatatgacgcacccttcagtacaagcccaccaccaacagcagttgtaaggctgccctggaggaaccgaaaggccaaattccctcctcccttctactgcttctaccaactggaagcacagaaaactagaatttcatttattttgtttttaaaatatatatgttgatttcttgtaacatccaataggaatgctaacagttcacttgcagtggaagatacttggaccgagtagaggcatttaggaacttgggggctattccataattccatatgctgtttcagagtcccgcaggtaccccagctctgcttgccgaaactggaagttatttattttttaataacccttgaaagtcatgaacacatcagctagcaaaagaagtaacaagagtgattcttgctgctattactgctaaaaaaaaaaaaaaaaaaaaatcaagacttggaacgcccttttactaaacttgacaaagtttcagtaaattcttaccgtcaaactgacggattattatttataaatcaagtttgatgaggtgatcactgtctacagtggttcaacttttaagttaagggaaaaacttttactttgtagataat

SEQ ID NO: 2599 - DNA, 3786 bp, Homo sapiens
  source 1..3786: mol_type = unassigned DNA
ccgcggtcttctctctccacccccgacaccgcggggctccccccgcccgcccacggcgggccccggctgcccgatccccctcgcttcccgcgctctccagcggggccccagccccggccccctctctccctcccttctctctaattccccttccggacgctgccatcatgttgaagcctcagccgctacaacagccctcccagccccagcagccgccccccacgcaacaggccgtggcccgtcggccccccgggggcaccagccctcccaacggcggcctcccggggccgctggccacctctgcggctcctcccgggcctccagcggccgcctccccctgcctggggcctgtggccgctgccgggagcgggctccgccggggagccgaaggcatcttggcgccgcagccgccgccgccgcagcaacaccaggagaggccgggggcagccgccatcggcagcgccaggggacagagcacaggaaagggacccccacagtcacctgtgtttgaaggcgtctacaacaattccagaatgctgcatttccttacagctgttgtgggctccacttgtgatgtaaaggtgaaaaatggtaccacttatgagggtatcttcaagacgctaagctcaaagtttgaactagccgtggatgctgtgcaccggaaagcatctgagccagcaggtggccctcgtcgggaggacattgtggacaccatggtgtttaagccaagtgatgtcatgcttgttcacttccgaaatgttgacttcaactatgctactaaagacaagttcaccgattcagccattgccatgaactcgaaagtgaatggggaacacaaagagaaggtgcttcagcgctgggaggggggtgacagcaacagcgacgactatgacctcgagtctgacatgtccaatggatgggaccccaatgaaatgttcaagttcaatgaggagaactacggtgtgaagactacctatgatagcagtctttcttcttatacggtgcccttagaaaaggacaactcagaagagtttcgtcagcgagagctgcgtgcggcccagttggctcgagagattgaatcaagcccccagtaccgcctacggatcgccatggagaacgacgatgggcgcactgaagaggagaagcacagtgcagtccagcggcagggctcagggcgggagagccccagcttggcatccagggaggggaagtatatccctctgcctcaacgagtccgggaaggtccccggggaggagttcgatgcagcagctctcggggcggtcggcctggccttagctctttgccacctcgtggccctcaccatctggacaacagcagccctggcccaggttctgaggcccgtggtatcaatggaggcccttcccgcatgtccccaaaggcacaacggcctctgagaggtgccaagactctgtcttcgcccagtaataggccttctggagaaacttctgttccacctcctcctgcagtgggccggatgtatcccccgcgttctcccaagtctgctgcccctgccccaatctcagcttcctgtccagagcctcccatcggctcggcagtgccaacctcttcagcctccatccctgtgacctcatcagtctcagatcctggagtgggctccatttctccagcttctccaaagatctccctggcccccacagatgtaaaagaactctctaccaaggaacctgggagaactctggagccccaggagctggctcggatagctgggaaagtccctggtcttcagaatgaacagaaacgattccaactggaagaactgagaaagtttggggcccagtttaagcttcagcccagtagctcccctgagaacagcctggatccttttcctccccggatcttaaaggaggagcccaaaggaaaggagaaagaggttgatggtctgttgacttcagagcccatggggtctcccgtctcctccaagacagagtccgtatcggataaggaggacaaaccacccctggcaccatcaggaggcactgaggggccagagcagcccccaccaccttgtccaagccaaactggcagccccccggtgggcctcatcaagggagaagacaaagatgagggccctgttgctgaacaagtaaagaaatcaacgttgaaccctaatgctaaggagttcaatcctacaaagcctctgctgtctgtgaataaatccaccagtaccccaacttctccggggccccggactcattcaactccctccatcccggtgctgacagcaggccagagtgggctatacagcccccagtacatctcctacatacctcagatccacatgggaccagctgtgcaggcacctcagatgtatccatatcctgtatccaattcagtgcctgggcagcagggcaagtaccggggagcaaaaggctcccttcctccgcagcgctcggaccaacaccagccagcctcagccccgccgatgatgcaggccgccgcggctgctggcccgcctctggtggctgccacgccctattcttcctacatcccctacaaccctcagcagttcccaggccagccagccatgatgcagcccatggcccactacccctcacagccggtgtttgcccccatgcttcagagcaacccacgcatgctgacgtcgggcagccatccccaggccatcgtgtcatcctctacccctcagtacccttctgcagagcagcctaccccccaagccctttatgccactgttcaccagtcctacccacaccatgccacacagctccatgcccaccagccgcagccggctaccacgcctactggaagccagccgcagtcccagcatgcggcccccagtcctgtccagcatcaggcggggcaggccccacacttgggcagtggacagccacagcagaatctgtaccacccaggggccctgacaggcacgccgccctctctgccaccgggaccttctgcccagtcccctcagagcagcttcccccagccagccgctgtgtatgccatccaccaccagcagctgccccacggcttcaccaacatggcccatgttacccaggcccatgtccaaactggaatcacagcagccccgccccctcaccctggggctccccacccgccccaggtgatgctgctgcacccaccccagagtcatggggggcccccccaaggcgcggtgccccagagtggggtgcctgcactctcagcttccacaccctcaccctacccctacatcggacacccccaaggtgagcagcctggccaggcgcctggatttccaggaggagccgatgacaggattcctccccttccaccccccggggaactgaagattgtcctggccgcgacctgagacctccatgagtggagggaagagtgatctatgtctcttcccccagcagctcggaccactcccagccccccatccccccgttccccaggggagctggggaattcctgccaagcaccttgaatgggaggggcctcacagagggcagggccagggtccagcaggggtggggggttcctgctctgcccctgcccgtccccacccagtcttgccctcccatcctctcatctattcccccgctggagacggaagatcttttattttctattatttataacttcagacttgggccccctgttctttctttcccattaacttgagtgacctgtgtgagagacagacagatgccccacgaggatggctggacaaggacttttactttttattacataaaaatattaaaaaataaataaaaaaaataaaattttaaact

SEQ ID NO: 2600 - DNA, 4367 bp, Homo sapiens
  source 1..4367: mol_type = unassigned DNA
ccgcggtcttctctctccacccccgacaccgcggggctccccccgcccgcccacggcgggccccggctgcccgatccccctcgcttcccgcgctctccagcggggccccagccccggccccctctctccctcccttctctctaattccccttccggacgctgccatcatgttgaagcctcagccgctacaacagccctcccagccccagcagccgccccccacgcaacaggccgtggcccgtcggccccccgggggcaccagccctcccaacggcggcctcccggggccgctggccacctctgcggctcctcccgggcctccagcggccgcctccccctgcctggggcctgtggccgctgccgggagcgggctccgccggggagccgaaggcatcttggcgccgcagccgccgccgccgcagcaacaccaggagaggccgggggcagccgccatcggcagcgccaggggacagagcacaggaaagggacccccacagtcacctgtgtttgaaggcgtctacaacaattccagaatgctgcatttccttacagctgttgtgggctccacttgtgatgtaaaggtgaaaaatggtaccacttatgagggtatcttcaagacgctaagctcaaagtttgaactagccgtggatgctgtgcaccggaaagcatctgagccagcaggtggccctcgtcgggaggacattgtggacaccatggtgtttaagccaagtgatgtcatgcttgttcacttccgaaatgttgacttcaactatgctactaaagacaagttcaccgattcagccattgccatgaactcgaaagtgaatggggaacacaaagagaaggtgcttcagcgctgggaggggggtgacagcaacagcgacgactatgacctcgagtctgacatgtccaatggatgggaccccaatgaaatgttcaagttcaatgaggagaactacggtgtgaagactacctatgatagcagtctttcttcttatacggtgcccttagaaaaggacaactcagaagagtttcgtcagcgagagctgcgtgcggcccagttggctcgagagattgaatcaagcccccagtaccgcctacggatcgccatggagaacgacgatgggcgcactgaagaggagaagcacagtgcagtccagcggcagggctcagggcgggagagccccagcttggcatccagggaggggaagtatatccctctgcctcaacgagtccgggaaggtccccggggaggagttcgatgcagcagctctcggggcggtcggcctggccttagctctttgccacctcgtggccctcaccatctggacaacagcagccctggcccaggttctgaggcccgtggtatcaatggaggcccttcccgcatgtccccaaaggcacaacggcctctgagaggtgccaagactctgtcttcgcccagtaataggccttctggagaaacttctgttccacctcctcctgcagtgggccggatgtatcccccgcgttctcccaagtctgctgcccctgccccaatctcagcttcctgtccagagcctcccatcggctcggcagtgccaacctcttcagcctccatccctgtgacctcatcagtctcagatcctggagtgggctccatttctccagcttctccaaagatctccctggcccccacagatgtaaaagaactctctaccaaggaacctgggagaactctggagccccaggagctggctcggatagctgggaaagtccctggtcttcagaatgaacagaaacgattccaactggaagaactgagaaagtttggggcccagtttaagcttcagcccagtagctcccctgagaacagcctggatccttttcctccccggatcttaaaggaggagcccaaaggaaaggagaaagaggttgatggtctgttgacttcagagcccatggggtctcccgtctcctccaagacagagtccgtatcggataaggaggacaaaccacccctggcaccatcaggaggcactgaggggccagagcagcccccaccaccttgtccaagccaaactggcagccccccggtgggcctcatcaagggagaagacaaagatgagggccctgttgctgaacaagtaaagaaatcaacgttgaaccctaatgctaaggagttcaatcctacaaagcctctgctgtctgtgaataaatccaccagtaccccaacttctccggggccccggactcattcaactccctccatcccggtgctgacagcaggccagagtgggctatacagcccccagtacatctcctacatacctcagatccacatgggaccagctgtgcaggcacctcagatgtatccatatcctgtatccaattcagtgcctgggcagcagggcaagtaccggggagcaaaaggctcccttcctccgcagcgctcggaccaacaccagccagcctcagccccgccgatgatgcaggccgccgcggctgctggcccgcctctggtggctgccacgccctattcttcctacatcccctacaaccctcagcagttcccaggccagccagccatgatgcagcccatggcccactacccctcacagccggtgtttgcccccatgcttcagagcaacccacgcatgctgacgtcgggcagccatccccaggccatcgtgtcatcctctacccctcagtacccttctgcagagcagcctaccccccaagccctttatgccactgttcaccagtcctacccacaccatgccacacagctccatgcccaccagccgcagccggctaccacgcctactggaagccagccgcagtcccagcatgcggcccccagtcctgtccagcatcaggcggggcaggccccacacttgggcagtggacagccacagcagaatctgtaccacccaggggccctgacaggcacgccgccctctctgccaccgggaccttctgcccagtcccctcagagcagcttcccccagccagccgctgtgtatgccatccaccaccagcagctgccccacggcttcaccaacatggcccatgttacccaggcccatgtccaaactggaatcacagcagccccgccccctcaccctggggctccccacccgccccaggtgatgctgctgcacccaccccagagtcatggggggcccccccaaggcgcggtgccccagagtggggtgcctgcactctcagcttccacaccctcaccctacccctacatcggacacccccaaggtgagcagcctggccaggcgcctggatttccaggaggagccgatgacaggattcgtgagttctcattagctgggggaatttggcatggaagagctgaggggctgcaggtggggcaggatgcacgggttctgggtggggagtgaggggtcttggaggcagggctgtcccacagggcgcccgccgacctgcacctgtctgtgaagtatgtagggtgggcagaagccacagtcgccgccgccaggggcttgctcctggctctgtcctttgcttccctccgtcctcgctcagttgtgatccagcagcccccctccccactgcctccccagctctcagtgaccccgactgtctcctgacttagccgaggtaaggtcagtgcagcagacagggccagactggggtgtggggggctgagctgggcacatgagtgagggctctggcttactgggaaacagcgattgacctgtgcttctgacagcccccgagacaccttgaggaggccgctccttcccagacacacccccacgcccccactggacggcattggaggaagggacagctgcttgggttctaatgctcctgctctcttctctttcccctccaaccagttcaatctcatccctcccagcagctccccttccaccccccggggaactgaagattgtcctggccgcgacctgagacctccatgagtggagggaagagtgatctatgtctcttcccccagcagctcggaccactcccagccccccatccccccgttccccaggggagctggggaattcctgccaagcaccttgaatgggaggggcctcacagagggcagggccagggtccagcaggggtggggggttcctgctctgcccctgcccgtccccacccagtcttgccctcccatcctctcatctattcccccgctggagacggaagatcttttattttctattatttataacttcagacttgggccccctgttctttctttcccattaacttgagtgacctgtgtgagagacagacagatgccccacgaggatggctggacaaggacttttactttttattacataaaaatattaaaaaataaataaaaaaaataaaattttaaactaacttaa

SEQ ID NO: 2601 - DNA, 3856 bp, Homo sapiens
  source 1..3856: mol_type = unassigned DNA
ggcgacgcgcacgcgcgccagcccggctcgcgccctctcgctttcctccagccgcgagaccccctccccttccgcctcgcggcgcttcctcgcgccgcggtcttctctctccacccccgacaccgcggggctccccccgcccgcccacggcgggccccggctgcccgatccccctcgcttcccgcgctctccagcggggccccagccccggccccctctctccctcccttctctctaattccccttccggacgctgccatcatgttgaagcctcagccgctacaacagccctcccagccccagcagccgccccccacgcaacaggccgtggcccgtcggccccccgggggcaccagccctcccaacggcggcctcccggggccgctggccacctctgcggctcctcccgggcctccagcggccgcctccccctgcctggggcctgtggccgctgccgggagcgggctccgccggggagccgaaggcatcttggcgccgcagccgccgccgccgcagcaacaccaggagaggccgggggcagccgccatcggcagcgccaggggacagagcacaggaaagggacccccacagtcacctgtgtttgaaggcgtctacaacaattccagaatgctgcatttccttacagctgttgtgggctccacttgtgatgtaaaggtgaaaaatggtaccacttatgagggtatcttcaagacgctaagctcaaagtttgaactagccgtggatgctgtgcaccggaaagcatctgagccagcaggtggccctcgtcgggaggacattgtggacaccatggtgtttaagccaagtgatgtcatgcttgttcacttccgaaatgttgacttcaactatgctactaaagacaagttcaccgattcagccattgccatgaactcgaaagtgaatggggaacacaaagagaaggtgcttcagcgctgggaggggggtgacagcaacagcgacgactatgacctcgagtctgacatgtccaatggatgggaccccaatgaaatgttcaagttcaatgaggagaactacggtgtgaagactacctatgatagcagtctttcttcttatacggtgcccttagaaaaggacaactcagaagagtttcgtcagcgagagctgcgtgcggcccagttggctcgagagattgaatcaagcccccagtaccgcctacggatcgccatggagaacgacgatgggcgcactgaagaggagaagcacagtgcagtccagcggcagggctcagggcgggagagccccagcttggcatccagggaggggaagtatatccctctgcctcaacgagtccgggaaggtccccggggaggagttcgatgcagcagctctcggggcggtcggcctggccttagctctttgccacctcgtggccctcaccatctggacaacagcagccctggcccaggttctgaggcccgtggtatcaatggaggcccttcccgcatgtccccaaaggcacaacggcctctgagaggtgccaagactctgtcttcgcccagtaataggccttctggagaaacttctgttccacctcctcctgcagtgggccggatgtatcccccgcgttctcccaagtctgctgcccctgccccaatctcagcttcctgtccagagcctcccatcggctcggcagtgccaacctcttcagcctccatccctgtgacctcatcagtctcagatcctggagtgggctccatttctccagcttctccaaagatctccctggcccccacagatgtaaaagaactctctaccaaggaacctgggagaactctggagccccaggagctggctcggatagctgggaaagtccctggtcttcagaatgaacagaaacgattccaactggaagaactgagaaagtttggggcccagtttaagcttcagcccagtagctcccctgagaacagcctggatccttttcctccccggatcttaaaggaggagcccaaaggaaaggagaaagaggttgatggtctgttgacttcagagcccatggggtctcccgtctcctccaagacagagtccgtatcggataaggaggacaaaccacccctggcaccatcaggaggcactgaggggccagagcagcccccaccaccttgtccaagccaaactggcagccccccggtgggcctcatcaagggagaagacaaagatgagggccctgttgctgaacaagtaaagaaatcaacgttgaaccctaatgctaaggagttcaatcctacaaagcctctgctgtctgtgaataaatccaccagtaccccaacttctccggggccccggactcattcaactccctccatcccggtgctgacagcaggccagagtgggctatacagcccccagtacatctcctacatacctcagatccacatgggaccagctgtgcaggcacctcagatgtatccatatcctgtatccaattcagtgcctgggcagcagggcaagtaccggggagcaaaaggctcccttcctccgcagcgctcggaccaacaccagccagcctcagccccgccgatgatgcaggccgccgcggctgctggcccgcctctggtggctgccacgccctattcttcctacatcccctacaaccctcagcagttcccaggccagccagccatgatgcagcccatggcccactacccctcacagccggtgtttgcccccatgcttcagagcaacccacgcatgctgacgtcgggcagccatccccaggccatcgtgtcatcctctacccctcagtacccttctgcagagcagcctaccccccaagccctttatgccactgttcaccagtcctacccacaccatgccacacagctccatgcccaccagccgcagccggctaccacgcctactggaagccagccgcagtcccagcatgcggcccccagtcctgtccagcatcaggcggggcaggccccacacttgggcagtggacagccacagcagaatctgtaccacccaggggccctgacaggcacgccgccctctctgccaccgggaccttctgcccagtcccctcagagcagcttcccccagccagccgctgtgtatgccatccaccaccagcagctgccccacggcttcaccaacatggcccatgttacccaggcccatgtccaaactggaatcacagcagccccgccccctcaccctggggctccccacccgccccaggtgatgctgctgcacccaccccagagtcatggggggcccccccaaggcgcggtgccccagagtggggtgcctgcactctcagcttccacaccctcaccctacccctacatcggacacccccaagttcaatctcatccctcccagcagctccccttccaccccccggggaactgaagattgtcctggccgcgacctgagacctccatgagtggagggaagagtgatctatgtctcttcccccagcagctcggaccactcccagccccccatccccccgttccccaggggagctggggaattcctgccaagcaccttgaatgggaggggcctcacagagggcagggccagggtccagcaggggtggggggttcctgctctgcccctgcccgtccccacccagtcttgccctcccatcctctcatctattcccccgctggagacggaagatcttttattttctattatttataacttcagacttgggccccctgttctttctttcccattaacttgagtgacctgtgtgagagacagacagatgccccacgaggatggctggacaaggacttttactttttattacataaaaatattaaaaaataaataaaaaaaataaaattttaaactaacttaa

SEQ ID NO: 2602 - DNA, 1370 bp, Homo sapiens
  source 1..1370: mol_type = unassigned DNA
ccgcggtcttctctctccacccccgacaccgcggggctccccccgcccgcccacggcgggccccggctgcccgatccccctcgcttcccgcgctctccagcggggccccagccccggccccctctctccctcccttctctctaattccccttccggacgctgccatcatgttgaagcctcagccgctacaacagccctcccagccccagcagccgccccccacgcaacaggccgtggcccgtcggccccccgggggcaccagccctcccaacggcggcctcccggggccgctggccacctctgcggctcctcccgggcctccagcggccgcctccccctgcctggggcctgtggccgctgccgggagcgggctccgccggggagccgaaggcatcttggcgccgcagccgccgccgccgcagcaacaccaggagaggccgggggcagccgccatcggcagcgccaggggacagagcacaggaaagggacccccacagtcacctgtgtttgaaggcgtctacaacaattccagaatgctgcatttccttacagctgttgtgggctccacttgtgatgtaaaggtgaaaaatggtaccacttatgagggtatcttcaagacgctaagctcaaagtttgaactagccgtggatgctgtgcaccggaaagcatctgagccagcaggtggccctcgtcgggaggacattgtggacaccatggtgtttaagccaagtgatgtcatgcttgttcacttccgaaatgttgacttcaactatgctactaaagacaagttcaccgattcagccattgccatgaactcgaaagtgaatggggaacacaaagagaaggtgcttcagcgctgggaggggggtgacagcaacagcgacgactatgacctcgagtctgacatgtccaatggatgggaccccaatgaaatgttcaagttcaatgaggagaactacggtgtgaagactacctatgatagcagtctttcttcttatacggtgcccttagaaaaggacaactcagaagagtttcgtcagcgagagctgcgtgcggcccagttggctcgagagattgaatcaagcccccagtaccgcctacggatcgccatggagaacgacgatgggcgcactgaagaggagaagcacagtgcagtccagcggcagggctcagggcgggagagccccagcttggcatccagggaggggaagtatatccctctgcctcctcacagagggcagggccagggtccagcaggggtggggggttcctgctctgcccctgcccgtccccacccagtcttgccctcccatcctctcatctattcccccgctggagacggaagatcttttattttctattatttataa

SEQ ID NO: 2603 - DNA, 3737 bp, Homo sapiens
  source 1..3737: mol_type = unassigned DNA
ccgcggtcttctctctccacccccgacaccgcggggctccccccgcccgcccacggcgggccccggctgcccgatccccctcgcttcccgcgctctccagcggggccccagccccggccccctctctccctcccttctctctaattccccttccggacgctgccatcatgttgaagcctcagccgctacaacagccctcccagccccagcagccgccccccacgcaacaggccgtggcccgtcggccccccgggggcaccagccctcccaacggcggcctcccggggccgctggccacctctgcggctcctcccgggcctccagcggccgcctccccctgcctggggcctgtggccgctgccgggagcgggctccgccggggagccgaaggcatcttggcgccgcagccgccgccgccgcagcaacaccaggagaggccgggggcagccgccatcggcagcgccaggggacagagcacaggaaagggacccccacagtcacctgtgtttgaaggcgtctacaacaattccagaatgctgcatttccttacagctgttgtgggctccacttgtgatgtaaaggtgaaaaatggtaccacttatgagggtatcttcaagacgctaagctcaaagtttgaactagccgtggatgctgtgcaccggaaagcatctgagccagcaggtggccctcgtcgggaggacattgtggacaccatggtgtttaagccaagtgatgtcatgcttgttcacttccgaaatgttgacttcaactatgctactaaagacaagttcaccgattcagccattgccatgaactcgaaagtgaatggggaacacaaagagaaggtgcttcagcgctgggaggggggtgacagcaacagcgacgactatgacctcgagtctgacatgtccaatggatgggaccccaatgaaatgttcaagttcaatgaggagaactacggtgtgaagactacctatgatagcagtctttcttcttatacggtgcccttagaaaaggacaactcagaagagtttcgtcagcgagagctgcgtgcggcccagttggctcgagagattgaatcaagcccccagtaccgcctacggatcgccatggagaacgacgatgggcgcactgaagaggagaagcacagtgcagtccagcggcagggctcagggcgggagagccccagcttggcatccagggaggggaagtatatccctctgcctcaacgagtccgggaaggtccccggggaggagttcgatgcagcagctctcggggcggtcggcctggccttagctctttgccacctcgtggccctcaccatctggacaacagcagccctggcccaggttctgaggcccgtggtatcaatggaggcccttcccgcatgtccccaaaggcacaacggcctctgagaggtgccaagactctgtcttcgcccagtaataggccttctggagaaacttctgttccacctcctcctgcagtgggccggatgtatcccccgcgttctcccaagtctgctgcccctgccccaatctcagcttcctgtccagagcctcccatcggctcggcagtgccaacctcttcagcctccatccctgtgacctcatcagtctcagatcctggagtgggctccatttctccagcttctccaaagatctccctggcccccacagatgtaaaagaactctctaccaaggaacctgggagaactctggagccccaggagctggctcggatagctgggaaagtccctggtcttcagaatgaacagaaacgattccaactggaagaactgagaaagtttggggcccagtttaagcttcagcccagtagctcccctgagaacagcctggatccttttcctccccggatcttaaaggaggagcccaaaggaaaggagaaagaggttgatggtctgttgacttcagagcccatggggtctcccgtctcctccaagacagagtccgtatcggataaggaggacaaaccacccctggcaccatcaggaggcactgaggggccagagcagcccccaccaccttgtccaagccaaactggcagccccccggtgggcctcatcaagggagaagacaaagatgagggccctgttgctgaacaagtaaagaaatcaacgttgaaccctaatgctaaggagttcaatcctacaaagcctctgctgtctgtgaataaatccaccagtaccccaacttctccggggccccggactcattcaactccctccatcccggtgctgacagcaggccagagtgggctatacagcccccagtacatctcctacatacctcagatccacatgggaccagctgtgcaggcacctcagatgtatccatatcctgtatccaattcagtgcctgggcagcagggcaagtaccggggagcaaaaggctcccttcctccgcagcgctcggaccaacaccagccagcctcagccccgccgatgatgcaggccgccgcggctgctggcccgcctctggtggctgccacgccctattcttcctacatcccctacaaccctcagcagttcccaggccagccagccatgatgcagcccatggcccactacccctcacagccggtgtttgcccccatgcttcagagcaacccacgcatgctgacgtcgggcagccatccccaggccatcgtgtcatcctctacccctcagtacccttctgcagagcagcctaccccccaagccctttatgccactgttcaccagtcctacccacaccatgccacacagctccatgcccaccagccgcagccggctaccacgcctactggaagccagccgcagtcccagcatgcggcccccagtcctgtccagcatcaggcggggcaggccccacacttgggcagtggacagccacagcagaatctgtaccacccaggggccctgacaggcacgccgccctctctgccaccgggaccttctgcccagtcccctcagagcagcttcccccagccagccgctgtgtatgccatccaccaccagcagctgccccacggcttcaccaacatggcccatgttacccaggcccatgtccaaactggaatcacagcagccccgccccctcaccctggggctccccacccgccccaggtgatgctgctgcacccaccccagagtcatggggggcccccccaaggcgcggtgccccagagtggggtgcctgcactctcagcttccacaccctcaccctacccctacatcggacacccccaagctccccttccaccccccggggaactgaagattgtcctggccgcgacctgagacctccatgagtggagggaagagtgatctatgtctcttcccccagcagctcggaccactcccagccccccatccccccgttccccaggggagctggggaattcctgccaagcaccttgaatgggaggggcctcacagagggcagggccagggtccagcaggggtggggggttcctgctctgcccctgcccgtccccacccagtcttgccctcccatcctctcatctattcccccgctggagacggaagatcttttattttctattatttataacttcagacttgggccccctgttctttctttcccattaacttgagtgacctgtgtgagagacagacagatgccccacgaggatggctggacaaggacttttactttttattacataaaaatattaaaaaataaataaaaaaaataaaattttaaactaactt

SEQ ID NO: 2604 - DNA, 3981 bp, Homo sapiens
  source 1..3981: mol_type = unassigned DNA
ccgcggtcttctctctccacccccgacaccgcggggctccccccgcccgcccacggcgggccccggctgcccgatccccctcgcttcccgcgctctccagcggggccccagccccggccccctctctccctcccttctctctaattccccttccggacgctgccatcatgttgaagcctcagccgctacaacagccctcccagccccagcagccgccccccacgcaacaggccgtggcccgtcggccccccgggggcaccagccctcccaacggcggcctcccggggccgctggccacctctgcggctcctcccgggcctccagcggccgcctccccctgcctggggcctgtggccgctgccgggagcgggctccgccggggagccgaaggcatcttggcgccgcagccgccgccgccgcagcaacaccaggagaggccgggggcagccgccatcggcagcgccaggggacagagcacaggaaagggacccccacagtcacctgtgtttgaaggcgtctacaacaattccagaatgctgcatttccttacagctgttgtgggctccacttgtgatgtaaaggtgaaaaatggtaccacttatgagggtatcttcaagacgctaagctcaaagtttgaactagccgtggatgctgtgcaccggaaagcatctgagccagcaggtggccctcgtcgggaggacattgtggacaccatggtgtttaagccaagtgatgtcatgcttgttcacttccgaaatgttgacttcaactatgctactaaagacaagttcaccgattcagccattgccatgaactcgaaagtgaatggggaacacaaagagaaggtgcttcagcgctgggaggggggtgacagcaacagcgacgactatgacctcgagtctgacatgtccaatggatgggaccccaatgaaatgttcaagttcaatgaggagaactacggtgtgaagactacctatgatagcagtctttcttcttatacggtgcccttagaaaaggacaactcagaagagtttcgtcagcgagagctgcgtgcggcccagttggctcgagagattgaatcaagcccccagtaccgcctacggatcgccatggagaacgacgatgggcgcactgaagaggagaagcacagtgcagtccagcggcagggctcagggcgggagagccccagcttggcatccagggaggggaagtatatccctctgcctcaacgagtccgggaaggtccccggggaggagttcgatgcagcagctctcggggcggtcggcctggccttagctctttgccacctcgtggccctcaccatctggacaacagcagccctggcccaggttctgaggcccgtggtatcaatggaggcccttcccgcatgtccccaaaggcacaacggcctctgagaggtgccaagactctgtcttcgcccagtaataggccttctggagaaacttctgttccacctcctcctgcagtgggccggatgtatcccccgcgttctcccaagtctgctgcccctgccccaatctcagcttcctgtccagagcctcccatcggctcggcagtgccaacctcttcagcctccatccctgtgacctcatcagtctcagatcctggagtgggctccatttctccagcttctccaaagatctccctggcccccacagatgtaaaagaactctctaccaaggaacctgggagaactctggagccccaggagctggctcggatagctgggaaagtccctggtcttcagaatgaacagaaacgattccaactggaagaactgagaaagtttggggcccagtttaagcttcagcccagtagctcccctgagaacagcctggatccttttcctccccggatcttaaaggaggagcccaaaggaaaggagaaagaggttgatggtctgttgacttcagagcccatggggtctcccgtctcctccaagacagagtccgtatcggataaggaggacaaaccacccctggcaccatcaggaggcactgaggggccagagcagcccccaccaccttgtccaagccaaactggcagccccccggtgggcctcatcaagggagaagacaaagatgagggccctgttgctgaacaagtaaagaaatcaacgttgaaccctaatgctaaggagttcaatcctacaaagcctctgctgtctgtgaataaatccaccagtaccccaacttctccggggccccggactcattcaactccctccatcccggtgctgacagcaggccagagtgggctatacagcccccagtacatctcctacatacctcagatccacatgggaccagctgtgcaggcacctcagatgtatccatatcctgtatccaattcagtgcctgggcagcagggcaagtaccggggagcaaaaggctcccttcctccgcagcgctcggaccaacaccagccagcctcagccccgccgatgatgcaggccgccgcggctgctggcccgcctctggtggctgccacgccctattcttcctacatcccctacaaccctcagcagttcccaggccagccagccatgatgcagcccatggcccactacccctcacagccggtgtttgcccccatgcttcagagcaacccacgcatgctgacgtcgggcagccatccccaggccatcgtgtcatcctctacccctcagtacccttctgcagagcagcctaccccccaagccctttatgccactgttcaccagtcctacccacaccatgccacacagctccatgcccaccagccgcagccggctaccacgcctactggaagccagccgcagtcccagcatgcggcccccagtcctgtccagcatcaggcggggcaggccccacacttgggcagtggacagccacagcagaatctgtaccacccaggggccctgacaggcacgccgccctctctgccaccgggaccttctgcccagtcccctcagagcagcttcccccagccagccgctgtgtatgccatccaccaccagcagctgccccacggcttcaccaacatggcccatgttacccaggcccatgtccaaactggaatcacagcagccccgccccctcaccctggggctccccacccgccccaggtgatgctgctgcacccaccccagagtcatggggggcccccccaaggcgcggtgccccagagtggggtgcctgcactctcagcttccacaccctcaccctacccctacatcggacacccccaaggtgagcagcctggccaggcgcctggatttccaggaggagccgatgacaggattctatgtagggtgggcagaagccacagtcgccgccgccaggggcttgctcctggctctgtcctttgcttccctccgtcctcgctcagttgtgatccagcagcccccctccccactgcctccccagctctcagtgaccccgactgtctcctgacttagccgaggtaagttcaatctcatccctcccagcagctccccttccaccccccggggaactgaagattgtcctggccgcgacctgagacctccatgagtggagggaagagtgatctatgtctcttcccccagcagctcggaccactcccagccccccatccccccgttccccaggggagctggggaattcctgccaagcaccttgaatgggaggggcctcacagagggcagggccagggtccagcaggggtggggggttcctgctctgcccctgcccgtccccacccagtcttgccctcccatcctctcatctattcccccgctggagacggaagatcttttattttctattatttataacttcagacttgggccccctgttctttctttcccattaacttgagtgacctgtgtgagagacagacagatgccccacgaggatggctggacaaggacttttactttttattacataaaaatattaaaaaataaataaaaaaaataaaattttaaactaacttaa

SEQ ID NO: 2605 - DNA, 7224 bp, Homo sapiens
  source 1..7224: mol_type = unassigned DNA
aaagggtgaaagagaaacttggcgacctcccggaggagttcgcgaagcgaccaggagcgtgttgccatcgtcctcacccggcacccaattccaccacagagtcgggatttcgtcggtgatcgtgatggggtgcttttatttttctctttgattttcaaaaaatgtctatgtgactgtccctatcttaaggggaagttgaaagtgggggcgggggtgctcaatgagaaacgttgccttgtgtgtagttgtttggagcacactgcaaattatattggcatctctttccaaaagtcactttgattcaacttcgatagctttctcgtaaatggcacgtttaggtggtgagaggtggatgaggaaacaggcaccagtgcagctgatttgacctccagtgggatagatacgattagcaccaggatcgtgtctcattttgaacccagatctgaacagaattaagacgaacgagctttcacaattgcagcagatgaagatccattggtaaattgatcaggatttttggcctaccctccaaagaaaaggagcggaaagaatgtcggagcgggccgcggatgacgtcaggggggagccgcgccgcgcggcggcggcggcgggcggagcagcggccgcggccgcccggcagcagcagcagcagcagcagcagcagcagccgccgcctccgcagccccagcggcagcagcacccgccaccgccgccacggcgcacacggccggaggacggcgggcccggcgccgcctccacctcggccgccgcaatggcgacggtcggggagcgcaggcctctgcccagtcctgaagtgatgctgggacagtcgtggaatctgtgggttgaggcttccaaacttcctgggaaggacgggacagaattggacgaaagtttcaaggagtttgggaaaaaccgcgaagtcatggggctctgtcgggaagacatgccaatatttggtttctgtccagcccatgatgatttctacttggtggtgtgtaacgactgtaatcaggttgtcaaaccgcaggcatttcaatcacattatgaaagaagacatagctcatccagcaagccgcctttggccgttcctcccacttcagtattttccttcttcccttctctgtccaaaagcaaaggaggcagtgcaagtggaagcaaccgttcttccagtggaggtgttcttagcgcatcctcatcaagttccaagttgttgaaatcacccaaagagaaactgcagctcagggggaacaccaggccaatgcatcccattcagcaaagtagagttccccatggtagaatcatgacaccctctgtgaaagtggaaaagattcatccgaaaatggatggcacactactgaaatctgcggtggggccaacctgtcctgctactgtgagttccttagtcaagcctggccttaactgcccctcaataccaaagccaaccttgccttcacctggacagattctgaatggcaaagggcttcctgcaccgcccactctggaaaagaaacctgaagacaattccaataataggaaatttttaaataagagattatcagaaagagagtttgatcctgacatccactgtggggttattgatctcgacaccaagaagccctgcacccggtctttgacatgcaagacacattccttaacccagcgcagggctgtccagggtagaagaaaacgatttgatgtgttattagccgagcacaaaaacaaaaccagggaaaaggaattgattcgccatccggactctcagcaaccaccgcagcctctcagggacccgcatcccgcccctcctagaacgtcacaggagccgcaccaaaaccctcacggagtgattccttccgaatcaaagccttttgtagctagtaaacctaaacctcacacccccagtcttccaaggcctccaggctgccctgctcagcaaggtgggagtgcccccattgaccctcctccagtccatgaatctccacaccctcccctgcctgccactgagccagcttctcggttatccagtgaggagggcgaaggcgatgacaaagaagagtctgttgaaaaactggactgtcattattcaggtcatcatcctcagccagcatctttttgcacatttgggagccggcagataggaagaggctattacgtgtttgactccaggtggaatcgacttcgctgcgccctcaacctcatggtggagaagcatctgaatgcacagctatggaagaaaatcccaccagtgcccagtaccacctcacccatctccacacgtattcctcaccggacaaactctgtgccgacatcacaatgtggagtcagctatctggcagcagccaccgtctctacatccccagtcctgctctcatctacctgcatctccccaaatagcaaatcggtaccagctcatggaaccacactaaatgcacagcctgctgcttcaggggcgatggatcctgtgtgcagtatgcaatccagacaagtgtcctcttcatcctcatccccttccacgccctctggcctttcctcggttccttcctcccccatgtccaggaaacctcagaaattgaaatccagcaaatctttgaggcccaaggagtcttctggtaacagcactaactgtcaaaatgccagtagcagtaccagtggcggctcaggaaagaaacgcaaaaacagttccccactgttggttcactcttcctcctcctcttcctcctcctcctcttcttctcattccatggagtcttttaggaaaaactgtgtggctcactctgggcctccctacccctcaacggtaacatcttcccatagcatcggcctcaactgtgtgacgaataaagcaaatgcggtgaacgtccggcatgaccagtcagggaggggcccccccaccgggagccctgctgaatccatcaagaggatgagtgtgatggtgaacagcagtgattctactctttctcttgggccattcattcaccagtccaatgaactgcctgtcaactcccacggcagtttttcccactcacacactcctctagacaaactcataggaaagaaaagaaagtgctcacccagctcgagcagcatcaacaacagcagcagcaaacccacaaaggttgccaaagtgccagccgtgaacaatgtccacatgaaacacacaggcaccatcccaggggcacaaggactgatgaacagttccctccttcatcagccaaaggcacgtccctgacagctgaaaatagcacggggaggaataatgcggacacttttgaggacaagttacacctccactcagcactctggactccacgatgcctttgagtctgttttcccaacctcctgtgggcctcaagggtagaaacctgccgggctgttgttttaacgaggatttccctgaagctatgtctctagcagtgagtactcataaaggacactggatcaagttcagccaccgaattgcttttatcagtgttaaagtggtctgaactgcttgctaccaatctgtgagaagtttttgtttttgttttgttttttaacttgcagtatatcacagagccactcttcaagtagattggctgggcaaaagaatgttttggcaagagcgttactgtagacctttctccctccttccttttactaccatttttttttaacactgtcatctgtaggtcactctccagcagttaggcaccttaactggagaccagaaaccttccagagaacacagggctgcatcccgagcaaccctctgaagaagggaattaggctttagattttgatagcaatgttccaggaatgaaatatagatgttagcccaagacaccatgacaaaatagcccagccttttgagagtaatttgggaaaagaagctgtcagaagtttctaacttacaaactggtttgaaatttttgatgcccagacagcaagtataaatcattttggaggcttacttttcatgatacaaaagcaattctgtgtgatttttttttttaagaagaaagaaaatgcaagctagttttgagaaaggaaggccaaattgggtcgggggagggtgggagtgaggaagttaaaatcactatagggagaaaaaacttttttcaagatttccaaagagatgaaattttcttaatccttttaagttttcatagtaaacagtatggcagattgggttggttgtcctacctggtctatttttaaaagtcaccttttaaagtgacattattagatacacttaaatgtttccaaggcactctctacattacccttgtttttctctttggatactgtcctgggactaagtgtagatttctgcttcaagcacttctggcattgtgtgtttttgtatgcactccccttcatgccacttcagatgtttatttggatgtggttggggacgagagcagacaccaaggaaagggagttggagagaatgtaagtcctgacctgaaggtcttttgtgatgcatgtataggattgccctgacacacaccctcctttcttgggattataccagccatcttcctgagagttttggagccctctaggatattttttctagtaccccaccccccacccctaaagaaagaccttaatatgttaaaacagcattgcttggagaaggtgtcattgaattccgggacgagccggagcctttaaatgggtgcttccaccactacaggctcctgacacgagtaacaggcactgttgcttagaagaacacacgaagttgccgaacacagggtaaaatttccaaggcgctgatcgttgccctggccagggcctgatgagagccagtcagtacattctttttttcctacagttcttgggtttcaaacttcagtttcagggaatttcaagtcaacaacaggtagaatgaataaacttggttaccagcctaataatgtgaattgctacagaattattcttattatgtaagaaaacaaaaactttatgcagatactttagctataaattgatgtaaaatactgatttttttaaaggaaggagagaacagtatcttgttcaattattatgcaatcaatcagtaaatgtttttaaaatgatactacaggagagcttagtaaggagagggcatggatgggccagtttggcatagttgggagaaatcagtctggtttccatcccagtcggggaagagagaggtgagagggaatcagaacgtacctagttgattccttggtgacaagtgcaatggggtatgggtagaatttattttcagagccaagaggacttgatggttataaataaagttgcctttagcaatggaatttacagatcgatcatgttgttccgaaagatgtgaataggatccacaataacaagttgattcagactaatgtagatatttagattagcaagtattgaacatttgatttcttagactgaggttttaaatgaatttcattatttctcccggtaatacacagagcatcgggattaggaaattagccattttggattctgtctgccacaaacagacctattctaaacagtgctattaaattttagactgttgttcaaatattttattttctcctaaactactttttatggtgatgaataattaagaccatttaaaacacgggagtacaagtatttttttgaattaaattaacttgcaaaaaccaaatttgcagtggttgggttgtttctagacagactttggtatcaatttaaaaccaagataatttttatattctttccaatagaatttcatgacaactcctgcagttttcttaacctacaaaaaaaaaaaaaaagtgctgcaatgatgaacaaagaattatacaaaacctacttttgtatctttattttggaatttcttgttctattataaatatggaagtatccctatttcagaagacatattttgttaaaaatgaattgtacatatttaaatatgtatttttgcacaggtctttttttctgatatcctgttttggtacaattgagatcatctagtatttatttattaattaataaaagtaaatacctttttataatttgaagtggttcactgccaagccaatagttctagaacctgcctcctttacagttttaagggatgcctctgttctgtgaaaagtctttgtcccttttagtgtctcgggagtggattcatacagatgaagtgggcattgcttcttcctggttgcctggtttcccgatagactacatgtaactaagtgacacactgcttttcttttgttagtattttatgtgtgggagtatgtgactgcgtgtgtgtgtgcctgtgcgtgtgtgtgtatactcagcacatgtatgttactatgtgatgtggtttaaaactaatggaaaaaactgaaagtgcctgaaactagttttaagcttagacagaatctctttaaaaagacttgaatgttcagttgaacttttggagtttgctttttccacctaaatattgtttctaaaattttaggggcggagttgaaaaccaccaatgctggtaattttataaggtattttaaaattaagacctcttggttcatagtaattcaattggtgatggattgcctggtggcaccaagggttacagatctttttgtcagccagcaacttacacgatgtgtccgttttgttattcactcatgaaatacaatttaaaatatttaaaatattttgtattccaaaaatataatacaaagaagtacctctgagaacattgaaaaaaatgtataatttgaaaaatgtaacttataagggcagctgtcttcctgcaagagttctgttgccaaggaatttcttaatgtcgctcattctgtccagggggtttggggcgattgggctttgaaaaaatattcttaaaagtttgtttagcagaaaataatcacttttacattttgtgcaaaacattttacattttcagataatttaaatgagcactacatactgtcagtgtgaatgtagggccttgaaagcattttgcttttttttttttttttttttttttgagcttggttataaaagcaatctcctgtgttaaaaacgtgtgaatagtttgataatttgtacacataatcaagagcatctcagctggactttgtgttggctgctgtatagaacatgaacaaatgtcaagggatagaaaattactttggatatttaaaagagaagaaatatatagtctatttgttttgtaacaagtttctgtaaataaaataatttatactatttataagaaaa

SEQ ID NO: 2606 - DNA, 7285 bp, Homo sapiens
  source 1..7285: mol_type = unassigned DNA
gaaaaagggtgaaagagaaacttggcgacctcccggaggagttcgcgaagcgaccaggagcgtgttgccatcgtcctcacccggcacccaattccaccacagagtcgggatttcgtcggtgatcgtgatggggtgcttttatttttctctttgattttcaaaaaatgtctatgtgactgtccctatcttaaggggaagttgaaagtgggggcgggggtgctcaatgagaaacgttgccttgtgtgtagttgtttggagcacactgcaaattatattggcatctctttccaaaagtcactttgattcaacttcgatagctttctcgtaaatggcacgtttaggtggtgagaggtggatgaggaaacaggcaccagtgcagctgatttgacctccagtgggatagatacgattagcaccaggatcgtgtctcattttgaacccagatctgaacagaattaagacgaacgagctttcacaattgcagcagatgaagatccattggtaaattgatcaggatttttggcctaccctccaaagaaaaggagcggaaagaatgtcggagcgggccgcggatgacgtcaggggggagccgcgccgcgcggcggcggcggcgggcggagcagcggccgcggccgcccggcagcagcagcagcagcagcagcagcagcagccgccgcctccgcagccccagcggcagcagcacccgccaccgccgccacggcgcacacggccggaggacggcgggcccggcgccgcctccacctcggccgccgcaatggcgacggtcggggagcgcaggcctctgcccagtcctgaagtgatgctgggacagtcgtggaatctgtgggttgaggcttccaaacttcctgggaaggacgggacagaattggacgaaagtttcaaggagtttgggaaaaaccgcgaagtcatggggctctgtcgggaagacatgccaatatttggtttctgtccagcccatgatgatttctacttggtggtgtgtaacgactgtaatcaggttgtcaaaccgcaggcatttcaatcacattatgaaagaagacatagctcatccagcaagccgcctttggccgttcctcccacttcagtattttccttcttcccttctctgtccaaaagcaaaggaggcagtgcaagtggaagcaaccgttcttccagtggaggtgttcttagcgcatcctcatcaagttccaagttgttgaaatcacccaaagagaaactgcagctcagggggaacaccaggccaatgcatcccattcagcaaagtagagttccccatggtagaatcatgacaccctctgtgaaagtggaaaagattcatccgaaaatggatggcacactactgaaatctgcggtggggccaacctgtcctgctactgtgagttccttagtcaagcctggccttaactgcccctcaataccaaagccaaccttgccttcacctggacagattctgaatggcaaagggcttcctgcaccgcccactctggaaaagaaacctgaagacaattccaataataggaaatttttaaataagagattatcagaaagagagtttgatcctgacatccactgtggggttattgatctcgacaccaagaagccctgcacccggtctttgacatgcaagacacattccttaacccagcgcagggctgtccagggtagaagaaaacgatttgatgtgttattagccgagcacaaaaacaaaaccagggaaaaggaattgattcgccatccggactctcagcaaccaccgcagcctctcagggacccgcatcccgcccctcctagaacgtcacaggagccgcaccaaaaccctcacggagtgattccttccgaatcaaagccttttgtagctagtaaacctaaacctcacacccccagtcttccaaggcctccaggctgccctgctcagcaaggtgggagtgcccccattgaccctcctccagtccatgaatctccacaccctcccctgcctgccactgagccagcttctcggttatccagtgaggagggcgaaggcgatgacaaagaagagtctgttgaaaaactggactgtcattattcaggtcatcatcctcagccagcatctttttgcacatttgggagccggcagataggaagaggctattacgtgtttgactccaggtggaatcgacttcgctgcgccctcaacctcatggtggagaagcatctgaatgcacagctatggaagaaaatcccaccagtgcccagtaccacctcacccatctccacacgtattcctcaccggacaaactctgtgccgacatcacaatgtggagtcagctatctggcagcagccaccgtctctacatccccagtcctgctctcatctacctgcatctccccaaatagcaaatcggtaccagctcatggaaccacactaaatgcacagcctgctgcttcaggggcgatggatcctgtgtgcagtatgcaatccagacaagtgtcctcttcatcctcatccccttccacgccctctggcctttcctcggttccttcctcccccatgtccaggaaacctcagaaattgaaatccagcaaatctttgaggcccaaggagtcttctggtaacagcactaactgtcaaaatgccagtagcagtaccagtggcggctcaggaaagaaacgcaaaaacagttccccactgttggttcactcttcctcctcctcttcctcctcctcctcttcttctcattccatggagtcttttaggaaaaactgtgtggctcactctgggcctccctacccctcaacggtaacatcttcccatagcatcggcctcaactgtgtgacgaataaagcaaatgcggtgaacgtccggcatgaccagtcagggaggggcccccccaccgggagccctgctgaatccatcaagaggatgagtgtgatggtgaacagcagtgattctactctttctcttgggccattcattcaccagtccaatgaactgcctgtcaactcccacggcagtttttcccactcacacactcctctagacaaactcataggaaagaaaagaaagtgctcacccagctcgagcagcatcaacaacagcagcagcaaacccacaaaggttgccaaagtgccagccgtgaacaatgtccacatgaaacacacaggcaccatcccaggggcacaaggactgatgaacagttccctccttcatcaggatatctcctcaccttgcttacgaacaggaatttcagcaacatcaccccagagccctgacttaaaatccaaaggcacgtccctgacagctgaaaatagcacggggaggaataatgcggacacttttgaggacaagttacacctccactcagcactctggactccacgatgcctttgagtctgttttcccaacctcctgtgggcctcaagggtagaaacctgccgggctgttgttttaacgaggatttccctgaagctatgtctctagcagtgagtactcataaaggacactggatcaagttcagccaccgaattgcttttatcagtgttaaagtggtctgaactgcttgctaccaatctgtgagaagtttttgtttttgttttgttttttaacttgcagtatatcacagagccactcttcaagtagattggctgggcaaaagaatgttttggcaagagcgttactgtagacctttctccctccttccttttactaccatttttttttaacactgtcatctgtaggtcactctccagcagttaggcaccttaactggagaccagaaaccttccagagaacacagggctgcatcccgagcaaccctctgaagaagggaattaggctttagattttgatagcaatgttccaggaatgaaatatagatgttagcccaagacaccatgacaaaatagcccagccttttgagagtaatttgggaaaagaagctgtcagaagtttctaacttacaaactggtttgaaatttttgatgcccagacagcaagtataaatcattttggaggcttacttttcatgatacaaaagcaattctgtgtgatttttttttttaagaagaaagaaaatgcaagctagttttgagaaaggaaggccaaattgggtcgggggagggtgggagtgaggaagttaaaatcactatagggagaaaaaacttttttcaagatttccaaagagatgaaattttcttaatccttttaagttttcatagtaaacagtatggcagattgggttggttgtcctacctggtctatttttaaaagtcaccttttaaagtgacattattagatacacttaaatgtttccaaggcactctctacattacccttgtttttctctttggatactgtcctgggactaagtgtagatttctgcttcaagcacttctggcattgtgtgtttttgtatgcactccccttcatgccacttcagatgtttatttggatgtggttggggacgagagcagacaccaaggaaagggagttggagagaatgtaagtcctgacctgaaggtcttttgtgatgcatgtataggattgccctgacacacaccctcctttcttgggattataccagccatcttcctgagagttttggagccctctaggatattttttctagtaccccaccccccacccctaaagaaagaccttaatatgttaaaacagcattgcttggagaaggtgtcattgaattccgggacgagccggagcctttaaatgggtgcttccaccactacaggctcctgacacgagtaacaggcactgttgcttagaagaacacacgaagttgccgaacacagggtaaaatttccaaggcgctgatcgttgccctggccagggcctgatgagagccagtcagtacattctttttttcctacagttcttgggtttcaaacttcagtttcagggaatttcaagtcaacaacaggtagaatgaataaacttggttaccagcctaataatgtgaattgctacagaattattcttattatgtaagaaaacaaaaactttatgcagatactttagctataaattgatgtaaaatactgatttttttaaaggaaggagagaacagtatcttgttcaattattatgcaatcaatcagtaaatgtttttaaaatgatactacaggagagcttagtaaggagagggcatggatgggccagtttggcatagttgggagaaatcagtctggtttccatcccagtcggggaagagagaggtgagagggaatcagaacgtacctagttgattccttggtgacaagtgcaatggggtatgggtagaatttattttcagagccaagaggacttgatggttataaataaagttgcctttagcaatggaatttacagatcgatcatgttgttccgaaagatgtgaataggatccacaataacaagttgattcagactaatgtagatatttagattagcaagtattgaacatttgatttcttagactgaggttttaaatgaatttcattatttctcccggtaatacacagagcatcgggattaggaaattagccattttggattctgtctgccacaaacagacctattctaaacagtgctattaaattttagactgttgttcaaatattttattttctcctaaactactttttatggtgatgaataattaagaccatttaaaacacgggagtacaagtatttttttgaattaaattaacttgcaaaaaccaaatttgcagtggttgggttgtttctagacagactttggtatcaatttaaaaccaagataatttttatattctttccaatagaatttcatgacaactcctgcagttttcttaacctacaaaaaaaaaaaaaaagtgctgcaatgatgaacaaagaattatacaaaacctacttttgtatctttattttggaatttcttgttctattataaatatggaagtatccctatttcagaagacatattttgttaaaaatgaattgtacatatttaaatatgtatttttgcacaggtctttttttctgatatcctgttttggtacaattgagatcatctagtatttatttattaattaataaaagtaaatacctttttataatttgaagtggttcactgccaagccaatagttctagaacctgcctcctttacagttttaagggatgcctctgttctgtgaaaagtctttgtcccttttagtgtctcgggagtggattcatacagatgaagtgggcattgcttcttcctggttgcctggtttcccgatagactacatgtaactaagtgacacactgcttttcttttgttagtattttatgtgtgggagtatgtgactgcgtgtgtgtgtgcctgtgcgtgtgtgtgtatactcagcacatgtatgttactatgtgatgtggtttaaaactaatggaaaaaactgaaagtgcctgaaactagttttaagcttagacagaatctctttaaaaagacttgaatgttcagttgaacttttggagtttgctttttccacctaaatattgtttctaaaattttaggggcggagttgaaaaccaccaatgctggtaattttataaggtattttaaaattaagacctcttggttcatagtaattcaattggtgatggattgcctggtggcaccaagggttacagatctttttgtcagccagcaacttacacgatgtgtccgttttgttattcactcatgaaatacaatttaaaatatttaaaatattttgtattccaaaaatataatacaaagaagtacctctgagaacattgaaaaaaatgtataatttgaaaaatgtaacttataagggcagctgtcttcctgcaagagttctgttgccaaggaatttcttaatgtcgctcattctgtccagggggtttggggcgattgggctttgaaaaaatattcttaaaagtttgtttagcagaaaataatcacttttacattttgtgcaaaacattttacattttcagataatttaaatgagcactacatactgtcagtgtgaatgtagggccttgaaagcattttgcttttttttttttttttttttttttgagcttggttataaaagcaatctcctgtgttaaaaacgtgtgaatagtttgataatttgtacacataatcaagagcatctcagctggactttgtgttggctgctgtatagaacatgaacaaatgtcaagggatagaaaattactttggatatttaaaagagaagaaatatatagtctatttgttttgtaacaagtttctgtaaataaaataatttatactattt

SEQ ID NO: 2607 - DNA, 728 bp, Homo sapiens
  source 1..728: mol_type = unassigned DNA
gaaaaagggtgaaagagaaacttggcgacctcccggaggagttcgcgaagcgaccaggagcgtgttgccatcgtcctcacccggcacccaattccaccacagagtcgggatttcgtcggtgatcgtgatggggtgcttttatttttctctttgattttcaaaaaatgtctatgtgactgtccctatcttaaggggaagttgaaagtgggggcgggggtgctcaatgagaaacgttgccttgtgtgtagttgtttggagcacactgcaaattatattggcatctctttccaaaagtcactttgattcaacttcgatagctttctcgtaaatggcacgtttaggtggtgagaggtggatgaggaaacaggcaccagtgcagctgatttgacctccagtgggatagatacgattagcaccaggatcgtgtctcattttgaacccaggctggagcgcagtggcacaatcgtggcttactgcagcgttgacctcctggcctcaagcagtcctcccactgcagcttctcaagaagccggggatacagatctgaacagaattaagacgaacgagctttcacaattgcagcagatgaagatccattggtaaattgatcaggatttttggcctaccctccaaagaaaaggagcggaaagaatgtcggagcgggccgcggatgacgtcaggggggagccgcgccgcgcggcggcggcggcgggcggagcagcggccgc

SEQ ID NO: 2608 - DNA, 3683 bp, Homo sapiens
  source 1..3683: mol_type = unassigned DNA
ctgccctggggccggccggccggctcctccataggtggctgcatttccgacttcgccctggctccagtccgggggcttgacgtgcaaacttcgccggagcgagctgagagggagggaccggcaagtgggaggaggcggcgggaggcgtctccgcttaagggagccggccgggtgccgccgctcggacggacgcgcggacggaaggaaggagcggggcagccgggccgggcccggggatgcaagcggccgaagggagcggaaagaatgtcggagcgggccgcggatgacgtcaggggggagccgcgccgcgcggcggcggcggcgggcggagcagcggccgcggccgcccggcagcagcagcagcagcagcagcagcagcagccgccgcctccgcagccccagcggcagcagcacccgccaccgccgccacggcgcacacggccggaggacggcgggcccggcgccgcctccacctcggccgccgcaatggcgacggtcggggagcgcaggcctctgcccagtcctgaagtgatgctgggacagtcgtggaatctgtgggttgaggcttccaaacttcctgggaaggacgggacagaattggacgaaagtttcaaggagtttgggaaaaaccgcgaagtcatggggctctgtcgggaagacatgccaatatttggtttctgtccagcccatgatgatttctacttggtggtgtgtaacgactgtaatcaggttgtcaaaccgcaggcatttcaatcacattatgaaagaagacatagctcatccagcaagccgcctttggccgttcctcccacttcagtattttccttcttcccttctctgtccaaaagcaaaggaggcagtgcaagtggaagcaaccgttcttccagtggaggtgttcttagcgcatcctcatcaagttccaagttgttgaaatcacccaaagagaaactgcagctcagggggaacaccaggccaatgcatcccattcagcaaagtagagttccccatggtagaatcatgacaccctctgtgaaagtggaaaagattcatccgaaaatggatggcacactactgaaatctgcggtggggccaacctgtcctgctactgtgagttccttagtcaagcctggccttaactgcccctcaataccaaagccaaccttgccttcacctggacagattctgaatggcaaagggcttcctgcaccgcccactctggaaaagaaacctgaagacaattccaataataggaaatttttaaataagagattatcagaaagagagtttgatcctgacatccactgtggggttattgatctcgacaccaagaagccctgcacccggtctttgacatgcaagacacattccttaacccagcgcagggctgtccagggtagaagaaaacgatttgatgtgttattagccgagcacaaaaacaaaaccagggaaaaggaattgattcgccatccggactctcagcaaccaccgcagcctctcagggacccgcatcccgcccctcctagaacgtcacaggagccgcaccaaaaccctcacggagtgattccttccgaatcaaagccttttgtagctagtaaacctaaacctcacacccccagtcttccaaggcctccaggctgccctgctcagcaaggtgggagtgcccccattgaccctcctccagtccatgaatctccacaccctcccctgcctgccactgagccagcttctcggttatccagtgaggagggcgaaggcgatgacaaagaagagtctgttgaaaaactggactgtcattattcaggtcatcatcctcagccagcatctttttgcacatttgggagccggcagataggaagaggctattacgtgtttgactccaggtggaatcgacttcgctgcgccctcaacctcatggtggagaagcatctgaatgcacagctatggaagaaaatcccaccagtgcccagtaccacctcacccatctccacacgtattcctcaccggacaaactctgtgccgacatcacaatgtggagtcagctatctggcagcagccaccgtctctacatccccagtcctgctctcatctacctgcatctccccaaatagcaaatcggtaccagctcatggaaccacactaaatgcacagcctgctgcttcaggggcgatggatcctgtgtgcagtatgcaatccagacaagtgtcctcttcatcctcatccccttccacgccctctggcctttcctcggttccttcctcccccatgtccaggaaacctcagaaattgaaatccagcaaatctttgaggcccaaggagtcttctggtaacagcactaactgtcaaaatgccagtagcagtaccagtggcggctcaggaaagaaacgcaaaaacagttccccactgttggttcactcttcctcctcctcttcctcctcctcctcttcttctcattccatggagtcttttaggaaaaactgtgtggctcactctgggcctccctacccctcaacggtaacatcttcccatagcatcggcctcaactgtgtgacgaataaagcaaatgcggtgaacgtccggcatgaccagtcagggaggggcccccccaccgggagccctgctgaatccatcaagaggatgagtgtgatggtgaacagcagtgattctactctttctcttgggccattcattcaccagtccaatgaactgcctgtcaactcccacggcagtttttcccactcacacactcctctagacaaactcataggaaagaaaagaaagtgctcacccagctcgagcagcatcaacaacagcagcagcaaacccacaaaggttgccaaagtgccagccgtgaacaatgtccacatgaaacacacaggcaccatcccaggggcacaaggactgatgaacagttccctccttcatcagccaaaggcacgtccctgacagctgaaaatagcacggggaggaataatgcggacacttttgaggacaagttacacctccactcagcactctggactccacgatgcctttgagtctgttttcccaacctcctgtgggcctcaagggtagaaacctgccgggctgttgttttaacgaggatttccctgaagctatgtctctagcagtgagtactcataaaggacactggatcaagttcagccaccgaattgcttttatcagtgttaaagtggtctgaactgcttgctaccaatctgtgagaagtttttgtttttgttttgttttttaacttgcagtatatcacagagccactcttcaagtagattggctgggcaaaagaatgttttggcaagagcgttactgtagacctttctccctccttccttttactaccatttttttttaacactgtcatctgtaggtcactctccagcagttaggcaccttaactggagaccagaaaccttccagagaacacagggctgcatcccgagcaaccctctgaagaagggaattaggctttagattttgatagcaatgttccaggaatgaaatatagatgttagcccaagacaccatgacaaaatagcccagccttttgagagtaatttgggaaaagaagctgtcagaagtttctaacttacaaactggtttgaaatttttgatgcccagacagcaagtataaatcattttggaggcttacttttcatgatacaaaagca

SEQ ID NO: 2609 - DNA, 6732 bp, Homo sapiens
  source 1..6732: mol_type = unassigned DNA
atgtcggagcgggccgcggatgacgtcaggggggagccgcgccgcgcggcggcggcggcgggcggagcagcggccgcggccgcccggcagcagcagcagcagcagcagcagcagcagccgccgcctccgcagccccagcggcagcagcacccgccaccgccgccacggcgcacacggccggaggacggcgggcccggcgccgcctccacctcggccgccgcaatggcgacggtcggggagcgcaggcctctgcccagtcctgaagtgatgctgggacagtcgtggaatctgtgggttgaggcttccaaacttcctgggaaggacgggacagaattggacgaaagtttcaaggagtttgggaaaaaccgcgaagtcatggggctctgtcgggaagacatgccaatatttggtttctgtccagcccatgatgatttctacttggtggtgtgtaacgactgtaatcaggttgtcaaaccgcaggcatttcaatcacattatgaaagaagacatagctcatccagcaagccgcctttggccgttcctcccacttcagtattttccttcttcccttctctgtccaaaagcaaaggaggcagtgcaagtggaagcaaccgttcttccagtggaggtgttcttagcgcatcctcatcaagttccaagttgttgaaatcacccaaagagaaactgcagctcagggggaacaccaggccaatgcatcccattcagcaaagtagagttccccatggtagaatcatgacaccctctgtgaaagtggaaaagattcatccgaaaatggatggcacactactgaaatctgcggtggggccaacctgtcctgctactgtgagttccttagtcaagcctggccttaactgcccctcaataccaaagccaaccttgccttcacctggacagattctgaatggcaaagggcttcctgcaccgcccactctggaaaagaaacctgaagacaattccaataataggaaatttttaaataagagattatcagaaagagagtttgatcctgacatccactgtggggttattgatctcgacaccaagaagccctgcacccggtctttgacatgcaagacacattccttaacccagcgcagggctgtccagggtagaagaaaacgatttgatgtgttattagccgagcacaaaaacaaaaccagggaaaaggaattgattcgccatccggactctcagcaaccaccgcagcctctcagggacccgcatcccgcccctcctagaacgtcacaggagccgcaccaaaaccctcacggagtgattccttccgaatcaaagccttttgtagctagtaaacctaaacctcacacccccagtcttccaaggcctccaggctgccctgctcagcaaggtgggagtgcccccattgaccctcctccagtccatgaatctccacaccctcccctgcctgccactgagccagcttctcggttatccagtgaggagggcgaaggcgatgacaaagaagagtctgttgaaaaactggactgtcattattcaggtcatcatcctcagccagcatctttttgcacatttgggagccggcagataggaagaggctattacgtgtttgactccaggtggaatcgacttcgctgcgccctcaacctcatggtggagaagcatctgaatgcacagctatggaagaaaatcccaccagtgcccagtaccacctcacccatctccacacgtattcctcaccggacaaactctgtgccgacatcacaatgtggagtcagctatctggcagcagccaccgtctctacatccccagtcctgctctcatctacctgcatctccccaaatagcaaatcggtaccagctcatggaaccacactaaatgcacagcctgctgcttcaggggcgatggatcctgtgtgcagtatgcaatccagacaagtgtcctcttcatcctcatccccttccacgccctctggcctttcctcggttccttcctcccccatgtccaggaaacctcagaaattgaaatccagcaaatctttgaggcccaaggagtcttctggtaacagcactaactgtcaaaatgccagtagcagtaccagtggcggctcaggaaagaaacgcaaaaacagttccccactgttggttcactcttcctcctcctcttcctcctcctcctcttcttctcattccatggagtcttttaggaaaaactgtgtggctcactctgggcctccctacccctcaacggtaacatcttcccatagcatcggcctcaactgtgtgacgaataaagcaaatgcggtgaacgtccggcatgaccagtcagggaggggcccccccaccgggagccctgctgaatccatcaagaggatgagtgtgatggtgaacagcagtgattctactctttctcttgggccattcattcaccagtccaatgaactgcctgtcaactcccacggcagtttttcccactcacacactcctctagacaaactcataggaaagaaaagaaagtgctcacccagctcgagcagcatcaacaacagcagcagcaaacccacaaaggttgccaaagtgccagccgtgaacaatgtccacatgaaacacacaggcaccatcccaggggcacaaggactgatgaacagttccctccttcatcaggatatctcctcaccttgcttacgaacaggaatttcagcaacatcaccccagagccctgacttaaaatccaaaggcacgtccctgacagctgaaaatagcacggggaggaataatgcggacacttttgaggacaagttacacctccactcagcactctggactccacgatgcctttgagtctgttttcccaacctcctgtgggcctcaagggtagaaacctgccgggctgttgttttaacgaggatttccctgaagctatgtctctagcagtgagtactcataaaggacactggatcaagttcagccaccgaattgcttttatcagtgttaaagtggtctgaactgcttgctaccaatctgtgagaagtttttgtttttgttttgttttttaacttgcagtatatcacagagccactcttcaagtagattggctgggcaaaagaatgttttggcaagagcgttactgtagacctttctccctccttccttttactaccatttttttttaacactgtcatctgtaggtcactctccagcagttaggcaccttaactggagaccagaaaccttccagagaacacagggctgcatcccgagcaaccctctgaagaagggaattaggctttagattttgatagcaatgttccaggaatgaaatatagatgttagcccaagacaccatgacaaaatagcccagccttttgagagtaatttgggaaaagaagctgtcagaagtttctaacttacaaactggtttgaaatttttgatgcccagacagcaagtataaatcattttggaggcttacttttcatgatacaaaagcaattctgtgtgatttttttttttaagaagaaagaaaatgcaagctagttttgagaaaggaaggccaaattgggtcgggggagggtgggagtgaggaagttaaaatcactatagggagaaaaaacttttttcaagatttccaaagagatgaaattttcttaatccttttaagttttcatagtaaacagtatggcagattgggttggttgtcctacctggtctatttttaaaagtcaccttttaaagtgacattattagatacacttaaatgtttccaaggcactctctacattacccttgtttttctctttggatactgtcctgggactaagtgtagatttctgcttcaagcacttctggcattgtgtgtttttgtatgcactccccttcatgccacttcagatgtttatttggatgtggttggggacgagagcagacaccaaggaaagggagttggagagaatgtaagtcctgacctgaaggtcttttgtgatgcatgtataggattgccctgacacacaccctcctttcttgggattataccagccatcttcctgagagttttggagccctctaggatattttttctagtaccccaccccccacccctaaagaaagaccttaatatgttaaaacagcattgcttggagaaggtgtcattgaattccgggacgagccggagcctttaaatgggtgcttccaccactacaggctcctgacacgagtaacaggcactgttgcttagaagaacacacgaagttgccgaacacagggtaaaatttccaaggcgctgatcgttgccctggccagggcctgatgagagccagtcagtacattctttttttcctacagttcttgggtttcaaacttcagtttcagggaatttcaagtcaacaacaggtagaatgaataaacttggttaccagcctaataatgtgaattgctacagaattattcttattatgtaagaaaacaaaaactttatgcagatactttagctataaattgatgtaaaatactgatttttttaaaggaaggagagaacagtatcttgttcaattattatgcaatcaatcagtaaatgtttttaaaatgatactacaggagagcttagtaaggagagggcatggatgggccagtttggcatagttgggagaaatcagtctggtttccatcccagtcggggaagagagaggtgagagggaatcagaacgtacctagttgattccttggtgacaagtgcaatggggtatgggtagaatttattttcagagccaagaggacttgatggttataaataaagttgcctttagcaatggaatttacagatcgatcatgttgttccgaaagatgtgaataggatccacaataacaagttgattcagactaatgtagatatttagattagcaagtattgaacatttgatttcttagactgaggttttaaatgaatttcattatttctcccggtaatacacagagcatcgggattaggaaattagccattttggattctgtctgccacaaacagacctattctaaacagtgctattaaattttagactgttgttcaaatattttattttctcctaaactactttttatggtgatgaataattaagaccatttaaaacacgggagtacaagtatttttttgaattaaattaacttgcaaaaaccaaatttgcagtggttgggttgtttctagacagactttggtatcaatttaaaaccaagataatttttatattctttccaatagaatttcatgacaactcctgcagttttcttaacctacaaaaaaaaaaaaaaagtgctgcaatgatgaacaaagaattatacaaaacctacttttgtatctttattttggaatttcttgttctattataaatatggaagtatccctatttcagaagacatattttgttaaaaatgaattgtacatatttaaatatgtatttttgcacaggtctttttttctgatatcctgttttggtacaattgagatcatctagtatttatttattaattaataaaagtaaatacctttttataatttgaagtggttcactgccaagccaatagttctagaacctgcctcctttacagttttaagggatgcctctgttctgtgaaaagtctttgtcccttttagtgtctcgggagtggattcatacagatgaagtgggcattgcttcttcctggttgcctggtttcccgatagactacatgtaactaagtgacacactgcttttcttttgttagtattttatgtgtgggagtatgtgactgcgtgtgtgtgtgcctgtgcgtgtgtgtgtatactcagcacatgtatgttactatgtgatgtggtttaaaactaatggaaaaaactgaaagtgcctgaaactagttttaagcttagacagaatctctttaaaaagacttgaatgttcagttgaacttttggagtttgctttttccacctaaatattgtttctaaaattttaggggcggagttgaaaaccaccaatgctggtaattttataaggtattttaaaattaagacctcttggttcatagtaattcaattggtgatggattgcctggtggcaccaagggttacagatctttttgtcagccagcaacttacacgatgtgtccgttttgttattcactcatgaaatacaatttaaaatatttaaaatattttgtattccaaaaatataatacaaagaagtacctctgagaacattgaaaaaaatgtataatttgaaaaatgtaacttataagggcagctgtcttcctgcaagagttctgttgccaaggaatttcttaatgtcgctcattctgtccagggggtttggggcgattgggctttgaaaaaatattcttaaaagtttgtttagcagaaaataatcacttttacattttgtgcaaaacattttacattttcagataatttaaatgagcactacatactgtcagtgtgaatgtagggccttgaaagcattttgcttttttttttttttttttttttttgagcttggttataaaagcaatctcctgtgttaaaaacgtgtgaatagtttgataatttgtacacataatcaagagcatctcagctggactttgtgttggctgctgtatagaacatgaacaaatgtcaagggatagaaaattactttggatatttaaaagagaagaaatatatagtctatttgttttgtaacaagtttctgtaaataaaataatttatactattt

SEQ ID NO: 2610 - DNA, 2792 bp, Homo sapiens
  source 1..2792: mol_type = unassigned DNA
atgtcggagcgggccgcggatgacgtcaggggggagccgcgccgcgcggcggcggcggcgggcggagcagcggccgcggccgcccggcagcagcagcagcagcagcagcagcagcagccgccgcctccgcagccccagcggcagcagcacccgccaccgccgccacggcgcacacggccggaggacggcgggcccggcgccgcctccacctcggccgccgcaatggcgacggtcggggagcgcaggcctctgcccagtcctgaagtgatgctgggacagtcgtggaatctgtgggttgaggcttccaaacttcctgggaaggacggggacagaattggacgaaagtttcaaggagtttggaaccgcgaagtcatggggctctgtcgggaagacatgccaatatttggtttctgtccagcccatgatgatttctacttggtggtgtgtaacgactgtaatcaggttgtcaaaccgcaggcatttcaatcacattatgaaagaagacatagctcatccagcaagccgcctttggccgttcctcccacttcagtattttccttcttcccttctctgtccaaaagcaaaggaggcagtgcaagtggaagcaaccgttcttccagtggaggtgttcttagcgcatcctcatcaagttccaagttgttgaaatcacccaaagagaaactgcagctcagggggaacaccaggccaatgcatcccattcagcaaagtagagttccccatggtagaatcatgacaccctctgtgaaagtggaaaagattcatccgaaaatggatggcacactactgaaatctgcggtggggccaacctgtcctgctactgtgagttccttagtcaagcctggccttaactgcccctcaataccaaagccaaccttgccttcacctggacagattctgaatggcaaagggcttcctgcaccgcccactctggaaaagaaacctgaagacaattccaataataggaaatttttaaataagagattatcagaaagagagtttgatcctgacatccactgtggggttattgatctcgacaccaagaagccctgcacccggtctttgacatgcaagacacattccttaacccagcgcagggctgtccagggtagaagaaaacgatttgatgtgttattagccgagcacaaaaacaaaaccagggaaaaggaattgattcgccatccggactctcagcaaccaccgcagcctctcagggacccgcatcccgcccctcctagaacgtcacaggagccgcaccaaaaccctcacggagtgattccttccgaatcaaagccttttgtagctagtaaacctaaacctcacacccccagtcttccaaggcctccaggctgccctgctcagcaaggtgggagtgcccccattgaccctcctccagtccatgaatctccacaccctcccctgcctgccactgagccagcttctcggttatccagtgaggagggcgaaggcgatgacaaagaagagtctgttgaaaaactggactgtcattattcaggtcatcatcctcagccagcatctttttgcacatttgggagccggcagataggaagaggctattacgtgtttgactccaggtggaatcgacttcgctgcgccctcaacctcatggtggagaagcatctgaatgcacagctatggaagaaaatcccaccagtgcccagtaccacctcacccatctccacacgtattcctcaccggacaaactctgtgccgacatcacaatgtggagtcagctatctggcagcagccaccgtctctacatccccagtcctgctctcatctacctgcatctccccaaatagcaaatcggtaccagctcatggaaccacactaaatgcacagcctgctgcttcaggggcgatggatcctgtgtgcagtatgcaatccagacaagtgtcctcttcatcctcatccccttccacgccctctggcctttcctcggttccttcctcccccatgtccaggaaacctcagaaattgaaatccagcaaatctttgaggcccaaggagtcttctggtaacagcactaactgtcaaaatgccagtagcagtaccagtggcggctcaggaaagaaacgcaaaaacagttccccactgttggttcactcttcctcctcctcttcctcctcctcctcttcttctcattccatggagtcttttaggaaaaactgtgtggctcactctgggcctccctacccctcaacggtaacatcttcccatagcatcggcctcaactgtgtgacgaataaagcaaatgcggtgaacgtccggcatgaccagtcagggaggggcccccccaccgggagccctgctgaatccatcaagaggatgagtgtgatggtgaacagcagtgattctactctttctcttgggccattcattcaccagtccaatgaactgcctgtcaactcccacggcagtttttcccactcacacactcctctagacaaactcataggaaagaaaagaaagtgctcacccagctcgagcagcatcaacaacagcagcagcaaacccacaaaggttgccaaagtgccagccgtgaacaatgtccacatgaaacacacaggcaccatcccaggggcacaaggactgatgaacagttccctccttcatcaggtaggaaatggactgtgagccccatgggaatgcccatttcttctcccttaagatcttttgtcagctcagaaatgtgtttggttgggttggttggttggtttgtaaacagatattcagcttcatggtgtcttctt

SEQ ID NO: 2611 - DNA, 2741 bp, Homo sapiens
  source 1..2741: mol_type = unassigned DNA
gttttctgttgatctgccaggacctttgtaattcaagtgctttttacagtagtagcaaatgttacataagcccaaacatggagcatatttggagttggtgggcagacccaaatcatgatgcaagcctgcagtagcaagtgtgcaatgaagcacaaccaaattctgtgaatggaaggtagcaagacgcctctccaaagcagcccttctgcgcaggagctgaaagctccactggaaagaagacatagctcatccagcaagccgcctttggccgttcctcccacttcagtattttccttcttcccttctctgtccaaaagcaaaggaggcagtgcaagtggaagcaaccgttcttccagtggaggtgttcttagcgcatcctcatcaagttccaagttgttgaaatcacccaaagagaaactgcagctcagggggaacaccaggccaatgcatcccattcagcaaagtagagttccccatggtagaatcatgacaccctctgtgaaagtggaaaagattcatccgaaaatggatggcacactactgaaatctgcggtggggccaacctgtcctgctactgtgagttccttagtcaagcctggccttaactgcccctcaataccaaagccaaccttgccttcacctggacagattctgaatggcaaagggcttcctgcaccgcccactctggaaaagaaacctgaagacaattccaataataggaaatttttaaataagagattatcagaaagagagtttgatcctgacatccactgtggggttattgatctcgacaccaagaagccctgcacccggtctttgacatgcaagacacattccttaacccagcgcagggctgtccagggtagaagaaaacgatttgatgtgttattagccgagcacaaaaacaaaaccagggaaaaggaattgattcgccatccggactctcagcaaccaccgcagcctctcagggacccgcatcccgcccctcctagaacgtcacaggagccgcaccaaaaccctcacggagtgattccttccgaatcaaagccttttgtagctagtaaacctaaacctcacacccccagtcttccaaggcctccaggctgccctgctcagcaaggtgggagtgcccccattgaccctcctccagtccatgaatctccacaccctcccctgcctgccactgagccagcttctcggttatccagtgaggagggcgaaggcgatgacaaagaagagtctgttgaaaaactggactgtcattattcaggtcatcatcctcagccagcatctttttgcacatttgggagccggcagataggaagaggctattacgtgtttgactccaggtggaatcgacttcgctgcgccctcaacctcatggtggagaagcatctgaatgcacagctatggaagaaaatcccaccagtgcccagtaccacctcacccatctccacacgtattcctcaccggacaaactctgtgccgacatcacaatgtggagtcagctatctggcagcagccaccgtctctacatccccagtcctgctctcatctacctgcatctccccaaatagcaaatcggtaccagctcatggaaccacactaaatgcacagcctgctgcttcaggggcgatggatcctgtgtgcagtatgcaatccagacaagtgtcctcttcatcctcatccccttccacgccctctggcctttcctcggttccttcctcccccatgtccaggaaacctcagaaattgaaatccagcaaatctttgaggcccaaggagtcttctggtaacagcactaactgtcaaaatgccagtagcagtaccagtggcggctcaggaaagaaacgcaaaaacagttccccactgttggttcactcttcctcctcctcttcctcctcctcctcttcttctcattccatggagtcttttaggaaaaactgtgtggctcactctgggcctccctacccctcaacggtaacatcttcccatagcatcggcctcaactgtgtgacgaataaagcaaatgcggtgaacgtccggcatgaccagtcagggaggggcccccccaccgggagccctgctgaatccatcaagaggatgagtgtgatggtgaacagcagtgattctactctttctcttgggccattcattcaccagtccaatgaactgcctgtcaactcccacggcagtttttcccactcacacactcctctagacaaactcataggaaagaaaagaaagtgctcacccagctcgagcagcatcaacaacagcagcagcaaacccacaaaggttgccaaagtgccagccgtgaacaatgtccacatgaaacacacaggcaccatcccaggggcacaaggactgatgaacagttccctccttcatcagccaaaggcacgtccctgacagctgaaaatagcacggggaggaataatgcggacacttttgaggacaagttacacctccactcagcactctggactccacgatgcctttgagtctgttttcccaacctcctgtgggcctcaagggtagaaacctgccgggctgttgttttaacgaggatttccctgaagctatgtctctagcagtgagtactcataaaggacactggatcaagttcagccaccgaattgcttttatcagtgttaaagtggtctgaactgcttgctaccaatctgtgagaagtttttgtttttgttttgttttttaacttgcagtatatcacagagcca

SEQ ID NO: 2612 - DNA, 3033 bp, Homo sapiens
  source 1..3033: mol_type = unassigned DNA
agtgcgcacgctccgactcggccgtggcggacctgactgaaggaggccgcggacctgactgaaggaggccacggccacttctggttggcctcggggcgcgctggctcggctcttcctccgccctcgaggcccccgcagtcccatcattcagttccgtagggtcaccggcgcggcagtggcctcgcagggcgctgggtccctctccccagctctcctccccctggccccgtcgccccgccctcgccgggctgggctgcggggtcaggggccgagcggagagggttatcatttaacatggaagaagatgagttcattggagaaaaaacattccaacgttattgtgcagaattcattaaacattcacaacagataggtgatagttgggaatggagaccatcaaaggactgttctgatggctacatgtgcaaaatacactttcaaattaagaatgggtctgtgatgtcacatctaggagcatctacccatggacagacatgtcttcccatggaggaggctttcgagctacccttggatgattgtgaagtgattgaaactgcagcagcgtccgaagtgattaaatatgagtatcatgtcttatattcctgtagctaccaagtgcctgtactttactttagggcaagctttttagatgggagacctttaactctgaaggacatatgggaaggagttcatgagtgctataagatgcgactgctacagggaccatgggacactattacgcaacaggaacatccaatacttgggcaacccttttttgtacttcatccctgcaagacgaatgaattcatgactcctgtattaaagaattctcagaaaatcaataagaatgtcaactatatcacatcatggctgagcattgtagggccagttgttgggctgaatctacctctgagttatgccaaagcaacgtctcaggatgaacgaaatgtcccttaacaagattcttctattgagtttaggaattgcggcacgaagaatgccaagagtttacctggccagccctggctttaataggactgataccatggaatatttcatctcaccaagatgtgacatggattatttttcccttggacacaaatgtctacagcaactggtgtttgataggctgaatgtttagaagaaacacttcaaagggatacatcatggccaggcatggtggctcacacctgtaatccaagcactttgggaggccaaggtgggagcatcacttgatcctgggagttcgagaccagcctgggcaacatggtgaaaccctgtcggtacaaaaaaatacaaaaatttgcctgtttatggtggtgtgttcctgtagtcccagctccccaggaggctgaggtgggaggttggctttaacccaggaggcagaggttgcagtgagctgagactgtgccactgcagtccagcctgggtgacagagccagacactgtctcggggaaaaaaaaaaaaaaaaaaagacacatcactataaatagcaaaaaaacaaatctaacttattaatactaggaataccaacattattagggcacttgcaggttattcttttctaggccaagtacttcacttccatttgtctgacatggagattgagggagaaatgtatttgtgtgttcattttaatgtaagatatataaaaattaaattactggatttacctgtccctgaaactggtgttataaacatgacctatcttaagtgattttcccacaatcaaactcaggaacaatagattatttctgttttactccaaaagagagagagagagtgagtgtgagtgtgtgtgtgtgtgtgtgtgtatgtgtgggtgtttgtgtagatagttgtaaaacaaagaaaaaacacaatattttactgtgagataatatgttttaccagcaaagtgtggcatagtaattagaagttttctaaaaagctataggagatatttaaacattaaaatttctttttgacctatagtaataaaacaatggtcattttacccctctgcttctcaaccccacagctgctctgctgtactctttgagggctcttgagcgagtcttcatgtccctgagacttattttcctcatctttaatttgaaactaacaagctacctcatagggttgctgtgagaaccacatgagatcattaatgcatgataagatattgtaaagtattatacgaatattcattaaatgctcacctttcttgtatataattggtattcactaaggctgtaaataagtttcatagccagttaagtattaagataaacctaacctggaacaattttttttttggttgcttgttttgttttttgctttcatttgctaggagctgaaacgaagattaaaatgtcattggctttttagagagtctagattagtgtgtctttgaatgagggatatacttaaaatcacctgaggatcgtttacagctacagatgctggggccacctgacacagtctctctgggggtgattctgctctggagaacctctggtctggatatacctttattgtgacattgatttgtattgttttgctctactgacaggccttttccaatccatacaagctgaacttgcttcctaatgtttgtctaggccttacatggatagtaaggaagcttaggagacatgtacacaaggcagcccacttgtaggaaactgcttcaggtgaggacatcattcaccagtggatcaccgagcaccgtgacagcaccctcagtccacgtctgcagattaagagctgaactctcacagagaaagtggaagtagagaaagggttaattcaaactgctagaaaagctaaaagtaaattttaaaatgctgagctgcccatattcatgctaggatgagagccggcttaaatgcttgctgggcattttggtatttaccacttagcatgttttcaacttctgtgagggattttccccccaatctccctaatgtaaacacagatttctcagcaagtcatttctcaagccatgtcatttctagtgtaaaataaattataataatgtgtcatctgaa

SEQ ID NO: 2613 - DNA, 1438 bp, Homo sapiens
  source 1..1438: mol_type = unassigned DNA
agtgcgcacgctccgactcggccgtggcggacctgactgaaggaggccgcggacctgactgaaggaggccacggccacttctggttggcctcggggcgcgctggctcggctcttcctccgccctcgaggcccccgcagtcccatcattcagttccgtagggtcaccggcgcggcagtggcctcgcagggcgctgggtccctctccccagctctcctccccctggccccgtcgccccgccctcgccgggctgggctgcggggtcaggggccgagcggagagggttatcatttaacatggaagaagatgagttcattggagaaaaaacattccaacgttattgtgcagaattcattaaacattcacaacagataggtgatagttgggaatggagaccatcaaaggactgttctgatggctacatgtgcaaaatacactttcaaattaagaatgggtctgtgatgtcacatctaggagcatctacccatggacagacatgtcttcccatggaggtgaagtcttgctctgtcacccaggctggagtgcagttgcgtgatctcagctcactgcaacctccgccttctgggttcaagcagttctcctgcctcagccttccgagtaactgggactacaggggttcaccactacacctggctaattttttgtatttttagtagagataaggtttcaccatgttggtcaggctggtcttgaactcctgacatcaagtaatccatccgcctcagcctcccaaagtgctgagattacaggcatgagccactgtgcctggccctgagcttaaaataaaagttaaattaaaaaaaaaataatgttgatgttttcatttttgcaatcaatagcttagttagactcaaattgcaaactgtcattgcctgtagtaggcagtggcatagaactcaattcagctcttttaacctgagttttaagctgctttcagattgccccacacatacatggttcaggagtcagccagagacttgggctgagtttaaacatagaatctggggttgtcctcttctggctgtcttctttcttgggcatctgcatcattctctagcacctatggtttttccaggctctttcccccagtttcctccagtcagaaagatggcaagagtttttgctgcctgccctcccccagtccttgtgccaacaccaccaccattgcagctgcctccagggaaaaactgcaaaaaccaaatcacttgctccaggtgttgactcctcttcaaaatctatttttgttaaatctccaaagcctcaaataggttttcttcctagaatttatatctgttatttgtagcaggattggtctgtaaggcactcagtcttctacatcatgggtcagcagattacagcccttgggttaaatccagccacctgcttgttttattaataaagttttgttggaactaaacc

SEQ ID NO: 2614 - DNA, 2418 bp, Homo sapiens
  source 1..2418: mol_type = unassigned DNA
agtgcgcacgctccgactcggccgtggcggacctgactgaaggaggccgcggacctgactgaaggaggccacggccacttctggttggcctcggggcgcgctggctcggctcttcctccgccctcgaggcccccgcagtcccatcattcagttccgtagggtcaccggcgcggcagtggcctcgcagggcgctgggtccctctccccagctctcctccccctggccccgtcgccccgccctcgccgggctgggctgcggggtcaggggccgagcggagagggtagagacggggtttcaccgtgttagccaagatggtctcgatctcctgacctcgtgatccgcccgcctcggcctcccaaagtgctgggattacaggcgtgagccactgcgcccggcctgttgtacagttattaaagttatcatttaacatggaagaagatgagttcattggagaaaaaacattccaacgttattgtgcagaattcattaaacattcacaacagataggtgatagttgggaatggagaccatcaaaggactgttctgatggctacatgtgcaaaatacactttcaaattaagaatgggtctgtgatgtcacatctaggagcatctacccatggacagacatgtcttcccatggaggaggctttcgagctacccttggatgattgtgaagtgattgaaactgcagcagcgtccgaagtgattaaatatgagtatcatgtcttatattcctgtagctaccaagtgcctgtactttactttagggcaagctttttagatgggagacctttaactctgaaggacatatgggaaggagttcatgagtgctataagatgcgactgctacagggaccatgggacactattacgcaacaggaacatccaatacttgggcaacccttttttgtacttcatccctgcaagacgaatgaattcatgactcctgtattaaagaattctcagaaaatcaataagaatgtcaactatatcacatcatggctgagcattgtagggccagttgttgggctgaatctacctctgagttatgccaaagcaacgtctcaggatgaacgaaatgtcccttaacaagattcttctattgagtttaggaattgcggcacgaagaatgccaagagtttacctggccagccctggctttaataggactgataccatggaatatttcatctcaccaagatgtgacatggattatttttcccttggacacaaatgtctacagcaactggtgtttgataggctgaatgtttagaagaaacacttcaaagggatacatcatggccaggcatggtggctcacacctgtaatccaagcactttgggaggccaaggtgggagcatcacttgatcctgggagttcgagaccagcctgggcaacatggtgaaaccctgtcggtacaaaaaaatacaaaaatttgcctgtttatggtggtgtgttcctgtagtcccagctccccaggaggctgaggtgggaggttggctttaacccaggaggcagaggttgcagtgagctgagactgtgccactgcagtccagcctgggtgacagagccagacactgtctcggggaaaaaaaaaaaaaaaaaaagacacatcactataaatagcaaaaaaacaaatctaacttattaatactaggaataccaacattattagggcacttgcaggttattcttttctaggccaagtacttcacttccatttgtctgacatggagattgagggagaaatgtatttgtgtgttcattttaatgtaagatatataaaaattaaattactggatttacctgtccctgaaactggtgttataaacatgacctatcttaagtgattttcccacaatcaaactcaggaacaatagattatttctgttttactccaaaagagagagagagagtgagtgtgagtgtgtgtgtgtgtgtgtgtgtatgtgtgggtgtttgtgtagatagttgtaaaacaaagaaaaaacacaatattttactgtgagataatatgttttaccagcaaagtgtggcatagtaattagaagttttctaaaaagctataggagatatttaaacattaaaatttctttttgacctatagtaataaaacaatggtcattttacccctctgcttctcaaccccacagctgctctgctgtactctttgagggctcttgagcgagtcttcatgtccctgagacttattttcctcatctttaatttgaaactaacaagctacctcatagggttgctgtgagaaccacatgagatcattaatgcatgataagatattgtaaagtattatacgaatattcattaaatgctcacctttcttgtatataattggtattcactaaggctgtaaataagtttcatagccagttaagtattaagataaacctaacctgg

SEQ ID NO: 2615 - DNA, 2366 bp, Homo sapiens
  source 1..2366: mol_type = unassigned DNA
agccatcagcagagcagccactaagcgactctcgcagcctgctggaggccttctggattctatcactaatatctttgggagacgctctgtctcttccttcccagtcccccaggacaatgtggatactcatcctggttctggtaaagaagtgagggtaccagctactgccttgtgtgtcttcgatgcacatgatggggaagtcaacgctgtgcagttcagtccaggttcccggttactggccactggaggcatggaccgcagggttaagctttgggaagtatttggagaaaaatgtgagttcaagggttccctatctggcagtaatgcaggaattacaagcattgaatttgatagtgctggatcttacctcttagcagcttcaaatgattttgcaagccgaatctggactgtggatgattatcgattacggcacacactcacgggacacagtgggaaagtgctgtctgctaagttcctgctggacaatgcgcggattgtctcaggaagtcacgaccggactctcaaactctgggatctacgcagcaaagtctgcataaagacagtgtttgcaggatccagttgcaatgatattgtctgcacagagcaatgtgtaatgagtggacattttgacaagaaaattcgtttctgggacattcgatcagagagcatagttcgagagatggagctgttgggaaagattactgccctggacttaaacccagaaaggactgagctcctgagctgctcccgtgatgacttgctaaaagttattgatctccgaacaaatgctatcaagcagacattcagtgcacctgggttcaagtgcggctctgactggaccagagttgtcttcagccctgatggcagttacgtggcggcaggctctgctgagggctctctgtatatctggagtgtgctcacagggaaagtggaaaaggttctttcaagcagcacagctcatccatcaatgcggtggcgtggtcgccctctggctcgcacgttgtcagtgtggacaaaggatgcaaagctgtgctgtgggcacagtactgacggggctctcagggctgggaggaccccagtgccctcctcagaagaagcacatgggctcctgcagccctgtcctggcaggtgatgtgctgggtatagcatggacctcccagagaagctcaagctatgtggcactgtagctttgccgtgaatgggatttctgaagatttgactgaggtctctcttggcctggaagaataacactgaaaaaacctgacgctgcggtcacttagcagaggctcaggttcttgccttgggaaacactactagctctgaccttccatacctcacttgggggagcacagggccccgctgggcctcctcaccaacggcagtgccaaaatcagcccccacatcaaggtggtgttctctgtgctttctctcgtccttccaaagtcggttctggcctaacgcatgtcccaacaccttgggttcatttgcccggtgaactcactttaagcattggattaacggaaactcccgaactacagacccctccctggtgggttgcatgaatgtgtctcattactgctgaaatgtcctcacatctctttcactgttcttcagagctttctggctctctttcccccacaaaattcgacatatttaaaaatctccgtgtggctttaaaaaatggttttttgtttttttgtttttttgaggtgggagaggatgtgtgaaaatcttttccagggaaatgggttcgctgcagaggtaaggatgtgttcctgtatcgatctgcagacacccagaaggtgggtgcacactgcatgcttgggggtgccaagggattcgagacctccaacatacttgtctgaaggtggtgattctggccatggcccctctgccaagcctgtgtgcgatgcccttggtgctttagtgcaagaagcctaggctcagaagcacagcagcgccatctttccgtttcaggggttgtgatgaaggccaaggaaaaacatttatctttactattttacctacgtataaagttttagttcattgggtgtgcgaaacaccctttttatcacttttaaatttgcactttattttttttcttccatgcttgttctctggacatttggggatgtgagtgttagagctggtgagagaggagtcaggtggccttcccaccgatggtcctggcctccacctgccctctcttccctgcctgatcaccgctttccaatttgcccttcagagaacttaagtcaaggagagttgaaattcacaggccagggcacatcttttatttatttcattatgttggccaacagaacttgattgtaaataataataaagaaatctgttatatacttttc

SEQ ID NO: 2616 - DNA, 2915 bp, Homo sapiens
  source 1..2915: mol_type = unassigned DNA
actagcgagcgccctgcgtaggcaccggctcctgagcccgtgcttcgggtgagggggcgggtcttccggccctctcgaaaatcatttccggcatgagccggaagaccgtcccggatggcctcggggactgccagtgtgtggaggtgagctccgggattgccggcattcccgcttctgctggttgcttcatgctgcaggctgcggccgtcagccctcgctcgcattggtggcgctgaggtgccggggcagcaagtgacatgtcgtcgggcctccgcgccgctgacttcccccgctggaagcgccacatctcggagcaactgaggcgccgggaccggctgcagagacaggcgttcgaggagatcatcctgcagtataacaaattgctggaaaagtcagatcttcattcagtgttggcccagaaactacaggctgaaaagcatgacgtaccaaacaggcacgagataaggaggcggcaagcccggctgcagaaagagcttgcagaagcagcaaaggaacctctaccagtcgaacaggatgatgacattgaggtcattgtggatgaaacttctgatcacacagaagagacctctcctgtgcgagccatcagcagagcagccacgagacgctctgtctcttccttcccagtcccccaggacaatgtggatactcatcctggttctggtaaagaagtgagggtaccagctactgccttgtgtgtcttcgatgcacatgatggggaagtcaacgctgtgcagttcagtccaggttcccggttactggccactggaggcatggaccgcagggttaagctttgggaagtatttggagaaaaatgtgagttcaagggttccctatctggcagtaatgcaggaattacaagcattgaatttgatagtgctggatcttacctcttagcagcttcaaatgattttgcaagccgaatctggactgtggatgattatcgattacggcacacactcacgggacacagtgggaaagtgctgtctgctaagttcctgctggacaatgcgcggattgtctcaggaagtcacgaccggactctcaaactctgggatctacgcagcaaagtctgcataaagacagtgtttgcaggatccagttgcaatgatattgtctgcacagagcaatgtgtaatgagtggacattttgacaagaaaattcgtttctgggacattcgatcagagagcatagttcgagagatggagctgttgggaaagattactgccctggacttaaacccagaaaggactgagctcctgagctgctcccgtgatgacttgctaaaagttattgatctccgaacaaatgctatcaagcagacattcagtgcacctgggttcaagtgcggctctgactggaccagagttgtcttcagccctgatggcagttacgtggcggcaggctctgctgagggctctctgtatatctggagtgtgctcacagggaaagtggaaaaggttctttcaaagcagcacagctcatccatcaatgcggtggcgtggtcgccctctggctcgcacgttgtcagtgtggacaaaggatgcaaagctgtgctgtgggcacagtactgacggggctctcagggctgggaggaccccagtgccctcctcagaagaagcacatgggctcctgcagccctgtcctggcaggtgatgtgctgggtatagcatggacctcccagagaagctcaagctatgtggcactgtagctttgccgtgaatgggatttctgaagatttgactgaggtctctcttggcctggaagaataacactgaaaaaacctgacgctgcggtcacttagcagaggctcaggttcttgccttgggaaacactactagctctgaccttccatacctcacttgggggagcacagggccccgctgggcctcctcaccaacggcagtgccaaaatcagcccccacatcaaggtggtgttctctgtgctttctctcgtccttccaaagtcggttctggcctaacgcatgtcccaacaccttgggttcatttgcccggtgaactcactttaagcattggattaacggaaactcccgaactacagacccctccctggtgggttgcatgaatgtgtctcattactgctgaaatgtcctcacatctctttcactgttcttcagagctttctggctctctttcccccacaaaattcgacatatttaaaaatctccgtgtggctttaaaaaatggttttttgtttttttgtttttttgaggtgggagaggatgtgtgaaaatcttttccagggaaatgggttcgctgcagaggtaaggatgtgttcctgtatcgatctgcagacacccagaaggtgggtgcacactgcatgcttgggggtgccaagggattcgagacctccaacatacttgtctgaaggtggtgattctggccatggcccctctgccaagcctgtgtgcgatgcccttggtgctttagtgcaagaagcctaggctcagaagcacagcagcgccatctttccgtttcaggggttgtgatgaaggccaaggaaaaacatttatctttactattttacctacgtataaagttttagttcattgggtgtgcgaaacaccctttttatcacttttaaatttgcactttattttttttcttccatgcttgttctctggacatttggggatgtgagtgttagagctggtgagagaggagtcaggtggccttcccaccgatggtcctggcctccacctgccctctcttccctgcctgatcaccgctttccaatttgcccttcagagaacttaagtcaaggagagttgaaattcacaggccagggcacatcttttatttatttcattatgttggccaacagaacttgattgtaaataataataaagaaatctgttatatacttttcaaactcc

SEQ ID NO: 2617 - DNA, 2767 bp, Homo sapiens
  source 1..2767: mol_type = unassigned DNA
aagaccgtcccggatggcctcggggactgccagtgtgtggaggtgagctccgggattgccggcattcccgcttctgctggttgcttcatgctgcaggctgcggccgtcagccctcgctcgcattggtggcgctgaggtgccggggcagcaagtgacatgtcgtcgggcctccgcgccgctgacttcccccgctggaagcgccacatctcggagcaactgaggcgccgggaccggctgcagagacaggcgttcgaggagatcatcctgcagtataacaaattgctggaaaagtcagatcttcattcagtgttggcccagaaactacaggctgaaaagcatgacgtaccaaacaggcacgagataaggaggcggcaagcccggctgcagaaagagcttgcagaagcagcaaaggaacctctaccagtcgaacaggatgatgacattgaggtcattgtggatgaaacttctgatcacacagaagagacctctcctgtgcgagccatcagcagagcagccactaagcgactctcgcagcctgctggaggccttctggattctatcactaatatctttgggagacgctctgtctcttccttcccagtcccccaggacaatgtggatactcatcctggttctggtaaagaagtgagggtaccagctactgccttgtgtgtcttcgatgcacatgatggggaagtcaacgctgtgcagttcagtccaggaattacaagcattgaatttgatagtgctggatcttacctcttagcagcttcaaatgattttgcaagccgaatctggactgtggatgattatcgattacggcacacactcacgggacacagtgggaaagtgctgtctgctaagttcctgctggacaatgcgcggattgtctcaggaagtcacgaccggactctcaaactctgggatctacgcagcaaagtctgcataaagacagtgtttgcaggatccagttgcaatgatattgtctgcacagagcaatgtgtaatgagtggacattttgacaagaaaattcgtttctgggacattcgatcagagagcatagttcgagagatggagctgttgggaaagattactgccctggacttaaacccagaaaggactgagctcctgagctgctcccgtgatgacttgctaaaagttattgatctccgaacaaatgctatcaagcagacattcagtgcacctgggttcaagtgcggctctgactggaccagagttgtcttcagccctgatggcagttacgtggcggcaggctctgctgagggctctctgtatatctggagtgtgctcacagggaaagtggaaaaggttctttcaaagcagcacagctcatccatcaatgcggtggcgtggtcgccctctggctcgcacgttgtcagtgtggacaaaggatgcaaagctgtgctgtgggcacagtactgacggggctctcagggctgggaggaccccagtgccctcctcagaagaagcacatgggctcctgcagccctgtcctggcaggtgatgtgctgggtatagcatggacctcccagagaagctcaagctatgtggcactgtagctttgccgtgaatgggatttctgaagatttgactgaggtctctcttggcctggaagaataacactgaaaaaacctgacgctgcggtcacttagcagaggctcaggttcttgccttgggaaacactactagctctgaccttccatacctcacttgggggagcacagggccccgctgggcctcctcaccaacggcagtgccaaaatcagcccccacatcaaggtggtgttctctgtgctttctctcgtccttccaaagtcggttctggcctaacgcatgtcccaacaccttgggttcatttgcccggtgaactcactttaagcattggattaacggaaactcccgaactacagacccctccctggtgggttgcatgaatgtgtctcattactgctgaaatgtcctcacatctctttcactgttcttcagagctttctggctctctttcccccacaaaattcgacatatttaaaaatctccgtgtggctttaaaaaatggttttttgtttttttgtttttttgaggtgggagaggatgtgtgaaaatcttttccagggaaatgggttcgctgcagaggtaaggatgtgttcctgtatcgatctgcagacacccagaaggtgggtgcacactgcatgcttgggggtgccaagggattcgagacctccaacatacttgtctgaaggtggtgattctggccatggcccctctgccaagcctgtgtgcgatgcccttggtgctttagtgcaagaagcctaggctcagaagcacagcagcgccatctttccgtttcaggggttgtgatgaaggccaaggaaaaacatttatctttactattttacctacgtataaagttttagttcattgggtgtgcgaaacaccctttttatcacttttaaatttgcactttattttttttcttccatgcttgttctctggacatttggggatgtgagtgttagagctggtgagagaggagtcaggtggccttcccaccgatggtcctggcctccacctgccctctcttccctgcctgatcaccgctttccaatttgcccttcagagaacttaagtcaaggagagttgaaattcacaggccagggcacatcttttatttatttcattatgttggccaacagaacttgattgtaaataataataaagaaatctgttatatacttttcaaactcca

SEQ ID NO: 2618 - DNA, 3405 bp, Homo sapiens
  source 1..3405: mol_type = unassigned DNA
actagcgagcgccctgcgtaggcaccggctcctgagcccgtgcttcgggtgagggggcgggtcttccggccctctcgaaaatcatttccggcatgagccggaagaccgtcccggatggcctcggggactgccagtgtgtggaggtgagctccgggattgccggcattcccgcttctgctggttgcttcatgctgcaggctgcggccgtcagccctcgctcgcattggtggcgctgaggtgccggggcagcaagtgacatgtcgtcgggcctccgcgccgctgacttcccccgctggaagcgccacatctcggagcaactgaggcgccgggaccggctgcagagacaggcgttcgaggagatcatcctgcagtataacaaattgctggaaaagtcagatcttcattcagtgttggcccagaaactacaggctgaaaagcatgacgtaccaaacaggcacgagataagtcccggacatgatggcacatggaatgacaatcagctacaagaaatggcccaactgaggattaagcaccaagaggaactgactgaattacacaagaaacgtggggagttagctcaactggtgattgacctgaataaccaaatgcagcggaaggacagggagatgcagatgaatgaagcaaaaattgcagaatgtttgcagactatctctgacctggagacggagtgcctagacctgcgcactaagctttgtgaccttgaaagagccaaccagaccctgaaggatgaatatgatgccctgcagatcacttttactgccttggagggaaaactgaggaaaactacggaagagaaccaggagctggtcaccagatggatggctgagaaagcccaggaagccaatcggcttaatgcagagaatgaaaaagactccaggaggcggcaagcccggctgcagaaagagcttgcagaagcagcaaaggaacctctaccagtcgaacaggatgatgacattgaggtcattgtggatgaaacttctgatcacacagaagagacctctcctgtgcgagccatcagcagagcagccactaagcgactctcgcagcctgctggaggccttctggattctatcactaatatctttgggagacgctctgtctcttccttcccagtcccccaggacaatgtggatactcatcctggttctggtaaagaagtgagggtaccagctactgccttgtgtgtcttcgatgcacatgatggggaagtcaacgctgtgcagttcagtccaggttcccggttactggccactggaggcatggaccgcagggttaagctttgggaagtatttggagaaaaatgtgagttcaagggttccctatctggcagtaatgcaggaattacaagcattgaatttgatagtgctggatcttacctcttagcagcttcaaatgattttgcaagccgaatctggactgtggatgattatcgattacggcacacactcacgggacacagtgggaaagtgctgtctgctaagttcctgctggacaatgcgcggattgtctcaggaagtcacgaccggactctcaaactctgggatctacgcagcaaagtctgcataaagacagtgtttgcaggatccagttgcaatgatattgtctgcacagagcaatgtgtaatgagtggacattttgacaagaaaattcgtttctgggacattcgatcagagagcatagttcgagagatggagctgttgggaaagattactgccctggacttaaacccagaaaggactgagctcctgagctgctcccgtgatgacttgctaaaagttattgatctccgaacaaatgctatcaagcagacattcagtgcacctgggttcaagtgcggctctgactggaccagagttgtcttcagccctgatggcagttacgtggcggcaggctctgctgagggctctctgtatatctggagtgtgctcacagggaaagtggaaaaggttctttcaaagcagcacagctcatccatcaatgcggtggcgtggtcgccctctggctcgcacgttgtcagtgtggacaaaggatgcaaagctgtgctgtgggcacagtactgacggggctctcagggctgggaggaccccagtgccctcctcagaagaagcacatgggctcctgcagccctgtcctggcaggtgatgtgctgggtatagcatggacctcccagagaagctcaagctatgtggcactgtagctttgccgtgaatgggatttctgaagatttgactgaggtctctcttggcctggaagaataacactgaaaaaacctgacgctgcggtcacttagcagaggctcaggttcttgccttgggaaacactactagctctgaccttccatacctcacttgggggagcacagggccccgctgggcctcctcaccaacggcagtgccaaaatcagcccccacatcaaggtggtgttctctgtgctttctctcgtccttccaaagtcggttctggcctaacgcatgtcccaacaccttgggttcatttgcccggtgaactcactttaagcattggattaacggaaactcccgaactacagacccctccctggtgggttgcatgaatgtgtctcattactgctgaaatgtcctcacatctctttcactgttcttcagagctttctggctctctttcccccacaaaattcgacatatttaaaaatctccgtgtggctttaaaaaatggttttttgtttttttgtttttttgaggtgggagaggatgtgtgaaaatcttttccagggaaatgggttcgctgcagaggtaaggatgtgttcctgtatcgatctgcagacacccagaaggtgggtgcacactgcatgcttgggggtgccaagggattcgagacctccaacatacttgtctgaaggtggtgattctggccatggcccctctgccaagcctgtgtgcgatgcccttggtgctttagtgcaagaagcctaggctcagaagcacagcagcgccatctttccgtttcaggggttgtgatgaaggccaaggaaaaacatttatctttactattttacctacgtataaagttttagttcattgggtgtgcgaaacaccctttttatcacttttaaatttgcactttattttttttcttccatgcttgttctctggacatttggggatgtgagtgttagagctggtgagagaggagtcaggtggccttcccaccgatggtcctggcctccacctgccctctcttccctgcctgatcaccgctttccaatttgcccttcagagaacttaagtcaaggagagttgaaattcacaggccagggcacatcttttatttatttcattatgttggccaacagaacttgattgtaaataataataaagaaatctgttatatacttttcaaactcca

SEQ ID NO: 2619 - DNA, 3313 bp, Homo sapiens
  source 1..3313: mol_type = unassigned DNA
gtgagctccgggattgccggcattcccgcttctgctggttgcttcatgctgcaggctgcggccgtcagccctcgctcgcattggtggcgctgaggtgccggggcagcaagtgacatgtcgtcgggcctccgcgccgctgacttcccccgctggaagcgccacatctcggagcaactgaggcgccgggaccggctgcagagacaggcgttcgaggagatcatcctgcagtataacaaattgctggaaaagtcagatcttcattcagtgttggcccagaaactacaggctgaaaagcatgacgtaccaaacaggcacgagataagtcccggacatgatggcacatggaatgacaatcagctacaagaaatggcccaactgaggattaagcaccaagaggaactgactgaattacacaagaaacgtggggagttagctcaactggtgattgacctgaataaccaaatgcagcggaaggacagggagatgcagatgaatgaagcaaaaattgcagaatgtttgcagactatctctgacctggagacggagtgcctagacctgcgcactaagctttgtgaccttgaaagagccaaccagaccctgaaggatgaatatgatgccctgcagatcacttttactgccttggagggaaaactgaggaaaactacggaagagaaccaggagctggtcaccagatggatggctgagaaagcccaggaagccaatcggcttaatgcagagaatgaaaaagactccaggaggcggcaagcccggctgcagaaagagcttgcagaagcagcaaaggaacctctaccagtcgaacaggatgatgacattgaggtcattgtggatgaaacttctgatcacacagaagagacctctcctgtgcgagccatcagcagagcagccactaagcgactctcgcagcctgctggaggccttctggattctatcactaatatctttggtctgtccgagtctccccttttgggacatcattcttcttctgatgctgccaggagacgctctgtctcttccttcccagtcccccaggacaatgtggatactcatcctggttctggtaaagaagtgagggtaccagctactgccttgtgtgtcttcgatgcacatgatggggaagtcaacgctgtgcagttcagtccaggttcccggttactggccactggaggcatggaccgcagggttaagctttgggaagtatttggagaaaaatgtgagttcaagggttccctatctggcagtaatgcaggaattacaagcattgaatttgatagtgctggatcttacctcttagcagcttcaaatgattttgcaagccgaatctggactgtggatgattatcgattacggcacacactcacgggacacagtgggaaagtgctgtctgctaagttcctgctggacaatgcgcggattgtctcaggaagtcacgaccggactctcaaactctgggatctacgcagcaaagtctgcataaagacagtgtttgcaggatccagttgcaatgatattgtctgcacagagcaatgtgtaatgagtggacattttgacaagaaaattcgtttctgggacattcgatcagagagcatagttcgagagatggagctgttgggaaagattactgccctggacttaaacccagaaaggactgagctcctgagctgctcccgtgatgacttgctaaaagttattgatctccgaacaaatgctatcaagcagacattcagtgcacctgggttcaagtgcggctctgactggaccagagttgtcttcagccctgatggcagttacgtggcggcaggctctgctgagggctctctgtatatctggagtgtgctcacagggaaagtggaaaaggttctttcaaagcagcacagctcatccatcaatgcggtggcgtggtcgccctctggctcgcacgttgtcagtgtggacaaaggatgcaaagctgtgctgtgggcacagtactgacggggctctcagggctgggaggaccccagtgccctcctcagaagaagcacatgggctcctgcagccctgtcctggcaggtgatgtgctgggtatagcatggacctcccagagaagctcaagctatgtggcactgtagctttgccgtgaatgggatttctgaagatttgactgaggtctctcttggcctggaagaataacactgaaaaaacctgacgctgcggtcacttagcagaggctcaggttcttgccttgggaaacactactagctctgaccttccatacctcacttgggggagcacagggccccgctgggcctcctcaccaacggcagtgccaaaatcagcccccacatcaaggtggtgttctctgtgctttctctcgtccttccaaagtcggttctggcctaacgcatgtcccaacaccttgggttcatttgcccggtgaactcactttaagcattggattaacggaaactcccgaactacagacccctccctggtgggttgcatgaatgtgtctcattactgctgaaatgtcctcacatctctttcactgttcttcagagctttctggctctctttcccccacaaaattcgacatatttaaaaatctccgtgtggctttaaaaaatggttttttgtttttttgtttttttgaggtgggagaggatgtgtgaaaatcttttccagggaaatgggttcgctgcagaggtaaggatgtgttcctgtatcgatctgcagacacccagaaggtgggtgcacactgcatgcttgggggtgccaagggattcgagacctccaacatacttgtctgaaggtggtgattctggccatggcccctctgccaagcctgtgtgcgatgcccttggtgctttagtgcaagaagcctaggctcagaagcacagcagcgccatctttccgtttcaggggttgtgatgaaggccaaggaaaaacatttatctttactattttacctacgtataaagttttagttcattgggtgtgcgaaacaccctttttatcacttttaaatttgcactttattttttttcttccatgcttgttctctggacatttggggatgtgagtgttagagctggtgagagaggagtcaggtggccttcccaccgatggtcctggcctccacctgccctctcttccctgcctgatcaccgctttccaatttgcccttcagagaacttaagtcaaggagagttgaaattcacaggccagggcacatcttttatttatttcattatgttggccaacagaacttgattgtaaataataataaagaaatctgttatatacttttcaaactcca

SEQ ID NO: 2620 - DNA, 3213 bp, Homo sapiens
  source 1..3213: mol_type = unassigned DNA
gtgtggaggtgagctccgggattgccggcattcccgcttctgctggttgcttcatgctgcaggctgcggccgtcagccctcgctcgcattggtggcgctgaggtgccggggcagcaagtgacatgtcgtcgggcctccgcgccgctgacttcccccgctggaagcgccacatctcggagcaactgaggcgccgggaccggctgcagagacaggcgttcgaggagatcatcctgcagtataacaaattgctggaaaagtcagatcttcattcagtgttggcccagaaactacaggctgaaaagcatgacgtaccaaacaggcacgagataagtcccggacatgatggcacatggaatgacaatcagctacaagaaatggcccaactgaggattaagcaccaagaggaactgactgaattacacaagaaacgtggggagttagctcaactggtgattgacctgaataaccaaatgcagcggaaggacagggagatgcagatgaatgaagcaaaaattgcagaatgtttgcagactatctctgacctggagacggagtgcctagacctgcgcactaagctttgtgaccttgaaagagccaaccagaccctgaaggatgaatatgatgccctgcagatcacttttactgccttggagggaaaactgaggaaaactacggaagagaaccaggagctggtcaccagatggatggctgagaaagcccaggaagccaatcggcttaatgcagagaatgaaaaagactccaggaggcggcaagcccggctgcagaaagagcttgcagaagcagcaaaggaacctctaccagtcgaacaggatgatgacattgaggtcattgtggatgaaacttctgatcacacagaagagacctctcctgtgcgagccatcagcagagcagccacgagacgctctgtctcttccttcccagtcccccaggacaatgtggatactcatcctggttctggtaaagaagtgagggtaccagctactgccttgtgtgtcttcgatgcacatgatggggaagtcaacgctgtgcagttcagtccaggttcccggttactggccactggaggcatggaccgcagggttaagctttgggaagtatttggagaaaaatgtgagttcaagggttccctatctggcagtaatgcaggaattacaagcattgaatttgatagtgctggatcttacctcttagcagcttcaaatgattttgcaagccgaatctggactgtggatgattatcgattacggcacacactcacgggacacagtgggaaagtgctgtctgctaagttcctgctggacaatgcgcggattgtctcaggaagtcacgaccggactctcaaactctgggatctacgcagcaaagtctgcataaagacagtgtttgcaggatccagttgcaatgatattgtctgcacagagcaatgtgtaatgagtggacattttgacaagaaaattcgtttctgggacattcgatcagagagcatagttcgagagatggagctgttgggaaagattactgccctggacttaaacccagaaaggactgagctcctgagctgctcccgtgatgacttgctaaaagttattgatctccgaacaaatgctatcaagcagacattcagtgcacctgggttcaagtgcggctctgactggaccagagttgtcttcagccctgatggcagttacgtggcggcaggctctgctgagggctctctgtatatctggagtgtgctcacagggaaagtggaaaaggttctttcaaagcagcacagctcatccatcaatgcggtggcgtggtcgccctctggctcgcacgttgtcagtgtggacaaaggatgcaaagctgtgctgtgggcacagtactgacggggctctcagggctgggaggaccccagtgccctcctcagaagaagcacatgggctcctgcagccctgtcctggcaggtgatgtgctgggtatagcatggacctcccagagaagctcaagctatgtggcactgtagctttgccgtgaatgggatttctgaagatttgactgaggtctctcttggcctggaagaataacactgaaaaaacctgacgctgcggtcacttagcagaggctcaggttcttgccttgggaaacactactagctctgaccttccatacctcacttgggggagcacagggccccgctgggcctcctcaccaacggcagtgccaaaatcagcccccacatcaaggtggtgttctctgtgctttctctcgtccttccaaagtcggttctggcctaacgcatgtcccaacaccttgggttcatttgcccggtgaactcactttaagcattggattaacggaaactcccgaactacagacccctccctggtgggttgcatgaatgtgtctcattactgctgaaatgtcctcacatctctttcactgttcttcagagctttctggctctctttcccccacaaaattcgacatatttaaaaatctccgtgtggctttaaaaaatggttttttgtttttttgtttttttgaggtgggagaggatgtgtgaaaatcttttccagggaaatgggttcgctgcagaggtaaggatgtgttcctgtatcgatctgcagacacccagaaggtgggtgcacactgcatgcttgggggtgccaagggattcgagacctccaacatacttgtctgaaggtggtgattctggccatggcccctctgccaagcctgtgtgcgatgcccttggtgctttagtgcaagaagcctaggctcagaagcacagcagcgccatctttccgtttcaggggttgtgatgaaggccaaggaaaaacatttatctttactattttacctacgtataaagttttagttcattgggtgtgcgaaacaccctttttatcacttttaaatttgcactttattttttttcttccatgcttgttctctggacatttggggatgtgagtgttagagctggtgagagaggagtcaggtggccttcccaccgatggtcctggcctccacctgccctctcttccctgcctgatcaccgctttccaatttgcccttcagagaacttaagtcaaggagagttgaaattcacaggccagggcacatcttttatttatttcattatgttggccaacagaacttgattgtaaataataataaagaaatctgttatatacttttcaaactcca

SEQ ID NO: 2621 - DNA, 3130 bp, Homo sapiens
  source 1..3130: mol_type = unassigned DNA
gtgcttattggccagcctggctgcgggtgacagtgagtggcagacacccggcctagcgccgcgggtcgcgccgagccgagccgagccgagcggagccggcggagcctctggaatcacccgggtcgctgttcctgagcagctgcagagcatcgagggctggagaggagcacatactgtccatggagctggtggtcaaggtggacagggggcggtggtgatggcgcagtttgacactgaataccagcgcctagaggcctcctatagtgattcacccccaggggaggaggacctgttggtgcacgtcgccgaggggagcaagtcaccttggcaccatattgaaaaccttgacctcttcttctctcgagtttataatctgcaccagaagaatggcttcacatgtatgctcatcggggagatctttgagctcatgcagttcctctttgtggttgccttcactaccttcctggtcagctgcgtggactatgacatcctatttgccaacaagatggtgaaccacagtcttcaccctactgaacccgtcaaggtcactctgccagacgcctttttgcctgctcaagtctgtagtgccaggattcaggaaaatggctcccttatcaccatcctggtcattgctggtgtcttctggatccaccggcttatcaagttcatctataacatttgctgctactgggagatccactccttctacctgcacgctctgcgcatccctatgtctgcccttccgtattgcacgtggcaagaagtgcaggcccggatcgtgcagacgcagaaggagcaccagatctgcatccacaaacgtgagctgacagaactggacatctaccaccgcatcctccgtttccagaactacatggtggcactggttaacaaatccctcctgcctctgcgcttccgcctgcctggcctcggggaagctgtcttcttcacccgtggtctcaagtacaactttgagctgatcctcttctggggacctggctctctgtttctcaatgaatggagcctcaaggccgagtacaaacgtggggggcaacggctagagctggcccagcgcctcagcaaccgcatcctgtggattggcatcgctaacttcctgctgtgccccctcatcctcatatggcaaatcctctatgccttcttcagctatgctgaggtgctgaagcgggagccgggggccctgggagcacgctgctggtcactctatggccgctgctacctccgccacttcaacgagctggagcacgagctgcagtcccgcctcaaccgtggctacaagcccgcctccaagtacatgaattgcttcttgtcacctcttttgacactgctggccaagaatggagccttcttcgctggctccatcctggctgtgcttattgccctcaccatttatgacgaagatgtgttggctgtggaacatgtgctgaccaccgtcacactcctgggggtcaccgtgaccgtgtgcaggtcctttatcccggaccagcacatggtgttctgccctgagcagctgctccgcgtgatcctcgctcacatccactacatgcctgaccactggcagggtaatgcccaccgctcgcagacccgggacgagtttgcccagctcttccagtacaaggcagtgttcattttggaagagttgctgagccccattgtcacacccctcatcctcatcttctgcctgcgcccacgggccctggagattatagacttcttccgaaacttcaccgtggaggtcgttggtgtgggagatacctgctcctttgctcagatggatgttcgccagcatggtcatccccagtggctatctgctgggcagacagaggcctcagtgtaccagcaagctgaggatggaaagacagagttgtcactcatgcactttgccatcaccaaccctggctggcagccaccacgtgagagcacagccttcctaggcttcctcaaggagcaggttcagcgggatggagcagctgctagcctcgcccaagggggtctgctccctgaaaatgccctctttacgtctatccagtccttacaatctgagtctgagcccctgagccttatcgcaaatgtggtagctggctcatcctgccggggccctccactgcccagagacctgcagggctccaggcacagggctgaagtcgcctctgccctgcgctccttctccccgctgcaacccgggcaggcgcccacaggccgggctcacagcaccatgacaggctctggggtggatgccaggacagccagctccgggagcagcgtgtgggaaggacagctgcagagcctggtgctgtcagaatatgcatccacagagatgagcctgcatgccctctatatgcaccagctccacaagcagcaggcccaggctgaacctgagcggcatgtatggcaccgccgggagagtgatgagagtggagaaagcgcccctgatgaagggggagagggcgcccgggccccccagtctatccctcgctctgctagctatccctgtgcagcaccccggcctggagctcctgagaccactgccctgcatgggggcttccagaggcgctacggtggcatcacagatcctggcacagtgcccagggttccctctcatttctctcggctgcctcttggagggtgggcagaagatgggcagtcggcatcaaggcaccctgagcccgtgcccgaagagggctcggaggatgagctaccccctcaggtgcacaaggtatagacaaggctgagcagggttcctgtggcccaggatggaggccaccgctgccctgccatcccgtctgcctgccatgggacggctcctctgagtgttccctggccccacgtgtgtggtgtttgtgtgtctgtgcctggccaagggaggtgccaacactgggcttgccacagccccaggagaggaatttggggcctaggaaccgagggcacacgggactctagcctcatccccaggacccccttggctcagagtgtggtgctagaaactggcccccagcccagccccagtactgccacctttacacctacccctgcaagtccccagagggctgcccacgatagaagctgccaagcagggagaacctgtgccaactgtggagtggggaggttgggcctg

SEQ ID NO: 2622 - DNA, 3799 bp, Homo sapiens
  source 1..3799: mol_type = unassigned DNA
agtcccgtccctgaagccgagaattggccgttgtgtctccgccccccgtgcttattggccagcctggctgcgggtgacagtgagtggcagacacccggcctagcgccgcgggtcgcgccgagccgagccgagccgagcggagccggcggagcctctggaatcacccgggtcgctgttcctgaggtggtcaaggtggacagggggcggtggtgatggcgcagtttgacactgaataccagcgcctagaggcctcctatagtgattcacccccaggggaggaggacctgttggtgcacgtcgccgaggggagcaagtcaccttggcaccatattgaaaaccttgacctcttcttctctcgagtttataatctgcaccagaagaatggcttcacatgtatgctcatcggggagatctttgagctcatgcagttcctctttgtggttgccttcactaccttcctggtcagctgcgtggactatgacatcctatttgccaacaagatggtgaaccacagtcttcaccctactgaacccgtcaaggtcactctgccagacgcctttttgcctgctcaagtctgtagtgccaggattcaggaaaatggctcccttatcaccatcctggtcattgctggtgtcttctggatccaccggcttatcaagttcatctataacatttgctgctactgggagatccactccttctacctgcacgctctgcgcatccctatgtctgcccttccgtattgcacgtggcaagaagtgcaggcccggatcgtgcagacgcagaaggagcaccagatctgcatccacaaacgtgagctgacagaactggacatctaccaccgcatcctccgtttccagaactacatggtggcactggttaacaaatccctcctgcctctgcgcttccgcctgcctggcctcggggaagctgtcttcttcacccgtggtctcaagtacaactttgagctgatcctcttctggggacctggctctctgtttctcaatgaatggagcctcaaggccgagtacaaacgtggggggcaacggctagagctggcccagcgcctcagcaaccgcatcctgtggattggcatcgctaacttcctgctgtgccccctcatcctcatatggcaaatcctctatgccttcttcagctatgctgaggtgctgaagcgggagccgggggccctgggagcacgctgctggtcactctatggccgctgctacctccgccacttcaacgagctggagcacgagctgcagtcccgcctcaaccgtggctacaagcccgcctccaagtacatgaattgcttcttgtcacctcttttgacactgctggccaagaatggagccttcttcgctggctccatcctggctgtgcttattgccctcaccatttatgacgaagatgtgttggctgtggaacatgtgctgaccaccgtcacactcctgggggtcaccgtgaccgtgtgcaggtcctttatcccggaccagcacatggtgttctgccctgagcagctgctccgcgtgatcctcgctcacatccactacatgcctgaccactggcagggtaatgcccaccgctcgcagacccgggacgagtttgcccagctcttccagtacaaggcagtgttcattttggaagagttgctgagccccattgtcacacccctcatcctcatcttctgcctgcgcccacgggccctggagattatagacttcttccgaaacttcaccgtggaggtcgttggtgtgggagatacctgctcctttgctcagatggatgttcgccagcatggtcatccccagtggctatctgctgggcagacagaggcctcagtgtaccagcaagctgaggatggaaagacagagttgtcactcatgcactttgccatcaccaaccctggctggcagccaccacgtgagagcacagccttcctaggcttcctcaaggagcaggttcagcgggatggagcagctgctagcctcgcccaagggggtctgctccctgaaaatgccctctttacgtctatccagtccttacaatctgagtctgagcccctgagccttatcgcaaatgtggtagctggctcatcctgccggggccctccactgcccagagacctgcagggctccaggcacagggctgaagtcgcctctgccctgcgctccttctccccgctgcaacccgggcaggcgcccacaggccgggctcacagcaccatgacaggctctggggtggatgccaggacagccagctccgggagcagcgtgtgggaaggacagctgcagagcctggtgctgtcagaatatgcatccacagagatgagcctgcatgccctctatatgcaccagctccacaagcagcaggcccaggctgaacctgagcggcatgtatggcaccgccgggagagtgatgagagtggagaaagcgcccctgatgaagggggagagggcgcccgggccccccagtctatccctcgctctgctagctatccctgtgcagcaccccggcctggagctcctgagaccactgccctgcatgggggcttccagaggcgctacggtggcatcacagatcctggcacagtgcccagggttccctctcatttctctcggctgcctcttggagggtgggcagaagatgggcagtcggcatcaaggcaccctgagcccgtgcccgaagagggctcggaggatgagctaccccctcaggtgcacaaggtatagacaaggctgagcagggttcctgtggcccaggatggaggccaccgctgccctgccatcccgtctgcctgccatgggacggctcctctgagtgttccctggccccacgtgtgtggtgtttgtgtgtctgtgcctggccaagggaggtgccaacactgggcttgccacagccccaggagaggaatttggggcctaggaaccgagggcacacgggactctagcctcatccccaggacccccttggctcagagtgtggtgctagaaactggcccccagcccagccccagtactgccacctttacacctacccctgcaagtccccagagggctgcccacgatagaagctgccaagcagggagaacctgtgccaactgtggagtggggaggttgggcctggaccctcaacccctgcaaccttccctagccccctcaatagatgagcaggtcaggctgtggcccttacctcacccgcagttctcgcccagtgctgcagccggctcacctctctccgcttcttgcacatcactggcctgtgtgtgctgcttgctcctgttctgttcgcttgctcccgttccgttcggcttttgctttgcgttagggtgaagaccctagcgtccagctcccctcaacgctatattttgacactaaaaaagaaggtttctaaattgtaggagcaggatggaaatactttgctgcccttgccatcttttaggatgggcccccaggagactgaggtcttcctgggccctcattgctgcttatcgtaccccccatcacctgcacatgggacagaccgggctggagggtgaccttggctgtgtgcgtcccagcaaaagagctctggcccgcatctcgctgtgccctgaagggggatgaagggcgatgcctcgcccgaggctttgggctgctgcactgcatgctgggactgctcctactctctgtcccacccctcacccagctgtggtccggctttgggagagtggtgaattgcgctgcccgaactcggagcggagcagggtagggaccgtgtacagcttgataacccttaataaaaagggagtttgaccaga

SEQ ID NO: 2623 - DNA, 2512 bp, Homo sapiens
  source 1..2512: mol_type = unassigned DNA
agacacccggcctagcgccgcgggtcgcgccgagccgagccgagccgagcggagccggcggagcctctggaatcacccgggtcgctgttcctgagcaccttggcaccatattgaaaaccttgacctcttcttctctcgagtttataatctgcaccagaagaatggcttcacatgtatgctcatcggggagatctttgagctcatgcagttcctctttgtggttgccttcactaccttcctggtcagctgcgtggactatgacatcctatttgccaacaagatggtgaaccacagtcttcaccctactgaacccgtcaaggtcactctgccagacgcctttttgcctgctcaagtctgtagtgccaggattcaggaaaatggctcccttatcaccatcctggtcattgctggtgtcttctggatccaccggcttatcaagttcatctataacatttgctgctactgggagatccactccttctacctgcacgctctgcgcatccctatgtctgcccttccgtattgcacgtggcaagaagtgcaggcccggatcgtgcagacgcagaaggagcaccagatctgcatccacaaacgtgagctgacagaactggacatctaccaccgcatcctccgtttccagaactacatggtggcactggttaacaaatccctcctgcctctgcgcttccgcctgcctggcctcggggaagctgtcttcttcacccgtggtctcaagtacaactttgagctgatcctcttctggggacctggctctctgtttctcaatgaatggagcctcaaggccgagtacaaacgtggggggcaacggctagagctggcccagcgcctcagcaaccgcatcctgtggattggcatcgctaacttcctgctgtgccccctcatcctcatatggcaaatcctctatgccttcttcagctatgctgaggtgctgaagcgggagccgggggccctgggagcacgctgctggtcactctatggccgctgctacctccgccacttcaacgagctggagcacgagctgcagtcccgcctcaaccgtggctacaagcccgcctccaagtacatgaattgcttcttgtcacctcttttgacactgctggccaagaatggagccttcttcgctggctccatcctggctgtgcttattgccctcaccatttatgacgaagatgtgttggctgtggaacatgtgctgaccaccgtcacactcctgggggtcaccgtgaccgtgtgcaggtcctttatcccggaccagcacatggtgttctgccctgagcagctgctccgcgtgatcctcgctcacatccactacatgcctgaccactggcagggtaatgcccaccgctcgcagacccgggacgagtttgcccagctcttccagtacaaggcagtgttcattttggaagagttgctgagccccattgtcacacccctcatcctcatcttctgcctgcgcccacgggccctggagattatagacttcttccgaaacttcaccgtggaggtcgttggtgtgggagatacctgctcctttgctcagatggatgttcgccagcatggtcatccccagtggctatctgctgggcagacagaggcctcagtgtaccagcaagctgaggatggaaagacagagttgtcactcatgcactttgccatcaccaaccctggctggcagccaccacgtgagagcacagccttcctaggcttcctcaaggagcaggttcagcgggatggagcagctgctagcctcgcccaagggggtctgctccctgaaaatgccctctttacgtctatccagtccttacaatctgagtctgagcccctgagccttatcgcaaatgtggtagctggctcatcctgccggggccctccactgcccagagacctgcagggctccaggcacagggctgaagtcgcctctgccctgcgctccttctccccgctgcaacccgggcaggcgcccacaggccgggctcacagcaccatgacaggctctggggtggatgccaggacagccagctccgggagcagcgtgtgggaaggacagctgcagagcctggtgctgtcagaatatgcatccacagagatgagcctgcatgccctctatatgcaccagctccacaagcagcaggcccaggctgaacctgagcggcatgtatggcaccgccgggagagtgatgagagtggagaaagcgcccctgatgaagggggagagggcgcccgggccccccagtctatccctcgctctgctagctatccctgtgcagcaccccggcctggagctcctgagaccactgccctgcatgggggcttccagaggcgctacggtggcatcacagatcctggcacagtgcccagggttccctctcatttctctcggctgcctcttggagggtgggcagaagatgggcagtcggcatcaaggcaccctgagcccgtgcccgaagagggctcggaggatgagctaccccctcaggtgcacaaggtatag

SEQ ID NO: 2624 - DNA, 4025 bp, Homo sapiens
  source 1..4025: mol_type = unassigned DNA
ggggcgcgcgcgggcgccggggccgcgcgcgaggttgtccgctgttgggagctgccagcccttggcctggggccgggcgaccctggggcgaggtggactccggtccacggtcgccgcggctgggtgtggggaggcaagccaacccacccgggctatcagctgtaaggctgactcgatccctgcaacatccgcaggaacccctgagcccaggcccagccggccggggctccacgggccctggtccacactgaccctgtgagtggtgacttccctgaggggcagggctctcactagcccagggaatcccaccggggccaggctgggccaagatccacggcccccaggggctgcacggacagcagctgcagagcatcgagggctggagaggagcacatactgtccatggagctggtggtcaaggtggacagggggcggtggtgatggcgcagtttgacactgaataccagcgcctagaggcctcctatagtgattcacccccaggggaggaggacctgttggtgcacgtcgccgaggggagcaagtcaccttggcaccatattgaaaaccttgacctcttcttctctcgagtttataatctgcaccagaagaatggcttcacatgtatgctcatcggggagatctttgagctcatgcagttcctctttgtggttgccttcactaccttcctggtcagctgcgtggactatgacatcctatttgccaacaagatggtgaaccacagtcttcaccctactgaacccgtcaaggtcactctgccagacgcctttttgcctgctcaagtctgtagtgccaggattcaggaaaatggctcccttatcaccatcctggtcattgctggtgtcttctggatccaccggcttatcaagttcatctataacatttgctgctactgggagatccactccttctacctgcacgctctgcgcatccctatgtctgcccttccgtattgcacgtggcaagaagtgcaggcccggatcgtgcagacgcagaaggagcaccagatctgcatccacaaacgtgagctgacagaactggacatctaccaccgcatcctccgtttccagaactacatggtggcactggttaacaaatccctcctgcctctgcgcttccgcctgcctggcctcggggaagctgtcttcttcacccgtggtctcaagtacaactttgagctgatcctcttctggggacctggctctctgtttctcaatgaatggagcctcaaggccgagtacaaacgtggggggcaacggctagagctggcccagcgcctcagcaaccgcatcctgtggattggcatcgctaacttcctgctgtgccccctcatcctcatatggcaaatcctctatgccttcttcagctatgctgaggtgctgaagcgggagccgggggccctgggagcacgctgctggtcactctatggccgctgctacctccgccacttcaacgagctggagcacgagctgcagtcccgcctcaaccgtggctacaagcccgcctccaagtacatgaattgcttcttgtcacctcttttgacactgctggccaagaatggagccttcttcgctggctccatcctggctgtgcttattgccctcaccatttatgacgaagatgtgttggctgtggaacatgtgctgaccaccgtcacactcctgggggtcaccgtgaccgtgtgcaggtcctttatcccggaccagcacatggtgttctgccctgagcagctgctccgcgtgatcctcgctcacatccactacatgcctgaccactggcagggtaatgcccaccgctcgcagacccgggacgagtttgcccagctcttccagtacaaggcagtgttcattttggaagagttgctgagccccattgtcacacccctcatcctcatcttctgcctgcgcccacgggccctggagattatagacttcttccgaaacttcaccgtggaggtcgttggtgtgggagatacctgctcctttgctcagatggatgttcgccagcatggtcatccccagtggctatctgctgggcagacagaggcctcagtgtaccagcaagctgaggatggaaagacagagttgtcactcatgcactttgccatcaccaaccctggctggcagccaccacgtgagagcacagccttcctaggcttcctcaaggagcaggttcagcgggatggagcagctgctagcctcgcccaagggggtctgctccctgaaaatgccctctttacgtctatccagtccttacaatctgagtctgagcccctgagccttatcgcaaatgtggtagctggctcatcctgccggggccctccactgcccagagacctgcagggctccaggcacagggctgaagtcgcctctgccctgcgctccttctccccgctgcaacccgggcaggcgcccacaggccgggctcacagcaccatgacaggctctggggtggatgccaggacagccagctccgggagcagcgtgtgggaaggacagctgcagagcctggtgctgtcagaatatgcatccacagagatgagcctgcatgccctctatatgcaccagctccacaagcagcaggcccaggctgaacctgagcggcatgtatggcaccgccgggagagtgatgagagtggagaaagcgcccctgatgaagggggagagggcgcccgggccccccagtctatccctcgctctgctagctatccctgtgcagcaccccggcctggagctcctgagaccactgccctgcatgggggcttccagaggcgctacggtggcatcacagatcctggcacagtgcccagggttccctctcatttctctcggctgcctcttggagggtgggcagaagatgggcagtcggcatcaaggcaccctgagcccgtgcccgaagagggctcggaggatgagctaccccctcaggtgcacaaggtatagacaaggctgagcagggttcctgtggcccaggatggaggccaccgctgccctgccatcccgtctgcctgccatgggacggctcctctgagtgttccctggccccacgtgtgtggtgtttgtgtgtctgtgcctggccaagggaggtgccaacactgggcttgccacagccccaggagaggaatttggggcctaggaaccgagggcacacgggactctagcctcatccccaggacccccttggctcagagtgtggtgctagaaactggcccccagcccagccccagtactgccacctttacacctacccctgcaagtccccagagggctgcccacgatagaagctgccaagcagggagaacctgtgccaactgtggagtggggaggttgggcctggaccctcaacccctgcaaccttccctagccccctcaatagatgagcaggtcaggctgtggcccttacctcacccgcagttctcgcccagtgctgcagccggctcacctctctccgcttcttgcacatcactggcctgtgtgtgctgcttgctcctgttctgttcgcttgctcccgttccgttcggcttttgctttgcgttagggtgaagaccctagcgtccagctcccctcaacgctatattttgacactaaaaaagaaggtttctaaattgtaggagcaggatggaaatactttgctgcccttgccatcttttaggatgggcccccaggagactgaggtcttcctgggccctcattgctgcttatcgtaccccccatcacctgcacatgggacagaccgggctggagggtgaccttggctgtgtgcgtcccagcaaaagagctctggcccgcatctcgctgtgccctgaagggggatgaagggcgatgcctcgcccgaggctttgggctgctgcactgcatgctgggactgctcctactctctgtcccacccctcacccagctgtggtccggctttgggagagtggtgaattgcgctgcccgaactcggagcggagcagggtagggaccgtgtacagcttgataacccttaataaaaagggagtttgacca

SEQ ID NO: 2625 - DNA, 700 bp, Homo sapiens
  source 1..700: mol_type = unassigned DNA
ctagcgccgcgggtcgcgccgagccgagccgagccgagcggagccggcggagcctctggaatcacccgggtcgctgttcctgagcagctgcagagcatcgagggctggagaggagcacatactgtccatggagctgggtctcttcttcctccttattggcaggtggtcaaggtggacagggggcggtggtgatggcgcagtttgacactgaataccagcgcctagaggcctcctatagtgattcacccccaggggaggaggacctgttggtgcacgtcgccgaggggagcaagtcaccttggcaccatattgaaaaccttgacctcttcttctctcgagtttataatctgcaccagaagaatggcttcacatgtatgctcatcggggagatctttgagctcatgcagttcctctttgtggttgccttcactaccttcctggtcagctgcgtggactatgacatcctatttgccaacaagatggtgaaccacagtcttcaccctactgaacccgtcaaggtcactctgccagacgcctttttgcctgctcaagtctgtagtgccaggattcaggaaaatggctcccttatcaccatcctggtcattgctggtgtcttctggatccaccggcttatcaagttcatctataacatttgctgctactgggagatccactccttctacctgcacgctctgcgcat

SEQ ID NO: 2626 - DNA, 796 bp, Homo sapiens
  source 1..796: mol_type = unassigned DNA
gcgcgaggttgtccgctgttgggagctgccagcccttggcctggggccgggcgaccctggggcgaggtggactccggtccacggtcgccgcggctgggtgtggggaggcaagccaacccacccgggctatcagctgtaaggctgactcgatccctgcaacatccgcaggaacccctgagcccaggcccagccggccggggctccacgggccctggtccacactgaccctgtgagtggtgacttccctgaggggcagggctctcactagcccagggaatcccaccggggccaggctgggccaagatccacggcccccaggggctgcacggacaggtggtcaaggtggacagggggcggtggtgatggcgcagtttgacactgaataccagcgcctagaggcctcctatagtgattcacccccaggggaggaggacctgttggtgcacgtcgccgaggggagcaagtcaccttggcaccatattgaaaaccttgacctcttcttctctcgagtttataatctgcaccagaagaatggcttcacatgtatgctcatcggggagatctttgagctcatgcagttcctctttgtggttgccttcactaccttcctggtcagctgcgtggactatgacatcctatttgccaacaagatggtgaaccacagtcttcaccctactgaacccgtcaaggtcactctgccagacgcctttttgcctgctcaagtctgtagtgccaggattcaggaaaatggctcccttatcaccatcctggtcattgctggtgtcttctggatcca

SEQ ID NO: 2627 - DNA, 568 bp, Homo sapiens
  source 1..568: mol_type = unassigned DNA
cttgagaccctggagttggaagagtggcccggtttagcacagccagaggaagtgctcgtagtcctgggctggaagggtgcttcttccccactgcagccttcctgccccatgcttggcctcctcttggtggggtgtggatggctgggagggttgggttcctttttatccccactgcccactctctggggcctgacatcttctcctccagcagctgcagagcatcgagggctggagaggagcacatactgtccatggagctggtggtcaaggtggacagggggcggtggtgatggcgcagtttgacactgaataccagcgcctagaggcctcctatagtgattcacccccaggggaggaggacctgttggtgcacgtcgccgaggggagcaagtcaccttggcaccatattgaaaaccttgacctcttcttctctcgagtttataatctgcaccagaagaatggcttcacatgtatgctcatcggggagatctttgagctcatgcagttcctctttgtggttgccttcactaccttcctggtcagctgcgtggactatgacatcctattt

SEQ ID NO: 2628 - DNA, 893 bp, Homo sapiens
  source 1..893: mol_type = unassigned DNA
ctagcgccgcgggtcgcgccgagccgagccgagccgagcggagccggcggagcctctggaatcacccgggtcgctgttcctgaggaacccctgagcccaggcccagccggccggggctccacgggccctggtccacactgaccctgtgagtggtgacttccctgaggggcagggctctcactagcccagggaatcccaccggggccaggctgggccaagatccacggcccccaggggctgcacggacagcagctgcagagcatcgagggctggagaggagcacatactgtccatggagctggtggtcaaggtggacagggggcggtggtgatggcgcagtttgacactgaataccagcgcctagaggcctcctatagtgattcacccccaggggaggaggacctgttggtgcacgtcgccgaggggagcaagtcaccttggcaccatattgaaaaccttgacctcttcttctctcgagtttataatctgcaccagaagaatggcttcacatgtatgctcatcggggagatctttgagctcatgcagttcctctttgtggttgccttcactaccttcctggtcagctgcgtggactatgacatcctatttgccaacaagatggtgaaccacagtcttcaccctactgaacccgtcaaggtcactctgccagacgcctttttgcctgctcaagtctgtagtgccaggattcaggaaaatggctcccttatcaccatcctggtcattgctggtgtcttctggatccaccggcttatcaagttcatctataacatttgctgctactgggagatccactccttctacctgcacgctctgcgcatccctatgtctgcccttccgtattgcacgtggcaagaagtgcaggcccggatcgt

SEQ ID NO: 2629 - DNA, 589 bp, Homo sapiens
  source 1..589: mol_type = unassigned DNA
agtgagtggcagacacccggcctagcgccgcgggtcgcgccgagccgagccgagccgagcggagccggcggagcctctggaatcacccgggtcgctgttcctgagcagctgcagagcatcgagggctggagaggagcacatactgtccatggagctggtagggccatgtggtcaaggtggacagggggcggtggtgatggcgcagtttgacactgaataccagcgcctagaggcctcctatagtgattcacccccaggggaggaggacctgttggtgcacgtcgccgaggggagcaagtcaccttggcaccatattgaaaaccttgacctcttcttctctcgagtttataatctgcaccagaagaatggcttcacatgtatgctcatcggggagatctttgagctcatgcagttcctctttgtggttgccttcactaccttcctggtcagctgcgtggactatgacatcctatttgccaacaagatggtgaaccacagtcttcaccctactgaacccgtcaaggtcactctgccagacgcctttttgcctgctcaagtctgtagtgccaggattcaggaaaatggctcc

SEQ ID NO: 2630 - DNA, 685 bp, Homo sapiens
  source 1..685: mol_type = unassigned DNA
gttgggagctgccagcccttggcctggggccgggcgaccctggggcgaggtggactccggtccacggtcgccgcggctgggtgtggggaggcaagccaacccacccgggctatcagctgtaaggctgactcgatccctgcaacatccgcaggaacccctgagcccaggcccagccggccggggctccacgggccctggtccacactgaccctgtgagtggtgacttccctgaggggcagggctctcactagcccagggaatcccaccggggccaggctgggccaagatccacggcccccaggggctgcacggacagctgcagagcatcgagggctggagaggagcacatactgtccatggagctggtggtcaaggtggacagggggcggtggtgatggcgcagtttgacactgaataccagcgcctagaggcctcctatagtgattcacccccaggggaggaggacctgttggtgcacgtcgccgaggggagcaagtcaccttggcaccatattgaaaaccttgacctcttcttctctcgagtttataatctgcaccagaagaatggcttcacatgtatgctcatcggggagatctttgagctcatgcagttcctctttgtggttgccttcactaccttcctggtcagctgcgtggactatgacatcctatttgccaacaagatg

SEQ ID NO: 2631 - DNA, 699 bp, Homo sapiens
  source 1..699: mol_type = unassigned DNA
agtgagtggcagacacccggcctagcgccgcgggtcgcgccgagccgagccgagccgagcggagccggcggagcctctggaatcacccgggtcgctgttcctgagctgcagagcatcgagggctggagaggagcacatactgtccatggagctggtggtcaaggtggacagggggcggtggtgatggcgcagtttgacactgaataccagcgcctagaggcctcctatagtgattcacccccaggggaggaggacctgttggtgcacgtcgccgaggggagcaagtcaccttggcaccatattgaaaaccttgacctcttcttctctcgagtttataatctgcaccagaagaatggcttcacatgtatgctcatcggggagatctttgagctcatgcagttcctctttgtggttgccttcactaccttcctggtcagctgcgtggactatgacatcctatttgccaacaagatggtgaaccacagtcttcaccctactgaacccgtcaaggtcactctgccagacgcctttttgcctgctcaagtctgtagtgccaggattcaggaaaatggctcccttatcaccatcctggtcattgctggtgtcttctggatccaccggcttatcaagttcatctataacatttgctgctactgggagatccactccttctacctgcacgctctgcgcatccctatg

SEQ ID NO: 2632 - DNA, 2628 bp, Homo sapiens
  source 1..2628: mol_type = unassigned DNA
agggagggtgtgacgctggtatctgtgtgaactcgggcttgtgatgctgagcttggttcatctgctttctcctcccttttcctccccactccttcccaccagcgccacagcaacatcctcagagtctgagcgaactgcgcccagcgcgggcacggagcctcccaccgccagcaacctgcggccccggagaaggcagcgagcgcagtgacagcgcctcaccgccaccagctcctggaccaccatggccaagaaccgcagggacagaaacagttggggtggattttcggaaaagacatatgaatggagctcagaagaggaggagccagtgaaaaaggcaggaccagtccaagtcctcattgtcaaagatgaccattcctttgagttagatgaaactgcattaaatcggatccttctctcggaggctgtcagagacaaggaggttgttgctgtatctgttgctggagcatttagaaaaggaaaatcattcctgatggacttcatgttgagatacatgtacaaccaggaatcagttgattgggttggagactacaatgaaccattgactggtttttcatggagaggtggatctgagcgagagaccacaggaattcagatatggagtgaaatcttccttatcaataaacctgatggtaaaaaggttgcagtgttattgatggatactcagggaacctttgatagtcagtcaactttgagagattcagccacagtatttgcccttagcacaatgatcagctcaatacaggtatataacttatcccaaaatgtccaggaggatgatcttcagcacctccagcttttcactgagtatggcagactggcaatggaggaaacattcctgaagccatttcagagtctgatatttcttgttcgagactggagtttcccatacgaattttcatatggagccgatggtggtgccaaattcttggaaaaacgcctcaaggtctcagggaaccagcatgaagaactacagaacgtcagaaaacacatccattcctgtttcaccaacatttcctgttttctgctacctcatcctggcttaaaagtagctaccaatccaaactttgatggaaaattgaaagaaatagatgatgaattcatcaaaaacttgaaaatactgattccttggctacttagtcccgagagcctagatattaaagagatcaatgggaataaaatcacctgccggggtctggtggagtacttcaaggcttatataaagatctatcaaggtgaagaattaccacatcccaaatccatgttacaggccacagcagaagctaacaatttagcagccgtggcaactgccaaggacacatacaacaaaaaaatggaagagatttgtggtggtgacaaaccatttctggccccaaatgacttgcagaccaaacacctgcaacttaaggaagaatctgtgaagctattccgaggggtgaagaagatgggtggggaagaatttagccggcgttacctgcagcagttggagagtgaaatagatgaactttacatccaatatatcaagcacaatgatagcaaaaatatcttccatgcagctcgtaccccagccacactgtttgtagtcatctttatcacatatgtgattgctggtgtgactggattcattggtttggacatcatagctagcctatgcaatatgataatgggactgacccttatcaccctgtgcacttgggcatatatccggtactctggagaataccgagagctgggagctgtaatagaccaggtggctgcagctctgtgggaccaggctttgtacaagctttacagtgcagcagcaacccacagacatctgtatcatcaagctttccctacaccaaagtcggaatctactgaacaatcagaaaagaaaaaaatgtaatgcaaattttaagaaatacaggtgcatgaccaattgtcaattaaatattcagttttatgtctccatgcaaacattcaaagtgcttccatcagaacggagtaaaatactaaacacctctgaagactgcaaactggattagttcttttacttcagtgtttaataagcagatgtatgtatgcatggttatactattttgttaacatgtacaatttcctgatttttcttcaaaaatgctgttataaagtatttgtctatttatgataacagtacacgtgttctgcttgaatttactaaattctactactgggttataattaaatcatgtgatattccacgtttggatatgctcatttaatttctacagaaaaaattttaaattatttcacattagccatttgttaaaacacagcatcataactcagcaggctggatttaatctgtatcatcttatatatatcacaatcttatttttaagcacattttagagttccttagttgctttatcaaaaaccagatattgcttttacatggtttaatagaatataaacctcttgataaaaaatgcacaaaaaatcactttgtatatgtgagtttcactgcattgtatattttttcatttggtacacaaagaatgtattcttcataggtttattcttttaatatgtgaactattattaaagtttactctggttcctaagattaaaaacaaatgcttactgaatttg

SEQ ID NO: 2633 - DNA, 2643 bp, Homo sapiens
  source 1..2643: mol_type = unassigned DNA
agggagggtgtgacgctggtatctgtgtgaactcgggcttgtgatgctgagcttggttcatctgctttctcctcccttttcctccccactccttcccaccagcgccacagcaacatcctcagagtctgagcgaactgcgcccagcgcgggcacggagcctcccaccgccagcaacctgcggccccggagaaggcagcgagcgcagtgacagcgcctcaccgccaccagctcctggaccaccatggccaagaaccgcagggacagaaacagttggggtggattttcggaaaagacatatgaatggagctcagaagaggaggagccagtgaaaaaggcaggaccagtccaagtcctcattgtcaaagatgaccattcctttgagttagatgaaactgcattaaatcggatccttctctcggaggctgtcagagacaaggaggttgttgctgtatctgttgctggagcatttagaaaaggaaaatcattcctgatggacttcatgttgagatacatgtacaaccaggaatcagttgattgggttggagactacaatgaaccattgactggtttttcatggagaggtggatctgagcgagagaccacaggaattcagatatggagtgaaatcttccttatcaataaacctgatggtaaaaaggttgcagtgttattgatggatactcagggaacctttgatagtcagtcaactttgagagattcagccacagtatttgcccttagcacaatgatcagctcaatacaggtatataacttatcccaaaatgtccaggaggatgatcttcagcacctccagcttttcactgagtatggcagactggcaatggaggaaacattcctgaagccatttcagagtctgatatttcttgttcgagactggagtttcccatacgaattttcatatggagccgatggtggtgccaaattcttggaaaaacgcctcaaggtctcagggaaccagcatgaagaactacagaacgtcagaaaacacatccattcctgtttcaccaacatttcctgttttctgctacctcatcctggcttaaaagtagctaccaatccaaactttgatggaaaattgaaagaaatagatgatgaattcatcaaaaacttgaaaatactgattccttggctacttagtcccgagagcctagatattaaagagatcaatgggaataaaatcacctgccggggtctggtggagtacttcaaggcttatataaagatctatcaaggtgaagaattaccacatcccaaatccatgttacaggccacagcagaagctaacaatttagcagccgtggcaactgccaaggacacatacaacaaaaaaatggaagagatttgtggtggtgacaaaccatttctggccccaaatgacttgcagaccaaacacctgcaacttaaggaagaatctgtgaagctattccgaggggtgaagaagatgggtggggaagaatttagccggcgttacctgcagcagttggagagtgaaatagatgaactttacatccaatatatcaagcacaatgatagcaaaaatatcttccatgcagctcgtaccccagccacactgtttgtagtcatctttatcacatatgtgattgctggtgtgactggattcattggtttggacatcatagctagcctatgcaatatgataatgggactgacccttatcaccctgtgcacttgggcatatatccggtactctggagaataccgagagctgggagctgtaatagaccaggtggctgcagctctgtgggaccagggccccagtcatcaagctttgtacaagctttacagtgcagcagcaacccacagacatctgtatcatcaagctttccctacaccaaagtcggaatctactgaacaatcagaaaagaaaaaaatgtaatgcaaattttaagaaatacaggtgcatgaccaattgtcaattaaatattcagttttatgtctccatgcaaacattcaaagtgcttccatcagaacggagtaaaatactaaacacctctgaagactgcaaactggattagttcttttacttcagtgtttaataagcagatgtatgtatgcatggttatactattttgttaacatgtacaatttcctgatttttcttcaaaaatgctgttataaagtatttgtctatttatgataacagtacacgtgttctgcttgaatttactaaattctactactgggttataattaaatcatgtgatattccacgtttggatatgctcatttaatttctacagaaaaaattttaaattatttcacattagccatttgttaaaacacagcatcataactcagcaggctggatttaatctgtatcatcttatatatatcacaatcttatttttaagcacattttagagttccttagttgctttatcaaaaaccagatattgcttttacatggtttaatagaatataaacctcttgataaaaaatgcacaaaaaatcactttgtatatgtgagtttcactgcattgtatattttttcatttggtacacaaagaatgtattcttcataggtttattcttttaatatgtgaactattattaaagtttactctggttcctaagattaaaaacaaatgcttactgaatttg

SEQ ID NO: 2634 - DNA, 2647 bp, Homo sapiens
  source 1..2647: mol_type = unassigned DNA
agggagggtgtgacgctggtatctgtgtgaactcgggcttgtgatgctgagcttggttcatctgctttctcctcccttttcctccccactccttcccaccagcgccacagcaacatcctcagagtctgagcgaactgcgcccagcgcgggcacggagcctcccaccgccagcaacctgcggccccggagaaggcagcgagcgcagtgacagcgcctcaccgccaccagctcctggaccaccatggccaagaaccgcagggacagaaacagttggggtggattttcggaaaagacatatgaatggagctcagaagaggaggagccagtgaaaaaggcaggaccagtccaagtcctcattgtcaaagatgaccattcctttgagttagatgaaactgcattaaatcggatccttctctcggaggctgtcagagacaaggaggttgttgctgtatctgttgctggagcatttagaaaaggaaaatcattcctgatggacttcatgttgagatacatgtacaaccaggaatcagttgattgggttggagactacaatgaaccattgactggtttttcatggagaggtggatctgagcgagagaccacaggaattcagatatggagtgaaatcttccttatcaataaacctgatggtaaaaaggttgcagtgttattgatggatactcagggaacctttgatagtcagtcaactttgagagattcagccacagtatttgcccttagcacaatgatcagctcaatacaggtatataacttatcccaaaatgtccaggaggatgatcttcagcacctccagcttttcactgagtatggcagactggcaatggaggaaacattcctgaagccatttcagagtctgatatttcttgttcgagactggagtttcccatacgaattttcatatggagccgatggtggtgccaaattcttggaaaaacgcctcaaggtctcagggaaccagcatgaagaactacagaacgtcagaaaacacatccattcctgtttcaccaacatttcctgttttctgctacctcatcctggcttaaaagtagctaccaatccaaactttgatggaaaattgaaagaaatagatgatgaattcatcaaaaacttgaaaatactgattccttggctacttagtcccgagagcctagatattaaagagatcaatgggaataaaatcacctgccggggtctggtggagtacttcaaggcttatataaagatctatcaaggtgaagaattaccacatcccaaatccatgttacaggccacagcagaagctaacaatttagcagccgtggcaactgccaaggacacatacaacaaaaaaatggaagagatttgtggtggtgacaaaccatttctggccccaaatgacttgcagaccaaacacctgcaacttaaggaagaatctgtgaagctattccgaggggtgaagaagatgggtggggaagaatttagccggcgttacctgcagcagttggagagtgaaatagatgaactttacatccaatatatcaagcacaatgatagcaaaaatatcttccatgcagctcgtaccccagccacactgtttgtagtcatctttatcacatatgtgattgctggtgtgactggattcattggtttggacatcatagctagcctatgcaatatgataatgggactgacccttatcaccctgtgcacttgggcatatatccggtactctggagaataccgagagctgggagctgtaatagaccaggtggctgcagctctgtgggaccagggaagtacaaatgaggctttgtacaagctttacagtgcagcagcaacccacagacatctgtatcatcaagctttccctacaccaaagtcggaatctactgaacaatcagaaaagaaaaaaatgtaatgcaaattttaagaaatacaggtgcatgaccaattgtcaattaaatattcagttttatgtctccatgcaaacattcaaagtgcttccatcagaacggagtaaaatactaaacacctctgaagactgcaaactggattagttcttttacttcagtgtttaataagcagatgtatgtatgcatggttatactattttgttaacatgtacaatttcctgatttttcttcaaaaatgctgttataaagtatttgtctatttatgataacagtacacgtgttctgcttgaatttactaaattctactactgggttataattaaatcatgtgatattccacgtttggatatgctcatttaatttctacagaaaaaattttaaattatttcacattagccatttgttaaaacacagcatcataactcagcaggctggatttaatctgtatcatcttatatatatcacaatcttatttttaagcacattttagagttccttagttgctttatcaaaaaccagatattgcttttacatggtttaatagaatataaacctcttgataaaaaatgcacaaaaaatcactttgtatatgtgagtttcactgcattgtatattttttcatttggtacacaaagaatgtattcttcataggtttattcttttaatatgtgaactattattaaagtttactctggttcctaagattaaaaacaaatgcttactgaatttgaaaa

SEQ ID NO: 2635 - DNA, 2853 bp, Homo sapiens
  source 1..2853: mol_type = unassigned DNA
agtcccggcacaccctactgcaccttcctgttttgcaaaccgatcccggtggtaccagtttgaggctgcactgcacacctgcacaacctgccttctacttagttcttctgagacatttctgaaagtctgaattcctaggactgctcaatgacctttgtccctgttgggcacacgcagtgtctcatcgctggtattgcacctttaatgagaccaggagttccgcaaaagtaaaacaaaggggtcacagactggttctggttctaccacttcctcagtatgtgctctgggacaaaacagcatatttggcaacatctcggtgtccttatctgcagcttgaagaggcgccacagcaacatcctcagagtctgagcgaactgcgcccagcgcgggcacggagcctcccaccgccagcaacctgcggccccggagaaggcagcgagcgcagtgacagcgcctcaccgccaccagctcctggaccaccatggccaagaaccgcagggacagaaacagttggggtggattttcggaaaagacatatgaatggagctcagaagaggaggagccagtgaaaaaggcaggaccagtccaagtcctcattgtcaaagatgaccattcctttgagttagatgaaactgcattaaatcggatccttctctcggaggctgtcagagacaaggaggttgttgctgtatctgttgctggagcatttagaaaaggaaaatcattcctgatggacttcatgttgagatacatgtacaaccaggaatcagttgattgggttggagactacaatgaaccattgactggtttttcatggagaggtggatctgagcgagagaccacaggaattcagatatggagtgaaatcttccttatcaataaacctgatggtaaaaaggttgcagtgttattgatggatactcagggaacctttgatagtcagtcaactttgagagattcagccacagtatttgcccttagcacaatgatcagctcaatacaggtatataacttatcccaaaatgtccaggaggatgatcttcagcacctccagcttttcactgagtatggcagactggcaatggaggaaacattcctgaagccatttcagagtctgatatttcttgttcgagactggagtttcccatacgaattttcatatggagccgatggtggtgccaaattcttggaaaaacgcctcaaggtctcagggaaccagcatgaagaactacagaacgtcagaaaacacatccattcctgtttcaccaacatttcctgttttctgctacctcatcctggcttaaaagtagctaccaatccaaactttgatggaaaattgaaagaaatagatgatgaattcatcaaaaacttgaaaatactgattccttggctacttagtcccgagagcctagatattaaagagatcaatgggaataaaatcacctgccggggtctggtggagtacttcaaggcttatataaagatctatcaaggtgaagaattaccacatcccaaatccatgttacaggccacagcagaagctaacaatttagcagccgtggcaactgccaaggacacatacaacaaaaaaatggaagagatttgtggtggtgacaaaccatttctggccccaaatgacttgcagaccaaacacctgcaacttaaggaagaatctgtgaagctattccgaggggtgaagaagatgggtggggaagaatttagccggcgttacctgcagcagttggagagtgaaatagatgaactttacatccaatatatcaagcacaatgatagcaaaaatatcttccatgcagctcgtaccccagccacactgtttgtagtcatctttatcacatatgtgattgctggtgtgactggattcattggtttggacatcatagctagcctatgcaatatgataatgggactgacccttatcaccctgtgcacttgggcatatatccggtactctggagaataccgagagctgggagctgtaatagaccaggtggctgcagctctgtgggaccaggctttgtacaagctttacagtgcagcagcaacccacagacatctgtatcatcaagctttccctacaccaaagtcggaatctactgaacaatcagaaaagaaaaaaatgtaatgcaaattttaagaaatacaggtgcatgaccaattgtcaattaaatattcagttttatgtctccatgcaaacattcaaagtgcttccatcagaacggagtaaaatactaaacacctctgaagactgcaaactggattagttcttttacttcagtgtttaataagcagatgtatgtatgcatggttatactattttgttaacatgtacaatttcctgatttttcttcaaaaatgctgttataaagtatttgtctatttatgataacagtacacgtgttctgcttgaatttactaaattctactactgggttataattaaatcatgtgatattccacgtttggatatgctcatttaatttctacagaaaaaattttaaattatttcacattagccatttgttaaaacacagcatcataactcagcaggctggatttaatctgtatcatcttatatatatcacaatcttatttttaagcacattttagagttccttagttgctttatcaaaaaccagatattgcttttacatggtttaatagaatataaacctcttgataaaaaatgcacaaaaaatcactttgtatatgtgagtttcactgcattgtatattttttcatttggtacacaaagaatgtattcttcataggtttattcttttaatatgtgaactattattaaagtttactctggttcctaagattaaaaacaaa

SEQ ID NO: 2636 - DNA, 527 bp, Homo sapiens
  source 1..527: mol_type = unassigned DNA
atctttgcaaatctagtgggaaattttacccagtggatattgagttacagatcgtaatgaatctacagctttcatttatcttgatcttcttgatataaattttgctattctaattttaagacaaactactcagtatacatatacaaaaatgcatgataccctctttactaacatgaccttgcttttaaaatggaaaaaaaaatgggtgcctcgtagataaatgcacattattttagctactttggctatataaatgttgccagcttgtttgtactaatgtataaccgtgcttgaaacagcgccacagcaacatcctcagagtctgagcgaactgcgcccagcgcgggcacggagcctcccaccgccagcaacctgcggccccggagaaggcagcgagcgcagtgacagcgcctcaccgccaccagctcctggaccaccatggccaagaaccgcagggacagaaacagttggggtggattttcggaaaagacatatgaatggagctcagaagaggaggagccagtgaa

SEQ ID NO: 2637 - DNA, 620 bp, Homo sapiens
  source 1..620: mol_type = unassigned DNA
agaagactacaagtatagatttgggaatcatcagcatggaggtcctgtctgaagccatcatagtaaattacattgagagagtgtagcgtgaggagttgcttaccatgaggaattagcagagatcatggatctggtaattaagaggctggcagtgatctcctaagaaccgatcagtacagagtcgccacagcaacatcctcagagtctgagcgaactgcgcccagcgcgggcacggagcctcccaccgccagcaacctgcggccccggagaaggcagcgagcgcagtgacagcgcctcaccgccaccagctcctggaccaccatggccaagaaccgcagggacagaaacagttggggtggattttcggaaaagacatatgaatggagctcagaagaggaggagccagtgaaaaaggcaggaccagtccaagtcctcattgtcaaagatgaccattcctttgagttagatgaaactgcattaaatcggatccttctctcggaggctgtcagagacaaggaggttgttgctgtatctgttgctggagcatttagaaaaggaaaatcattcctgatggacttcatgttgagatacatgtacaaccaggaatcagttgattgggt

SEQ ID NO: 2638 - DNA, 2360 bp, Homo sapiens
  source 1..2360: mol_type = unassigned DNA
actgtggtgcgaattgatcgcatgaaatcctgattgaaaattttgatggtacttaagaaaggcataaagttttttcaaaggcttataaatagtaaaagcctacgatttggtgagaattatgaagatgatgacctagtaaattctgatgaggttatgaagaaaccatgtccagtacagattgttcttgctcatgaagatgaccataactttgaacttgatgaagaagctttggagcagatattgctacaggagcacatacgagatcttaacatagtagtggtatctgtggcaggagcttttcgtaaagggaagtcatttctactggacttcatgcttagatacatgtataacaaggattctcaaagttggattggtggaaacaatgaaccattgacaggctttacatggcgaggtggctgtgaaagagaaacaacaggcatacaagtttggaatgaagtatttgtgattgacagacctaatggaactaaagttgctgtgctgcttatggatacccagggtgcctttgatagccagtcaactatcaaagactgtgcaacggtgtttgctctgagcactatgactagctctgtccaggtatataatctgtctcagaatattcaagaagatgatcttcaacatttgcaattatttacagagtatggaagacttgcgatggaagaaatctaccagaaaccatttcagacattaatgtttttgattcgagattggagctatccttatgaacattcatatggtttggaaggtggaaagcaatttcttgaaaagagattacaggtaaaacaaaatcaacatgaagagcttcagaatgtaaggaagcacatacacaattgtttctcaaatcttggttgcttccttttgccacatcctggtcttaaagttgcaactaatcctagttttgatgggagattgaaagatattgatgaagactttaaacgagagcttcgaaatctggttccattgctgcttgcccctgaaaatttggtagaaaaagagataagtggatctaaagtcacttgtagagatcttgtagaatattttaaggcttacatcaaaatctatcaaggagaagaacttccacatccaaagtccatgcttcaggcaacagctgaagctaataatcttgctgcagtagcaggagcaagagatacctattgtaaaagtatggaacaggtatgtggaggggacaagccttacattgcaccttcagatctggagcgaaaacacttggatctcaaggaagtggcgataaaacaatttcgttcagtaaaaaagatgggtggagatgagttctgccgtcgttatcaggaccagcttgaagctgaaattgaagaaacctatgcaaattttataaagcacaatgatggcaaaaatatcttctatgctgctcgtaccccagccacactgtttgcggtcatgtttgctatgtatataatctcaggactgactggcttcattggcctaaactctatagctgtcttgtgtaaccttgtcatggggttagcactgatatttctttgtacttgggcatatgttaaatactctggggagttcagagaaattggaacagtgattgatcagattgctgaaacactatgggaacagaggagtcccaggaaggtgttttccaaactgtttgaagttactagacgtcgaatggttcaccgtgctctttcatcagcacagcgacagagactgtcatccaacaataacaagaagaaaaattagacagtatttttaacctttttctctatctgaagtgttcacacttacacatgtaggacaataagcaggaccgtctgggccggtctgcataaatgctgtatacataccagatttgatgctgcatatagggtatggaattgcacatccatctcataggaattgtaaatggtttgaataagaggaaagtaatttttgttgcattataaaatgtctagtagcatcataagtttttttgagagaagcatctttttatttcccatattcctggttattttcatcattgctttgaattgaatttttatatctatttttatatgtaactctttttttacctcatgtttttgtttgttttgcacatttctcataccacaggtattgaagcccctgggtgataatttgatggaggaaaacataaggcagtctgtaacaaactctatcaaagcaggcctgactgaccaggtgtctcatcatgccagattaaagacagactgacagttcatctcctcacggactccactctctttttttttcatgcttgctgtacaatgagaactcaaataaaaataaaccaaagtttacaatcaactgtagaagtagtttagtgtaactggcttcac

SEQ ID NO: 2639 - DNA, 2868 bp, Homo sapiens
  source 1..2868: mol_type = unassigned DNA
agatggcggagggggacgaggcagcgcgagggcagcaaccgcaccaggggctgtggcgccggcgacggaccagcgacccaagcgccgcggttaaccacgtctcgtccacgacctccctaggtgagaattatgaagatgatgacctagtaaattctgatgaggttatgaagaaaccatgtccagtacagattgttcttgctcatgaagatgaccataactttgaacttgatgaagaagctttggagcagatattgctacaggagcacatacgagatcttaacatagtagtggtatctgtggcaggagcttttcgtaaagggaagtcatttctactggacttcatgcttagatacatgtataacaaggattctcaaagttggattggtggaaacaatgaaccattgacaggctttacatggcgaggtggctgtgaaagagaaacaacaggcatacaagtttggaatgaagtatttgtgattgacagacctaatggaactaaagttgctgtgctgcttatggatacccagggtgcctttgatagccagtcaactatcaaagactgtgcaacggtgtttgctctgagcactatgactagctctgtccaggtatataatctgtctcagaatattcaagaagatgatcttcaacatttgcaattatttacagagtatggaagacttgcgatggaagaaatctaccagaaaccatttcagacattaatgtttttgattcgagattggagctatccttatgaacattcatatggtttggaaggtggaaagcaatttcttgaaaagagattacaggtaaaacaaaatcaacatgaagagcttcagaatgtaaggaagcacatacacaattgtttctcaaatcttggttgcttccttttgccacatcctggtcttaaagttgcaactaatcctagttttgatgggagattgaaagatattgatgaagactttaaacgagagcttcgaaatctggttccattgctgcttgcccctgaaaatttggtagaaaaagagataagtggatctaaagtcacttgtagagatcttgtagaatattttaaggcttacatcaaaatctatcaaggagaagaacttccacatccaaagtccatgcttcaggcaacagctgaagctaataatcttgctgcagtagcaggagcaagagatacctattgtaaaagtatggaacaggtatgtggaggggacaagccttacattgcaccttcagatctggagcgaaaacacttggatctcaaggaagtggcgataaaacaatttcgttcagtaaaaaagatgggtggagatgagttctgccgtcgttatcaggaccagcttgaagctgaaattgaagaaacctatgcaaattttataaagcacaatgatggcaaaaatatcttctatgctgctcgtaccccagccacactgtttgcggtcatgtttgctatgtatataatctcaggactgactggcttcattggcctaaactctatagctgtcttgtgtaaccttgtcatggggttagcactgatatttctttgtacttgggcatatgttaaatactctggggagttcagagaaattggaacagtgattgatcagattgctgaaacactatgggaacaggtattgaagcccctgggtgataatttgatggaggaaaacataaggcagtctgtaacaaactctatcaaagcaggcctgactgaccaggtgtctcatcatgccagattaaagacagactgacagttcatctcctcacggactccactctctttttttttcatgcttgctgtacaatgagaactcaaataaaaataaaccaaagtttacaatcaactgtagaagtagtttagtgtaactggcttcacagatggctgccacagagtgtgaagattgtttgttagttttaagcattcttttaatggctcctaagacatgcagatggactgaggagcattggttaatcatgcacctttgtgccatgtttaactcttttatttctttttacttaatctaatgttagtgaatttgtcttatgtaaaaggatatttcagggaaatattttcagaaatctatttagagtctctttaacacagtgtcccattgaaattttaatttttagagaatttatgaatcactgtttcaagaaccagattggaaagacaatgaagcctttattgagccactacattaaaagtatatattgctttactgccttcaataccagtattacatcaatgcatgtatcagaaacttcacagaaattacatggcaactcttgtagctaagaaagtaattctgaggtgtacatttgtcttgcctttttaaatttataaacttgccctaaaaggagatgcatatctgggaaactgaactgtctttttgcagtttagccttcatgtatataaaatatgccattaattttattggggaagaaattccatccaaaaatgttgcctacagctatgagttaagagtgtctgtacagtgtgtagcttttattttctaaaatcacagatagggcatgtatatgacttataaatatataaatacgattttgtattaaaagttttgtagtttatggcaaaatctggtcctgtggtaggctaaataagtactgtccctgtgaaaggaatgtttgtggctcatgtcagtgtgtgaatgcatagacaatttgaagtttttgatatatttgtgatatttatcttgagcactgcaatctcaccccccccccgcccaccaagggaattcaatgggaatgtttattgtgactttgtcctctgttgcattttaaagttatttcctgtaatttattttcagtacataattaaaaatttgttgtatatataaaatgaaa

SEQ ID NO: 2640 - DNA, 1883 bp, Homo sapiens
  source 1..1883: mol_type = unassigned DNA
actgtggtgcgaattgatcgcatgaaatcctgattgaaaattttgatggtacttaagaaaggcataaagttttttcaaaggcttataaatagtaaaagcctacgatttggattctcaaagttggattggtggaaacaatgaaccattgacaggctttacatggcgaggtggctgtgaaagagaaacaacaggcatacaagtttggaatgaagtatttgtgattgacagacctaatggaactaaagttgctgtgctgcttatggatacccagggtgcctttgatagccagtcaactatcaaagactgtgcaacggtgtttgctctgagcactatgactagctctgtccaggtatataatctgtctcagaatattcaagaagatgatcttcaacatttgcaattatttacagagtatggaagacttgcgatggaagaaatctaccagaaaccatttcagacattaatgtttttgattcgagattggagctatccttatgaacattcatatggtttggaaggtggaaagcaatttcttgaaaagagattacaggtaaaacaaaatcaacatgaagagcttcagaatgtaaggaagcacatacacaattgtttctcaaatcttggttgcttccttttgccacatcctggtcttaaagttgcaactaatcctagttttgatgggagattgaaagatattgatgaagactttaaacgagagcttcgaaatctggttccattgctgcttgcccctgaaaatttggtagaaaaagagataagtggatctaaagtcacttgtagagatcttgtagaatattttaaggcttacatcaaaatctatcaaggagaagaacttccacatccaaagtccatgcttcaggcaacagctgaagctaataatcttgctgcagtagcaggagcaagagatacctattgtaaaagtatggaacaggtatgtggaggggacaagccttacattgcaccttcagatctggagcgaaaacacttggatctcaaggaagtggcgataaaacaatttcgttcagtaaaaaagatgggtggagatgagttctgccgtcgttatcaggaccagcttgaagctgaaattgaagaaacctatgcaaattttataaagcacaatgatggcaaaaatatcttctatgctgctcgtaccccagccacactgtttgcggtcatgtttgctatgtatataatctcaggactgactggcttcattggcctaaactctatagctgtcttgtgtaaccttgtcatggggttagcactgatatttctttgtacttgggcatatgttaaatactctggggagttcagagaaattggaacagtgattgatcagattgctgaaacactatgggaacaggtattgaagcccctgggtgataatttgatggaggaaaacataaggcagtctgtaacaaactctatcaaagcaggcctgactgaccaggtgtctcatcatgccagattaaagacagactgacagttcatctcctcacggactccactctctttttttttcatgcttgctgtacaatgagaactcaaataaaaataaaccaaagtttacaatcaactgtagaagtagtttagtgtaactggcttcacagatggctgccacagagtgtgaagattgtttgttagttttaagcattcttttaatggctcctaagacatgcagatggactgaggagcattggttaatcatgcacctttgtgccatgtttaactcttttatttctttttacttaatctaatgttagtgaatttgtcttatgtaaaaggatatttcagggaaatattttcagaaatctatttagagtctctttaacacagtgtcccattgaaattttaatttttagagaatt

SEQ ID NO: 2641 - DNA, 2335 bp, Homo sapiens
  source 1..2335: mol_type = unassigned DNA
aaatcggtacaagatggcggagggggacgaggcagcgcgagggcagcaaccgcaccaggggctgtggcgccggcgacggaccagcgacccaagcgccgcggttaaccacgtctcgtccacgacctccctaggtgagaattatgaagatgatgacctagtaaattctgatgaggttatgaagaaaccatgtccagtacagattgttcttgctcatgaagatgaccataactttgaacttgatgaagaagctttggagcagatattgctacaggagcacatacgagatcttaacatagtagtggtatctgtggcaggagcttttcgtaaagggaagtcatttctactggacttcatgcttagatacatgtataacaaggattctcaaagttggattggtggaaacaatgaaccattgacaggctttacatggcgaggtggctgtgaaagagaaacaacaggcatacaagtttggaatgaagtatttgtgattgacagacctaatggaactaaagttgctgtgctgcttatggatacccagggtgcctttgatagccagtcaactatcaaagactgtgcaacggtgtttgctctgagcactatgactagctctgtccaggtatataatctgtctcagaatattcaagaagatgatcttcaacatttgcaattatttacagagtatggaagacttgcgatggaagaaatctaccagaaaccatttcagacattaatgtttttgattcgagattggagctatccttatgaacattcatatggtttggaaggtggaaagcaatttcttgaaaagagattacaggtaaaacaaaatcaacatgaagagcttcagaatgtaaggaagcacatacacaattgtttctcaaatcttggttgcttccttttgccacatcctggtcttaaagttgcaactaatcctagttttgatgggagattgaaagatattgatgaagactttaaacgagagcttcgaaatctggttccattgctgcttgcccctgaaaatttggtagaaaaagagataagtggatctaaagtcacttgtagagatcttgtagaatattttaaggcttacatcaaaatctatcaaggagaagaacttccacatccaaagtccatgcttcaggcaacagctgaagctaataatcttgctgcagtagcaggagcaagagatacctattgtaaaagtatggaacaggtatgtggaggggacaagccttacattgcaccttcagatctggagcgaaaacacttggatctcaaggaagtggcgataaaacaatttcgttcagtaaaaaagatgggtggagatgagttctgccgtcgttatcaggaccagcttgaagctgaaattgaagaaacctatgcaaattttataaagcacaatgatggcaaaaatatcttctatgctgctcgtaccccagccacactgtttgcggtcatgtttgctatgtatataatctcaggactgactggcttcattggcctaaactctatagctgtcttgtgtaaccttgtcatggggttagcactgatatttctttgtacttgggcatatgttaaatactctggggagttcagagaaattggaacagtgattgatcagattgctgaaacactatgggaacaggtgttttccaaactgtttgaagttactagacgtcgaatggttcaccgtgctctttcatcagcacagcgacagagactgtcatccaacaataacaagaagaaaaattagacagtatttttaacctttttctctatctgaagtgttcacacttacacatgtaggacaataagcaggaccgtctgggccggtctgcataaatgctgtatacataccagatttgatgctgcatatagggtatggaattgcacatccatctcataggaattgtaaatggtttgaataagaggaaagtaatttttgttgcattataaaatgtctagtagcatcataagtttttttgagagaagcatctttttatttcccatattcctggttattttcatcattgctttgaattgaatttttatatctatttttatatgtaactctttttttacctcatgtttttgtttgttttgcacatttctcataccacaggtattgaagcccctgggtgataatttgatggaggaaaacataaggcagtctgtaacaaactctatcaaagcaggcctgactgaccaggtgtctcatcatgccagattaaagacagactgacagttcatctcctcacggactccactctctttttttttcatgcttgctgtacaatgagaactcaaataaaaataaaccaaagtttacaatcaa

SEQ ID NO: 2642 - DNA, 1700 bp, Homo sapiens
  source 1..1700: mol_type = unassigned DNA
aaatcggtacaagatggcggagggggacgaggcagcgcgagggcagcaaccgcaccaggggctgtggcgccggcgacggaccagcgacccaagcgccgcggttaaccacgtctcgtccacgacctccctaggattctcaaagttggattggtggaaacaatgaaccattgacaggctttacatggcgaggtggctgtgaaagagaaacaacaggcatacaagtttggaatgaagtatttgtgattgacagacctaatggaactaaagttgctgtgctgcttatggatacccagggtgcctttgatagccagtcaactatcaaagactgtgcaacggtgtttgctctgagcactatgactagctctgtccaggtatataatctgtctcagaatattcaagaagatgatcttcaacatttgcaattatttacagagtatggaagacttgcgatggaagaaatctaccagaaaccatttcagacattaatgtttttgattcgagattggagctatccttatgaacattcatatggtttggaaggtggaaagcaatttcttgaaaagagattacaggtaaaacaaaatcaacatgaagagcttcagaatgtaaggaagcacatacacaattgtttctcaaatcttggttgcttccttttgccacatcctggtcttaaagttgcaactaatcctagttttgatgggagattgaaagatattgatgaagactttaaacgagagcttcgaaatctggttccattgctgcttgcccctgaaaatttggtagaaaaagagataagtggatctaaagtcacttgtagagatcttgtagaatattttaaggcttacatcaaaatctatcaaggagaagaacttccacatccaaagtccatgcttcaggcaacagctgaagctaataatcttgctgcagtagcaggagcaagagatacctattgtaaaagtatggaacaggtatgtggaggggacaagccttacattgcaccttcagatctggagcgaaaacacttggatctcaaggaagtggcgataaaacaatttcgttcagtaaaaaagatgggtggagatgagttctgccgtcgttatcaggaccagcttgaagctgaaattgaagaaacctatgcaaattttataaagcacaatgatggcaaaaatatcttctatgctgctcgtaccccagccacactgtttgcggtcatgtttgctatgtatataatctcaggactgactggcttcattggcctaaactctatagctgtcttgtgtaaccttgtcatggggttagcactgatatttctttgtacttgggcatatgttaaatactctggggagttcagagaaattggaacagtgattgatcagattgctgaaacactatgggaacaggtattgaagcccctgggtgataatttgatggaggaaaacataaggcagtctgtaacaaactctatcaaagcaggcctgactgaccaggtgtctcatcatgccagattaaagacagactgacagttcatctcctcacggactccactctctttttttttcatgcttgctgtacaatgagaactcaaataaaaataaaccaaagtttacaatcaactgtagaagtagtttagtgtaactggcttcacagatggctgccacagagtgtgaagattgtttgttagttttaagcattcttttaat

SEQ ID NO: 2643 - DNA, 1764 bp, Homo sapiens
  source 1..1764: mol_type = unassigned DNA
actgtggtgcgaattgatcgcatgaaatcctgattgaaaattttgatggtacttaagaaaggcataaagttttttcaaaggcttataaatagtaaaagcctacgatttggattctcaaagttggattggtggaaacaatgaaccattgacaggctttacatggcgaggtggctgtgaaagagaaacaacaggcatacaagtttggaatgaagtatttgtgattgacagacctaatggaactaaagttgctgtgctgcttatggatacccagggtgcctttgatagccagtcaactatcaaagactgtgcaacggtgtttgctctgagcactatgactagctctgtccaggtatataatctgtctcagaatattcaagaagatgatcttcaacatttgcaattatttacagagtatggaagacttgcgatggaagaaatctaccagaaaccatttcagacattaatgtttttgattcgagattggagctatccttatgaacattcatatggtttggaaggtggaaagcaatttcttgaaaagagattacaggtaaaacaaaatcaacatgaagagcttcagaatgtaaggaagcacatacacaattgtttctcaaatcttggttgcttccttttgccacatcctggtcttaaagttgcaactaatcctagttttgatgggagattgaaagatattgatgaagactttaaacgagagcttcgaaatctggttccattgctgcttgcccctgaaaatttggtagaaaaagagataagtggatctaaagtcacttgtagagatcttgtagaatattttaaggcttacatcaaaatctatcaaggagaagaacttccacatccaaagtccatgcttcaggcaacagctgaagctaataatcttgctgcagtagcaggagcaagagatacctattgtaaaagtatggaacaggtatgtggaggggacaagccttacattgcaccttcagatctggagcgaaaacacttggatctcaaggaagtggcgataaaacaatttcgttcagtaaaaaagatgggtggagatgagttctgccgtcgttatcaggaccagcttgaagctgaaattgaagaaacctatgcaaattttataaagcacaatgatggcaaaaatatcttctatgctgctcgtaccccagccacactgtttgcggtcatgtttgctatgtatataatctcaggactgactggcttcattggcctaaactctatagctgtcttgtgtaaccttgtcatggggttagcactgatatttctttgtacttgggcatatgttaaatactctggggagttcagagaaattggaacagtgattgatcagattgctgaaacactatgggaacagaggagtcccaggaaggtgttttccaaactgtttgaagttactagacgtcgaatggttcaccgtgctctttcatcagcacagcgacagagactgtcatccaacaataacaagaagaaaaattagacagtatttttaacctttttctctatctgaagtgttcacacttacacatgtaggacaataagcaggaccgtctgggccggtctgcataaatgctgtatacataccagatttgatgctgcatatagggtatggaattgcacatccatctcataggaattgtaaatggtttgaataagaggaaagtaatttttgttgcattataaaatgtctagtagcatcataagtttttttgagagaagcatctttttatttcccatattcct

SEQ ID NO: 2644 - DNA, 6938 bp, Homo sapiens
  source 1..6938: mol_type = unassigned DNA
atgaggaccgctggccgggacccagtgagcgcgggactacaattcccaaaggacggtagcactcagcgccccgccaacagggcccggttcgttcccgcccgcacccgtccctctcctctgcacccctgctgcttctgctttgaaggcggaggctccatgttgtcccctcagcgagtggcagcagctgcctcaagaggagcagatgatgccatggagagcagcaacatcctcttgcaggaccacatccgagatcttgatgtggtggtggtttcagtggctggtgccttccgaaagggcaagtccttcattctggattttatgctacgatacttatattctcagaaggaaagtggccattcaaattggttgggtgacccagaagaaccgttaacaggattttcctggagagggggatctgatccagaaaccactgggattcaaatctggagtgaagttttcactgtggagaagccaggtgggaagaaggttgcagttgttctgatggatacccagggggcatttgacagccagtcaactgtgaaagactgtgctaccatctttgctctaagcactatgactagttctgttcagatttataatttatctcagaacattcaagaagatgatcttcaacagctgcagctcttcacagaatacggtcgtctggcaatggatgaaattttccaaaagcctttccagacactgatgtttttggttagagattggagtttcccttatgaatatagctatggactccaaggaggaatggcatttttggataagcgtttacaggtgaaggaacatcaacatgaagaaattcagaatgttcgaaatcacattcactcatgtttctccgatgtcacctgctttctcttaccacatccaggactccaggtggccacaagccctgactttgatgggaaattaaaagatattgctggtgaattcaaagagcagttacaggcactgataccgtatgtattaaacccatctaagttaatggaaaaggagatcaatggctcaaaggtcacctgtcggggactactggagtattttaaggcatatattaaaatttatcaaggagaagatctgcctcaccccaagtccatgcttcaggccactgctgaagccaacaacttagcagctgcagcctctgccaaggacatttattataacaacatggaagaggtttgtgggggagagaaaccttatttgtctccagacattctagaggagaagcactgtgaattcaaacaacttgctctggaccattttaagaagaccaagaagatgggtgggaaggatttcagctttcgttaccagcaggagctggaggaggaaatcaaggaattatatgagaacttctgcaagcacaatggtagcaagaacgtcttcagcaccttccgaacccctgcagtgctgttcacgggcattgtagctttgtacatagcctcaggcctcactggcttcataggtcttgaggttgtagcccagttgttcaactgtatggttggactactgttaatagcactcctcacctggggctacatcaggtattctggtcaatatcgtgagctgggcggagctattgattttggtgccgcatatgtgttggagcaggcttcttctcatatcggtaattccactcaggccactgtgagggatgcagttgttggaagaccatccatggataaaaaagctcaatagcatcttaacgtgaagatcaaacaagaacacaacaagcccctactgatttctgggtttctgccacggccacaggttcatatccagaggaatggcagatctgagacgatccaggaagagctaaaacatggccctgtaataaatgagcagacctctcctgtggtttcaaattattaaacacacttccatttctcttggaagcatttcttttccttgctgttatagatgcaagcctgtgtctattttcatattactctgctttgtgcactttatggaggaggaagctagaggaaaaatggaaatgcagcttttaagttctttatgtgccacttagtgccttttaagattgattccatggttttgcacacacgatggggaggggatggaggataacctcatgaaaggtgccgttttcgggtgaaacttgacatttcttttatactttactcttttgagaaggattctttttttttttttttttttttttgagttggagtctcgctctgtcaccaggcttgagtgcagtggtgtgatcttggctcactgcaacctctgcctgccgggttcaagcagttctcctgcctcagcctcccaagtagctgggactacaggtgtacgccaccatacccagctaatttttttgtatttttagtagagatggggtttcaccatgttggccaggatggtcttggtctcttgaccttgtgatccgcctgcccgccttggcctcccaaagtgctgggattacaggcgtgagccaccgtgcccggccaagaaggattccttttttaaaagtttacagaacttggagaaacttcagaactaaagactaactgaaaatgatgtcattacactcaaaaaaaatttacaatagggaatcctgttgccacatagtgtggaaaaatcatgtcatatttaaatataccatactctgaaatgtgaggtttttacccagtaggctgacagttttgttgcaacttgctctattttttttttttttttggtccctatagcttctttctagaaaaagaggcaaacgtgccttgaaaagccagagtggctcataataaaaggaatgcgctagatacttcaagaaaaaagctaagtttaaatgaaccatgtgacctctgataagtcacttgaacttgtgccttggtcaggttcactgtaggtttacatatgtatgtatgttttacacaactcttgtaattgtcatttgaggggttttgtttttgagagttctgcataagaacagaactttattaaggattagagggaagatacaaatattactgcgtttaattgatgtctaatttcatgtggcttagcagcaattaataacctgatttaaggtctttattcagaatgttaatttgcattctctgccgtgtctaatgttcttaataatgaagctaaaattaacccattttatttagtgaattatctatttaattttactttggctagtctggtagctttaagatagctttgccttagcaaggatcaaagtcctacccaaatataaaaaatatctagaagtatctaagagttctttttttctatttaccttgattaggagataaaagttttatctgttagttgcttttccttttggaattattgtggattttaaaacttaaaacttgcctgcaagtatttatataaacattcaggtatataagccttaatttctaagataatttaacttttgttatgggagggaggtaagagtgtaaattttatatacatgaaggtaagatctgagtgtaaactttacatacatgaagtatgaatggaaggtagaaaaaaagtcccttttcgcatgtaatctctttatcaaagaattttcttttgacactttaccactgaagtatttttgtaagtcctaaattcgcagcatattgtttcatatttatatgccatcttgcaaatagttcttgctattttattcactgctgttacactttagaaaaattccagcttgtttacttgcatttatcagtgatgccaaccaagctttgactgttaacttgaaagcttgcttctgaaatgttggtgcattttcaggtgacctcttatctctctgaaagttcatacctattagcaggctctgtaaatattgacatacttagcttttaatacattctataagtaaatttatagatttcagaataacttaaaaaatttaatggtaagaaggggtgatgtgtcgaaaactcatactaaagtattaggtcactttaaaaaaagtgataatgtatgatttaatgaaatcttaagattcagttactatttaaattcaccatttctgttttggtcttataaagagaccttggtttaattatccagaggaagtcctcttcaccattttttttttttcttagttctgcttctggaaagtgttttataaagttttctcagtgagggttcttaagagttttctttggcctcttttctctcaacagtaaattgatgattttatatcagctttttcaataaaagatgcattatcattactggctataaatcatcctggggagatttataaccaggttaaaaataatatcttttacttctctcaccttttacttgtggttcagatgctcagactgtgcctgtttgcgtcgtgtctgttgctctgccgctttccatgcaggcatttttaattttacacaatcctaacaatatatggaactcattcctatgaatatataaaaggaggcttccaaaattttctattaaaatatttcaggataaattaagtgttgataatttgaaaaaataatttcaatgagctgcttatagtaaaaatggtagaatcagagttttcattctttgagaaatctttctgtaagattggctcatagataaaatgagacaaactactatgtatgataaaacaccttcagagtcatgccttgttttattttattttattttttgagacagaggtctcgctctgtcgcccaggttggagtgcagtggtgcaatctcgctcactgcaacctccacctcccaggttcaagcgattctcctgtctcagcttcctgagtagctgggactacaggtgtacaccaccacgcctggctaatttttgtttttttactagaggtggggttttgccatgttggccaggctggtctcaaactcctgacctcaggtgatccactccccccagcctcccaaagtgctgggattacaggcatgagccaccccgcccagctgagtcatgccttattttcgtagtataccaagaaatgttctatggaagtttacgttttaacacctcttttatacttggtaaaattgcctgtgtttcgctttattcctttttttttttgagacggactcttgtactgtcacccaggctgaagtgcagtggcgcaatcttggctcactacaacctccgcctcctgggttcaagtgattcttttgcctcagcctcccaagtagcagggattacaggcatgtgccaccacacccggcttatttttgtatttttagtagagacagggcttcgccatgttgaccaggctggtctcaactcctctgggaatccgcctgtcttggccttccagggtgctgggattacaggcgtgagccactggaacctggccttgttttgctttattttttctcttacatgaagtaaagcgctttggtcaaacacacaaaaatactgccttgtactggtggttggtttcattagtggatcacacacagtgttctacttggcttgtaaaatggtgccttggatagggtgagtttggataagtatgtatgtatgtatgagttatagcaaaattaagtagattgaatcaagtccatgcaaaagcaataaaacagttttaattttttaattttttaaaaattaaaactttaataaaacagtttttaattttttgctaggttcttttaaaaaatgatgtaacttacatggaagtcttcacaggacttttttctttcctggaactattgaaatgtaatttaggatgatttgatcttccatctcaagttgtcaacatggctgtgtcattctggcttacatatgttttatttaacaaaattctagtcaagggataagggcataatgaagacaagcttcagttatgaaagtacaaactatttgtgtgattaatttttaaaaatgacattaagaagcccattgtaaaataatatttgcagtcaaatggtttttcttgctgtaagtcctgttgtagctatgtttagggtagtggttctcatctaccttggagtgcataagacttacctagcaggcttgtttaaaaagttcagattcctagctttgtacccagggattgcctcaggtggtatgggctgtggtcctggagtcatcacttttataaatagtggttcagagaccacagagagagactgcttcatcgaatgggaagtaccaaggagaaagtacaattcagtattgtctggaggcaagtggacactttgtacctgaggtttagaataggtggtctcttgccagtacaatccccaggcgttttctgtgttcagaagtagtaagaatgcctttaattcagaggattatctaagctctttaaagctgtttttctccattgtcatagtgccttctctgaaaaatgaatgtacaggtatcctattttctaatgtaattaggattttttaaaagcaatttttgatagtttttcttttaaaaagtaaaattcagcactgtgacttgaacccccaaatctttcacatacaggtgaaacattaagccacaaataaaaataatgaacaagaaagaagacaagatcctaattcctgtcattagtgacctaagtaccccatatcagaaactttgcaaaacagatctagggacagaagggctttgaaagacatttttctttggggcaaatttcgtgtgccagaactacagtttaaatgtttttatgagcaagggaaggtagcattgattcccatagctttctaattagatacatgctgtcatggatgtaagccttaaaggagttaatactaatcttgtacatacacaaattttcctcaggtttttttattttaaaaaatgatttgttaaaagtactgtctgctagacccttgcctttgagtggctttgaaacttaatatagtttttaaaaagtgcaatgggatgagattatgctattagtatattaaaagcatgtttctgttttactccaatttgtaagatcatttaatggaataaagatcacaacacc

SEQ ID NO: 2645 - DNA, 7135 bp, Homo sapiens
  source 1..7135: mol_type = unassigned DNA
acacgcggcaggcggtggcgggattctgccgcgtgcgctttcccgccccgcctcgcctagcctcgtcctgcgctcgccacgcctcgggctgtccgttgggccacgcagaccgcgctgcgctcgctccgtcgcggctccgcgtgccccaccttctggctagttttttctagagcccaggctccgcccgtttcccgcttccagggcccggttcgttcccgcccgcacccgtccctctcctctgcacccctgctgcttctgctttgaaggcggaggctccatgttgtcccctcagcgagtggcagcagctgcctcaagaggagcagatgatgccatggagagcagcaagcctggtccagtgcaggttgttttggttcagaaagatcaacattcctttgagctagatgagaaagccttggccagcatcctcttgcaggaccacatccgagatcttgatgtggtggtggtttcagtggctggtgccttccgaaagggcaagtccttcattctggattttatgctacgatacttatattctcagaaggaaagtggccattcaaattggttgggtgacccagaagaaccgttaacaggattttcctggagagggggatctgatccagaaaccactgggattcaaatctggagtgaagttttcactgtggagaagccaggtgggaagaaggttgcagttgttctgatggatacccagggggcatttgacagccagtcaactgtgaaagactgtgctaccatctttgctctaagcactatgactagttctgttcagatttataatttatctcagaacattcaagaagatgatcttcaacagctgcagctcttcacagaatacggtcgtctggcaatggatgaaattttccaaaagcctttccagacactgatgtttttggttagagattggagtttcccttatgaatatagctatggactccaaggaggaatggcatttttggataagcgtttacaggtgaaggaacatcaacatgaagaaattcagaatgttcgaaatcacattcactcatgtttctccgatgtcacctgctttctcttaccacatccaggactccaggtggccacaagccctgactttgatgggaaattaaaagatattgctggtgaattcaaagagcagttacaggcactgataccgtatgtattaaacccatctaagttaatggaaaaggagatcaatggctcaaaggtcacctgtcggggactactggagtattttaaggcatatattaaaatttatcaaggagaagatctgcctcaccccaagtccatgcttcaggccactgctgaagccaacaacttagcagctgcagcctctgccaaggacatttattataacaacatggaagaggtttgtgggggagagaaaccttatttgtctccagacattctagaggagaagcactgtgaattcaaacaacttgctctggaccattttaagaagaccaagaagatgggtgggaaggatttcagctttcgttaccagcaggagctggaggaggaaatcaaggaattatatgagaacttctgcaagcacaatggtagcaagaacgtcttcagcaccttccgaacccctgcagtgctgttcacgggcattgtagctttgtacatagcctcaggcctcactggcttcataggtcttgaggttgtagcccagttgttcaactgtatggttggactactgttaatagcactcctcacctggggctacatcaggtattctggtcaatatcgtgagctgggcggagctattgattttggtgccgcatatgtgttggagcaggcttcttctcatatcggtaattccactcaggccactgtgagggatgcagttgttggaagaccatccatggataaaaaagctcaatagcatcttaacgtgaagatcaaacaagaacacaacaagcccctactgatttctgggtttctgccacggccacaggttcatatccagaggaatggcagatctgagacgatccaggaagagctaaaacatggccctgtaataaatgagcagacctctcctgtggtttcaaattattaaacacacttccatttctcttggaagcatttcttttccttgctgttatagatgcaagcctgtgtctattttcatattactctgctttgtgcactttatggaggaggaagctagaggaaaaatggaaatgcagcttttaagttctttatgtgccacttagtgccttttaagattgattccatggttttgcacacacgatggggaggggatggaggataacctcatgaaaggtgccgttttcgggtgaaacttgacatttcttttatactttactcttttgagaaggattctttttttttttttttttttttttgagttggagtctcgctctgtcaccaggcttgagtgcagtggtgtgatcttggctcactgcaacctctgcctgccgggttcaagcagttctcctgcctcagcctcccaagtagctgggactacaggtgtacgccaccatacccagctaatttttttgtatttttagtagagatggggtttcaccatgttggccaggatggtcttggtctcttgaccttgtgatccgcctgcccgccttggcctcccaaagtgctgggattacaggcgtgagccaccgtgcccggccaagaaggattccttttttaaaagtttacagaacttggagaaacttcagaactaaagactaactgaaaatgatgtcattacactcaaaaaaaatttacaatagggaatcctgttgccacatagtgtggaaaaatcatgtcatatttaaatataccatactctgaaatgtgaggtttttacccagtaggctgacagttttgttgcaacttgctctattttttttttttttttggtccctatagcttctttctagaaaaagaggcaaacgtgccttgaaaagccagagtggctcataataaaaggaatgcgctagatacttcaagaaaaaagctaagtttaaatgaaccatgtgacctctgataagtcacttgaacttgtgccttggtcaggttcactgtaggtttacatatgtatgtatgttttacacaactcttgtaattgtcatttgaggggttttgtttttgagagttctgcataagaacagaactttattaaggattagagggaagatacaaatattactgcgtttaattgatgtctaatttcatgtggcttagcagcaattaataacctgatttaaggtctttattcagaatgttaatttgcattctctgccgtgtctaatgttcttaataatgaagctaaaattaacccattttatttagtgaattatctatttaattttactttggctagtctggtagctttaagatagctttgccttagcaaggatcaaagtcctacccaaatataaaaaatatctagaagtatctaagagttctttttttctatttaccttgattaggagataaaagttttatctgttagttgcttttccttttggaattattgtggattttaaaacttaaaacttgcctgcaagtatttatataaacattcaggtatataagccttaatttctaagataatttaacttttgttatgggagggaggtaagagtgtaaattttatatacatgaaggtaagatctgagtgtaaactttacatacatgaagtatgaatggaaggtagaaaaaaagtcccttttcgcatgtaatctctttatcaaagaattttcttttgacactttaccactgaagtatttttgtaagtcctaaattcgcagcatattgtttcatatttatatgccatcttgcaaatagttcttgctattttattcactgctgttacactttagaaaaattccagcttgtttacttgcatttatcagtgatgccaaccaagctttgactgttaacttgaaagcttgcttctgaaatgttggtgcattttcaggtgacctcttatctctctgaaagttcatacctattagcaggctctgtaaatattgacatacttagcttttaatacattctataagtaaatttatagatttcagaataacttaaaaaatttaatggtaagaaggggtgatgtgtcgaaaactcatactaaagtattaggtcactttaaaaaaagtgataatgtatgatttaatgaaatcttaagattcagttactatttaaattcaccatttctgttttggtcttataaagagaccttggtttaattatccagaggaagtcctcttcaccattttttttttttcttagttctgcttctggaaagtgttttataaagttttctcagtgagggttcttaagagttttctttggcctcttttctctcaacagtaaattgatgattttatatcagctttttcaataaaagatgcattatcattactggctataaatcatcctggggagatttataaccaggttaaaaataatatcttttacttctctcaccttttacttgtggttcagatgctcagactgtgcctgtttgcgtcgtgtctgttgctctgccgctttccatgcaggcatttttaattttacacaatcctaacaatatatggaactcattcctatgaatatataaaaggaggcttccaaaattttctattaaaatatttcaggataaattaagtgttgataatttgaaaaaataatttcaatgagctgcttatagtaaaaatggtagaatcagagttttcattctttgagaaatctttctgtaagattggctcatagataaaatgagacaaactactatgtatgataaaacaccttcagagtcatgccttgttttattttattttattttttgagacagaggtctcgctctgtcgcccaggttggagtgcagtggtgcaatctcgctcactgcaacctccacctcccaggttcaagcgattctcctgtctcagcttcctgagtagctgggactacaggtgtacaccaccacgcctggctaatttttgtttttttactagaggtggggttttgccatgttggccaggctggtctcaaactcctgacctcaggtgatccactccccccagcctcccaaagtgctgggattacaggcatgagccaccccgcccagctgagtcatgccttattttcgtagtataccaagaaatgttctatggaagtttacgttttaacacctcttttatacttggtaaaattgcctgtgtttcgctttattcctttttttttttgagacggactcttgtactgtcacccaggctgaagtgcagtggcgcaatcttggctcactacaacctccgcctcctgggttcaagtgattcttttgcctcagcctcccaagtagcagggattacaggcatgtgccaccacacccggcttatttttgtatttttagtagagacagggcttcgccatgttgaccaggctggtctcaactcctctgggaatccgcctgtcttggccttccagggtgctgggattacaggcgtgagccactggaacctggccttgttttgctttattttttctcttacatgaagtaaagcgctttggtcaaacacacaaaaatactgccttgtactggtggttggtttcattagtggatcacacacagtgttctacttggcttgtaaaatggtgccttggatagggtgagtttggataagtatgtatgtatgtatgagttatagcaaaattaagtagattgaatcaagtccatgcaaaagcaataaaacagttttaattttttaattttttaaaaattaaaactttaataaaacagtttttaattttttgctaggttcttttaaaaaatgatgtaacttacatggaagtcttcacaggacttttttctttcctggaactattgaaatgtaatttaggatgatttgatcttccatctcaagttgtcaacatggctgtgtcattctggcttacatatgttttatttaacaaaattctagtcaagggataagggcataatgaagacaagcttcagttatgaaagtacaaactatttgtgtgattaatttttaaaaatgacattaagaagcccattgtaaaataatatttgcagtcaaatggtttttcttgctgtaagtcctgttgtagctatgtttagggtagtggttctcatctaccttggagtgcataagacttacctagcaggcttgtttaaaaagttcagattcctagctttgtacccagggattgcctcaggtggtatgggctgtggtcctggagtcatcacttttataaatagtggttcagagaccacagagagagactgcttcatcgaatgggaagtaccaaggagaaagtacaattcagtattgtctggaggcaagtggacactttgtacctgaggtttagaataggtggtctcttgccagtacaatccccaggcgttttctgtgttcagaagtagtaagaatgcctttaattcagaggattatctaagctctttaaagctgtttttctccattgtcatagtgccttctctgaaaaatgaatgtacaggtatcctattttctaatgtaattaggattttttaaaagcaatttttgatagtttttcttttaaaaagtaaaattcagcactgtgacttgaacccccaaatctttcacatacaggtgaaacattaagccacaaataaaaataatgaacaagaaagaagacaagatcctaattcctgtcattagtgacctaagtaccccatatcagaaactttgcaaaacagatctagggacagaagggctttgaaagacatttttctttggggcaaatttcgtgtgccagaactacagtttaaatgtttttatgagcaagggaaggtagcattgattcccatagctttctaattagatacatgctgtcatggatgtaagccttaaaggagttaatactaatcttgtacatacacaaattttcctcaggtttttttattttaaaaaatgatttgttaaaagtactgtctgctagacccttgcctttgagtggctttgaaacttaatatagtttttaaaaagtgcaatgggatgagattatgctattagtatattaaaagcatgtttctgttttactccaatttgtaagatcatttaatggaataaagatcacaacacca

SEQ ID NO: 2646 - DNA, 1180 bp, Homo sapiens
  source 1..1180: mol_type = unassigned DNA
gcctccgatcctgagcctccgagcctttgcagtgcaatgtcccgcctgctgcatgcagaagagtgggctgaagtgaaggagttgggagaccaccatcgccagccccagccgcatcatctcccgcaaccgccgccgccgccgcagccacctgcaactttgcaggcgagagagcatcccgtctacccgcctgagctgtccctcctggacagcaccgacccacgcgcctggctggctcccactttgcagggcatctgcacggcacgcgccgcccagtatttgctacattccccggagctgggtgcctcagaggccgctgcgccccgggacgaggtggacggccggggggagctggtaaggaggagcagcggcggtgccagcagcagcaagagccccgggccggtgaaagtgcgggaacagctgtgcaagctgaaaggcggggtggtggtagacgagctgggctgcagccgccaacgggccccttccagcaaacaggtgaatggggtgcagaagcagagacggctagcagccaacgccagggagcggcgcaggatgcatgggctgaaccacgccttcgaccagctgcgcaatgttatcccgtcgttcaacaacgacaagaagctgtccaaatatgagaccctgcagatggcccaaatctacatcaacgccttgtccgagctgctacaaacgcccagcggaggggaacagccaccgccgcctccagcctcctgcaaaagcgaccaccaccaccttcgcaccgcggcctcctatgaagggggcgcgggcaacgcgaccgcagctggggctcagcaggcttccggagggagccagcggccgaccccgcccgggagttgccggactcgcttctcagccccagcttctgcgggagggtactcggtgcagctggacgctctgcacttctcgactttcgaggacagcgccctgacagcgatgatggcgcaaaagaatttgtctccttctctccccgggagcatcttgcagccagtgcaggaggaaaacagcaaaacttcgcctcggtcccacagaagcgacggggaattttccccccattcccattacagtgactcggatgaggcaagttaggaaggtgacagaagcctgaaaactgagacagaaacaaaactgccctttcccagtgcgcgggaagccccgcggttaaaga

SEQ ID NO: 2647 - DNA, 1486 bp, Homo sapiens
  source 1..1486: mol_type = unassigned DNA
tctgcactctccgacagctactgcgctaaaagcgctccttccctgagcttcgggaaagagttcatcttcctgcaaaggagtctcaggctttcccagaggacttgaaaggccttcctcgaaccagccacaccaaactctgctgcagaaggtttccttctctttttcaacttcatgttgagaaaatgactttctcttgagcatctcattttcccctaaatttgggcaagtgaagagatatcagcctggtcatccagtagaacagaaggccgagtcccgcactcccccactgtaaactatttgattgcacgtgagttgctttgtttatgacttatttgctcagaagaggcacgttgggaagcggctcgagagaccagcccacgcgcaggtcctgagcgggcgggcgtgcgaggtcggcgcctcgctgcttggggccggggatgaagtcctgcaagcccagcggcccgccggcgggagcgcgcgttgcacccccgtgcgcgggcggcaccgagtgcgcgggcacgtgcgccggggccgggcggctggagagcgcggcgcgcaggcgcctggcggccaacgcgcgcgagcgccgccgcatgcaggggctcaacactgccttcgaccgcttacgcagggtggttccccagtggggccaggataaaaagctgtccaagtacgagaccctgcagatggccctgagctacatcatggctctgacccggatcctggccgaggccgagcgattcggctcggagcgggactgggtgggtctccactgtgagcacttcggccgcgaccactacctcccgttcccgggcgcgaagctgccgggcgagagcgagctgtacagccagagactcttcggcttccagcccgagcccttccagatggccacctagggcgcgcgcctccgcgggggtgggtgtccggcagccgctccgagcctcggccctgccccaagtagcccagaagcctccggcggcccaggattctaaggatgcaatcctcgaggaaaattagtcgattctcagattacctttattcgcatcatcagacctatggacgcaatcatttaattgcctttcttttcccctcctcctttgtattttgtagatttcattaatggatcttgtgaatgggttgattgctgtgaaaataatgccccctttccccttttctgggctactttgagggaaaacaatcttaagaaaaataggattaagctattctgttccagtcctcagagaaataatcactttcttaaactttgtgagtttgtcctgttcgggtgaagttacagtatccattacttgtgtttgctcacaacagagctaccttcctgttgtgtaaatgcgtttttgctttagtgcattgtgtgtgcaagcatgaagtagaaacactttttttttctgggtacagtacatgggtatcggtgctctgtatttttttaaactgtgtacacattattaaaatatacattttataaaat

SEQ ID NO: 2648 - DNA, 1490 bp, Homo sapiens
  source 1..1490: mol_type = unassigned DNA
gggaggttgagggctctgaggaggcgttgagaggtttccgtacagcccgaccgtgcggctttggggatcccatcgctctgtgtttcctgctccaggtttcgcgtctcgcatcttcccagaccctcgggcgcgatgtggaggagctgcctccggctgcgggacgggggacgccgtctcctgaatcggccggcgggtggccccagcgcttctatgagtccggggccaaccatcccgtctccagcccgggcttacgccccgccgacagaaaggaagaggttttatcagaatgtcagcatcacacagggtgaaggtggctttgagataaacctggaccacaggaagctgaaaactccccaagccaagctctttaccgtccccagcgaggccctggccattgcagtggctactgagtgggattcccagcaggataccatcaagtactacaccatgcacctgaccacattgtgcaacacatcattggacaacccaacccagagaaacaaggatcagctgatccgggcagccgtgaagtttctggacaccgacaccatctgctacagggtggaggagcccgagacattagtggaacttcaaaggaatgagtgggatccaatcatcgaatgggctgagaaaagatacggcgtggagatcagctcctccaccagcataatgggacccagcatccctgccaaaactcgggaggtgctcgtcagccacctggcatcttacaacacatgggctttacaaggcatggattgagtttgtagctgcccagctcaagtccatggtgctaaccttgggcctgattgacctgcgcctgacagtggagcaggccgtgctgctgtcacgcctggaggaggagtaccagatccagaagtggggcaacattgagtgggcccatgactatgagctgcaggagctgcgggcccgcaccgccgccggcaccctcttcatccatctctgctccgagagcaccacagtcaagcacaagctcctgaaggagtgaggcctgggcagagcacactcagcaggatagaggcagtgcagccacagctcccccggccttcagggctccccagcctgtggggctggcttccttggcttttggggactcggcctcagcgtcaccctgagattccccccgagacacagtgcgctagtacggctgtccggaggtcagcctgatttcaacccaggtgcccctggcctggccagcagtgaatgtaggagatgaattgtgcaagtgactttctctcgactctgattttattaaatatttctccaccctggaaatgtgctgagccctgttttcacgtatgcctctgcacttctccattcttcctgttttgtctaggttccagagggttaaacagcttatctcccatggcgtgtttggatatctgctgcctgtggtcaggaaccttgcactggggaaacaatcatgtaatccacagacaactctatttgtgttcttcagcctcagcctgaag

SEQ ID NO: 2649 - DNA, 685 bp, Homo sapiens
  source 1..685: mol_type = unassigned DNA
gcgcaggaggcgcgcggcggcgacggcgcgccgtttcgcgtctcgcatcttcccagaccctcgggcgcgatgtggaggagctgcctccggctgcgggacgggggacgccgtctcctgaatcggccggcgggtggccccagcgcttctatgagtccggggccaaccatcccgtctccagcccgggcttacgccccgccgacagaaaggaagaggttttatcagaatgtcagcatcacacagggtgaaggtggctttgagataaacctggaccacaggaagctgaaaactccccaagccaagctctttaccgtccccagcgaggccctggccattgcagtggctactgagtgggattcccagcaggataccatcaagtactacaccatgcacctgaccacattgtgcaacacatcattggacaacccaacccagagaaacaaggatcagctgatccgggcagccgtgaagtttctggacaccgacaccatctgctacagggtggaggagcccgagacattagtggaacttcaaaggaatgagtgggatccaatcatcgaatgggctgagaaaagatacggcgtggagatcagctcctccaccagcataatgggacccagcatccctgccaaaactcgggaggtgctcgtcagccacctggcatcttacaacacatgggctttacaag

SEQ ID NO: 2650 - DNA, 1310 bp, Homo sapiens
  source 1..1310: mol_type = unassigned DNA
gcggaagatggcggcgtccaagggaggttgagggctctgaggaggcgttgagaggtttccgtacagcccgaccgtgcggctttggggatcccatcgctctgtgtttcctgctccaggtttcgcgtctcgcatcttcccagaccctcgggcgcgatgtggaggagctgcctccggctgcgggacgggggacgccgtctcctgaatcggccggcgggtggccccagcgcttctatgagtccggggccaaccatcccgtctccagcccgggcttacgccccgccgacagaaaggaagaggttttatcagaatgtcagcatcacacagggtgaaggtggctttgagataaacctggaccacaggaagctgaaaactccccaagccaagctctttaccgtccccagcgaggccctggccattgcagtggctactgagtgggattcccagcaggataccatcaagtactacaccatgcacctgaccacattgtgcaacacatcattggacaacccaacccagagaaacaaggatcagctgatccgggcagccgtgaagtttctggacaccgacaccatctgctacagggtggaggagcccgagacattagtggaacttcaaaggaatgagtgggatccaatcatcgaatgggctgagaaaagatacggcgtggagatcagctcctccaccagcataatgggacccagcatccctgccaaaactcgggaggtgctcgtcagccacctggcatcttacaacacatgggctttacaagggattgagtttgtagctgcccagctcaagtccatggtgctaaccttgggcctgattgacctgcgcctgacagtggagcaggccgtgctgctgtcacgcctggaggaggagtaccagatccagaagtggggcaacattgagtgggcccatgactatgagctgcaggagctgcgggcccgcaccgccgccggcaccctcttcatccatctctgctccgagagcaccacagtcaagcacaagctcctgaaggagtgaggcctgggcagagcacactcagcaggatagaggcagtgcagccacagctcccccggccttcagggctccccagcctgtggggctggcttccttggcttttggggactcggcctcagcgtcaccctgagattccccccgagacacagtgcgctagtacggctgtccggaggtcagcctgatttcaacccaggtgcccctggcctggccagcagtgaatgtaggagatgaattgtgcaagtgactttctctcgactctgattttattaaatatttctccaccctggaaa

SEQ ID NO: 2651 - DNA, 1789 bp, Homo sapiens
  source 1..1789: mol_type = unassigned DNA
gagcaggcggctgcggttgctgcagccttcagtctccacccggactacgccatgttggggtttgtgggtcgggtggccgctgctccggcctccggggccttgcggagactcaccccttcagcgtcgctgcccccagctcagctcttactgcgggccgctccgacggcggtccatcctgtcagggactatgcggcgcaaacatctccttcgccaaaagcaggcgccgccaccgggcgcatcgtggcggtcattggcgcagtggtggacgtccagtttgatgagggactaccaccaattctaaatgccctggaagtgcaaggcagggagaccagactggttttggaggtggcccagcatttgggtgagagcacagtaaggactattgctatggatggtacagaaggcttggttagaggccagaaagtactggattctggtgcaccaatcaaaattcctgttggtcctgagactttgggcagaatcatgaatgtcattggagaacctattgatgaaagaggtcccatcaaaaccaaacaatttgctcccattcatgctgaggctccagagttcatggaaatgagtgttgagcaggaaattctggtgactggtatcaaggttgtcgatctgctagctccctatgccaagggtggcaaaattgggctttttggtggtgctggagttggcaagactgtactgatcatggagttaatcaacaatgtcgccaaagcccatggtggttactctgtgtttgctggtgttggtgagaggacccgtgaaggcaatgatttataccatgaaatgattgaatctggtgttatcaacttaaaagatgccacctctaaggtagcgctggtatatggtcaaatgaatgaaccacctggtgctcgtgcccgggtagctctgactgggctgactgtggctgaatacttcagagaccaagaaggtcaagatgtactgctatttattgataacatctttcgcttcacccaggctggttcagaggtgtctgcattattgggccgaatcccttctgctgtgggctatcagcctaccctggccactgacatgggtactatgcaggaaagaattaccactaccaagaagggatctatcacctctgtacaggctatctatgtgcctgctgatgacttgactgaccctgcccctgctactacgtttgcccatttggatgctaccactgtactgtcgcgtgccattgctgagctgggcatctatccagctgtggatcctctagactccacctctcgtatcatggatcccaacattgttggcagtgagcattacgatgttgcccgtggggtgcaaaagatcctgcaggactacaaatccctccaggatatcattgccatcctgggtatggatgaactttctgaggaagacaagttgaccgtgtcccgtgcacggaaaatacagcgtttcttgtctcagccattccaggttgctgaggtcttcacaggtcatatggggaagctggtacccctgaaggagaccatcaaaggattccagcagattttggcaggtgaatatgaccatctcccagaacaggccttctatatggtgggacccattgaagaagctgtggcaaaagctgataagctggctgaagagcattcatcgtgaggggtctttgtcctctgtactgtctctctccttgcccctaacccaaaaagcttcatttttctgtgtaggctgcacaagagccttgattgaagatatattctttctgaacagtatttaaggtttccaataaaatgtacacccctcagaa

SEQ ID NO: 2652 - DNA, 3665 bp, Homo sapiens
  source 1..3665: mol_type = unassigned DNA
gattggcaggtccgcacgccccgcctcttccgcttctgtggtctgatcttcctgcggctgaaccgcccggctgagccgacattgccggcgtcttggcgattcggcccgacgagctccgctttcgctacagcatggtggcctactggagacaggctggactcagctacatccgatactcccagatctgtgcaaaagcagtgagagatgcactgaagacagaattcaaagcaaatgctgagaagacttctggcagcaacgtaaaaattgtgaaagtaaagaaggaataatctaccctgactaaagcttgaaatgctacatttccaaggtgaagatgtgtgggcacatgttatggcagattgaaaaggatctcattccatgggaaaaaaaaaaatcctgtcttgttcataaattgacaatgtcaataaattgaaatatggttcactgttactcttgattttagtttgtgagactttttcattttctttaaaggaactgtctgcacagctgcatgattatggccatgtgaaccagggtttcttaaaagcaggggaagccagatttaatatttagtgaccaaagggatacagaaagcattttgaaaatgtctcaaaatagttgtttcatgacattaattggtgatcaaaattatctgctgtcattgaggcttcgtagtcccttatttttgaattgttgtcatgtcagaataatgacatggttatcagtaacaaatggaaataattattaaatactaaaagtgtagattagaagaagaaatactaaattgtacttgttttgtattgtgcacttaaagcctatagataagaacggttacagaatttaagcacaaagtgtttttcacattgttttgtaaatgaatctttatactctggtagcatttctcataggaaatgaggcaaagctattgaataacttgctcattgagttgatggccaaactgaaattaaaacctaggagttttgactgcaagtctgggacacggtgaccacaacagcagtttcgtggtatttccatagtgattcattcattcattatttagggatgaaaaattgttgcaagttatgtttttatctttctttgaaacttgaaagggcttgggcaagtaaaacaccattgcaaagttaactgcctgattttaactgtttttggagactggagaaataaatttgaactggaaattttgacacaccattctaggatcagttctcacatggtacttaagctcacaatgatttatcagggccactgtcagcaatgccgaggataagccgaaaagaacatctttgttctcggcttctgggaatgacttattgtcccgacacttgacctgtaggttttactgaattctcagcacagagcgagcagggaggcagagccaattgagtggaagagggtgcctctggaaaccagcaggttaggagcccttggagtcctccgcctcggagctgtcatcctgctgttggcaagttagggcacctcagttcagtgctgtggcccccaagattaaggtactaggaagtatcctccattacagggaacaggaataaatgaatcaaaaagctatcgggcctttttgacatgggacgaataaagtaactaataggcaaaggggctaaatgatttccagtcaagtaattagagataagtcatttattaaggaggcagatggggtattattggtatatagatggcatagtagattgctagtatattggtagattattggtatatagatggtatgttaaggaggcagatggggtattactggtatatagatggtatggtagattggtagtatattggcagattattggtatatggtatgttgaggcagatggggtattactggtatatagatggcatagtagattggtagtatattggtagattattggtatagagatggtatattattaaggaggcagatggggtaattagaggtgagacttagggacagggcttgtgatatggaaaggagtgaagtcactgagtaaaagacaagtttactgtcagcagagattcttagaggctcttttctccgtgattaaaaaaaaatcctaaaccagtagtataataaacttcctgcctccagcagtgctgggtagctggcaggatgactgtgcccagtgatgaggtgaccccagtcagaccaacttaatgagtatcccactaattagttggatgatgtttgaagctgtcagttaatctcttagttcacatcgttcttgtgagcaaagtgaaggaatcggataagctctaaatttcggtgatgctgctgctctgagagaccaaggtcgctggagcaaccgtactgctaaaggataagctcttcaaaatcaaaagggacagatttcttaagtttctagtttgttttgtgtttttacatctatttctaccatacgaaagagtaggatggtgagatgcatttctaaatatttttaactactcagtctggatggttaggcttcaagaaaaggaatttatttagtctgaaataaagcaattttgccatttaaaattgaattactttgtagtttaatgattactattgagcaaacaaatctttacagtaatataagtcagcaaaagttttttaaaaggtttaaatccctccttccttacatctatttcattgcttttttaggtttgggaagtaaagcaccagaggaagcatgtgtaaatccttgtataatcgcaggctgtaagtctttagcatctcaggaagttactaacttcaaactaagtatataggtagagtttcttactaaatctagtgcttcttgaaccacaagtagaaagcatttaaaacatgaatgttgttttgtgttttttgaagtttgtaaatagaagacttgttgatgatccgatggcaaggtatttttctcttggtatgtattttagttatttcctcgtgatgcataagtgaaaagagtgaagtttctcagaatgagcaactgtcatccatctacctgctattttattattgctgattacaaaagcaaatcaagagatgagaacccagttgcctgcaagtaaatatttactgcattgagggtcggagcattttcccattaccggttatccatggatcaaatagtgtatctcagtggtaattctagagggccattaaaaccctgatggtgctggaagagatggcagtgctgcatgtcagaaataggtaaactgtaattaagaagttacagatgatttgattacgctcttgtgtatttggtcctgttataatgtgagcagattaaaatcatgtagtgcttaaagctatgtcattatgcaaacatttatggcaacttctgcaaattaatttgaactgtaaaagttccctaatgagacgatgtcctccataactgagaaggacactgcagccattgctgcttaattcctgcatttgaatggttgccgagcgcatggtgtgccctttctcaaagagcagagaggctgcagagcattttggggggtgatgactgaatgaaagtgaaaagaccatttcaaaatagcctttaaaaggaaagccaaggatgattattaatgaattcctgggatctaacagtagtaagaaatttaaactatataaacatatatgttaaaggctagctcttcagaaataaagatcagaagactgcagttcttta

SEQ ID NO: 2653 - DNA, 1878 bp, Homo sapiens
  source 1..1878: mol_type = unassigned DNA
gtggtctgatcttcctgcggctgaaccgcccggctgagccgacattgccggcgtcttggcgattcggcccgacgagctccgctttcgctacagcatggtggcctactggagacaggctggactcagctacatccgatactcccagatctgtgcaaaagcagtgagagatgcactgaagacagaattcaaagcaaatgctgagaagacttctggcagcaacgtaaaaattgtgaaagtaaagaaggaataatctgtaagttatggatttatttagaagaacagttgcatcttaagtttttggagcaccataaagatcaaaataattttagttttgggttctattcattttttagtcagtgtatttggaagttagttattgggatggtataatttaaagcatgcaggttatagaagtcccctggcctaataaaaagaaagtcttcttgggccctgacaagcagaagtaattggcacattgattttcagttcatttagcaatgcttaggtagagagccatcgtatttgaattaaacctgtttcatttgtctgcacaaatcaaataatttggaggatgaactccccacttgtataattgcaattggagttacataacagtccaagagcatgaaaaactacagttctttacatttttatttcccccacaaccactaatgttctcacaaatcactacttcccgaacataataactacaggcacaggcaagggtcctgctgttgtatcaagcaataaaatctgcaagaccccgcagcgaatactgttttgctaatttattatgctttcagagggtttggttcattttacttttccaaagatgttggtgatgtaaagttaaattctcgtgaaataaaaaggtctgtacagttgataagtgtagacttttgtgttccacattataaaagtggtttgatctctaaagtactttcttgacattgttatttcaaaagtaggcaaggcaaattatcagagagatgtttttcagatttaatttttcttgttttgcttttaaaaagcttcagacccataatagcacagaaatgtgataaatattaatcctttggcagcttatggttatgagcaattttacttattggaactgtctcccctaagcacttttcattttcattttgaattagtaaatattttattacaagtctggagatgcagtgttttgaatttagccctttttctaggggctctctgtctaatctcataattctgagtaatgagacctggttttatgttgggttgttttgttttaacagtaagctaacagaaaatcatttagcctcactcggctcagagctgccagactgcatctaatgctgagattttgcaaagtcctgggggtcaggaagtagtgtccgatccccttaaacaaagcattagcccctctctgttatgcccttcagggttacagaccccacctcattagcacaaggagatgttagtgtcttttaaaggcaaagtagtttctttattctgggagagtgtttacttttactcagcaggaaaatgcctgcttgactaagcctgtgtacttgaaccagcactttttacatctgagccacggcaatgtgaatgatagccacagttatacagttcactataaggaagttatttcttatattcatgttgagtttttaagaaaacacagagaactagccagcaacttgcattttctttttcctcctagaccctgactaaagcttgaaatgctacatttccaaggtgaagatgtgtgggcacatgttatggcagattgaaaaggatctcattccatgggaaaaaaaaaaatcctgtcttgttcataaattgacaatgtcaataaattgaaatatggttcactgttactcttga

SEQ ID NO: 2654 - DNA, 697 bp, Homo sapiens
  source 1..697: mol_type = unassigned DNA
tcttggcgattcggcccgacgagctccgctttcgctacagcatggtggcctactggagacaggctggactcagctacatccgatactcccagatctgtgcaaaagcagtgagagatgcactgaagacagaattcaaagcaaatgctgagaagacttctggcagcaacgtaaaaattgtgaaagtaaagaaggaataatctgtttgggaagtaaagcaccagaggaagcatgtgtaaatccttgtataatcgcaggctgtaagtctttagcatctcaggaagttactaacttcaaactaagtatataggtagagtttcttactaaatctagtgcttcttgaaccacaagtagaaagcatttaaaacatgaatgttgttttgtgttttttgaagtttgtaaatagaagacttgttgatgatccgatggcaaggtatttttctcttggtatgtattttagttatttcctcgtgatgcataagtgaaaagagtgaagtttctcagaatgagcaactgtcatccatctacctgctattttattattgctgattacaaaagcaaatcaagagatgagaacccagttgcctgcaagtaaatatttactgcattgagggtcggagcattttcccattaccggttatccatggatcaaatagtgtatctcagtggtaattctagagggccattaaaaccctgatgg

SEQ ID NO: 2655 - DNA, 1078 bp, Homo sapiens
  source 1..1078: mol_type = unassigned DNA
ctgaccgaccttcagcagggctgtggctaccatgttctctcgcgcgggtgtcgctgggctgtcggcctggaccttgcagccgcaatggattcaagttcgaaatatggcaactttgaaagatatcaccaggagactaaagtccatcaaaaacatccagaaaattaccaagtctatgaaaatggtagcggcagcaaaatatgcccgagctgagagagagctgaaaccagctcgaatatatggattgggatctttagctctgtatgaaaaagctgatatcaaggggcctgaagacaagaagaaacacctccttattggtgtgtcctcagatcgaggactgtgtggtgctattcattcctccattgctaaacagatgaaaagcgaggttgctacactaacagcagctgggaaagaagttatgcttgttggaattggtgacaaaatcagaggcatactttataggactcattctgaccagtttctggtggcattcaaagaagtgggaagaaagccccccacttttggagatgcgtcagtcattgcccttgaattactaaattctggatatgaatttgatgaaggctccatcatctttaataaattcaggtctgtcatctcctataagacagaagaaaagcccatcttttcccttaataccgttgcaagtgctgacagcatgagtatctatgacgatattgatgctgacgtgctgcaaaattaccaagaatacaatctggccaacatcatctactactctctgaaggagtccaccactagtgagcagagtgccaggatgacagccatggacaatgccagcaagaatgcttctgagatgattgacaaattgacattgacattcaaccgtacccgccaagctgtcatcacaaaagagttgattgaaattatctctggtgctgcagctctgtaaagaaggaaaattcagccagttgattttgtttttagcttactgctgcctttgtccgaagaaactgttcctccattatttgaattactgaagacagcaagatatttgtaaattatcttaaaataaacaacttaaaataaaatcattgtttttctt

SEQ ID NO: 2656 - DNA, 1163 bp, Homo sapiens
  source 1..1163: mol_type = unassigned DNA
tgggaggggcgcgctggggagcttcggcgcatgcgcgctgaggcctgcctgaccgaccttcagcagggctgtggctaccatgttctctcgcgcgggtgtcgctgggctgtcggcctggaccttgcagccgcaatggattcaagttcgaaatatggcaactttgaaagatatcaccaggagactaaagtccatcaaaaacatccagaaaattaccaagtctatgaaaatggtagcggcagcaaaatatgcccgagctgagagagagctgaaaccagctcgaatatatggattgggatctttagctctgtatgaaaaagctgatatcaaggggcctgaagacaagaagaaacacctccttattggtgtgtcctcagatcgaggactgtgtggtgctattcattcctccattgctaaacagatgaaaagcgaggttgctacactaacagcagctgggaaagaagttatgcttgttggaattggtgacaaaatcagaggcatactttataggactcattctgaccagtttctggtggcattcaaagaagtgggaagaaagccccccacttttggagatgcgtcagtcattgcccttgaattactaaattctggatatgaatttgatgaaggctccatcatctttaataaattcaggtctgtcatctcctataagacagaagaaaagcccatcttttcccttaataccgttgcaagtgctgacagcatgagtatctatgacgatattgatgctgacgtgctgcaaaattaccaagaatacaatctggccaacatcatctactactctctgaaggagtccaccactagtgagcagagtgccaggatgacagccatggacaatgccagcaagaatgcttctgagatgattgacaaattgacattgacattcaaccgtacccgccaagctgtcatcacaaaagagttgattgaaattatctctggtgctgcagctctggattaatgaaaatcaagttccatcctcagacaagaggtaaagaaggaaaattcagccagttgattttgtttttagcttactgctgcctttgtccgaagaaactgttcctccattatttgaattactgaagacagcaagatatttgtaaattatcttaaaataaacaacttaaaataaaatcattgtttttctt

SEQ ID NO: 2657 - DNA, 907 bp, Homo sapiens
  source 1..907: mol_type = unassigned DNA
ctgaccgaccttcagcagggctgtggctaccatgttctctcgcgcgggtgtcgctgggctgtcggcctggaccttgcagccgcaatgtcaccaggagactaaagtccatcaaaaacatccagaaaattaccaagtctatgaaaatggtagcggcagcaaaatatgcccgagctgagagagagctgaaaccagctcgaatatatggattgggatctttagctctgtatgaaaaagctgatatcaaggggcctgaagacaagaagaaacacctccttattggtgtgtcctcagatcgaggactgtgtggtgctattcattcctccattgctaaacagatgaaaagcgaggttgctacactaacagcagctgggaaagaagttatgcttgttggaattggtgacaaaatcagaggcatactttataggactcattctgaccagtttctggtggcattcaaagaagtgggaagaaagccccccacttttggagatgcgtcagtcattgcccttgaattactaaattctggatatgaatttgatgaaggctccatcatctttaataaattcaggtctgtcatctcctataagacagaagaaaagcccatcttttcccttaataccgttgcaagtgctgacagcatgagtatctatgacgatattgatgctgacgtgctgcaaaattaccaagaatacaatctggccaacatcatctactactctctgaaggagtccaccactagtgagcagagtgccaggatgacagccatggacaatgccagcaagaatgcttctgagatgattgacaaattgacattgacattcaaccgtacccgccaagctgtcatcacaaaagagttgattgaaattatctctggtgctgcagctctgtgagtaattgtagattgtcg

SEQ ID NO: 2658 - DNA, 932 bp, Homo sapiens
  source 1..932: mol_type = unassigned DNA
cagatgcagtcgaagccctgtggctccaccccgagggtccagcccttaccactgctaagaactacaactcccagcccgagggaggtctctgcgcctgcggcctgacgccctacgcctacacttcccagagaacctagcggttacgccaacgcgcgcgtgcgcccttgcgcgtttctctcttcccactcgggtttgacctacagccgcccgggagaagatggctgccccagcagtgtccgggctctcccggcaggtgcgatgcttcagtacctctgtggtcagaccatttgccaagcttgtgaggcctcctgttcaggtatacggtattgaaggtcgctatgccacagctctttattctgctgcatcaaaacagaataagctggagcaagtagaaaaggagttgttgagagtagcacaaatcctgaaggaacccaaagtggctgcttctgttttgaatccctatgtgaagcgttccattaaagtgaaaagcctaaatgacatcacagcaaaagagaggttctctcccctcactaccaatctgatcaatttgcttgctgaaaatggtcgattaagcaatacccaaggagtcgtttctgccttttctaccatgatgagtgtccatcgcggagaggtaccttgcacagtgacctctgcatctcctttagaagaagccacactctctgaattaaaaactgtcctcaagagcttcctaagtcaaggccaagtattgaaattggaggctaagactgatccgtcaatcttgggtggaatgattgtgcgcattggcgagaaatatgttgacatgtctgtcaagaccaagattcagaagctgggcagggctatgcgggagattgtctaaaagtgttggttttctgccatcagtgaaaattcttaaacttggagcaacaataaaaagcttccagaacagatca

SEQ ID NO: 2659 - DNA, 598 bp, Homo sapiens
  source 1..598: mol_type = unassigned DNA
ccaatgagaatggagaaggtccaggacacgtgggtgggggaagctgagcgctgagaccaagggctaaagctgggagactgaaaaaatgcagaccgccggggcattattcatttctccagctctgatccgctgttgtaccaggggtctaatcaggcctgtgtctgcctccttcttgaatagcccagtgaattcatctaaacagccttcctacagcaacttcccactccaggtggccagacgggagttccagaccagtgttgtctcccgggacattgacacagcagccaagtttattggtgctggggcagccacagttggtgtggctggttcaggggctggcattggaaccgtgtttggcagcttgatcattggctatgccaggaacccgtctctcaagcagcagctcttctcctatgccattcttggctttgccctgtctgaggccatggggcttttctgtttgatggtcgccttcctcatcctcttcgccatgtgaggctccatgggggggtcaccggcctgttgctactgcaactccacaccattcttggtgctggggtgtgttaagctttaccattaaacacaacgtttctctaaa

SEQ ID NO: 2660 - DNA, 614 bp, Homo sapiens
  source 1..614: mol_type = unassigned DNA
gagaccaagggctaaagctgggaggtgagtctgtcaccttgagccgggcgagcgctgtgggccaagcaggggttgcagggtagtaggagtgcagactgaaaaaatgcagaccgccggggcattattcatttctccagctctgatccgctgttgtaccaggggtctaatcaggcctgtgtctgcctccttcttgaatagcccagtgaattcatctaaacagccttcctacagcaacttcccactccaggtggccagacgggagttccagaccagtgttgtctcccgggacattgacacagcagccaagtttattggtgctggggcagccacagttggtgtggctggttcaggggctggcattggaaccgtgtttggcagcttgatcattggctatgccaggaacccgtctctcaagcagcagctcttctcctatgccattcttggctttgccctgtctgaggccatggggcttttctgtttgatggtcgccttcctcatcctcttcgccatgtgaggctccatgggggggtcaccggcctgttgctactgcaactccacaccattcttggtgctggggtgtgttaagctttaccattaaacacaacgtttctcta

SEQ ID NO: 2661 - DNA, 1792 bp, Homo sapiens
  source 1..1792: mol_type = unassigned DNA
attcctgtaatggcgtcgctcggggtcccgggaaattgctccgtgggctttcagcggcggtttttatcgccggccggggtgtgcctgtctgcggctcgcctctcctccgggaccgtaaagctgctgccgtgatttatcctccccttctcccaaatccgattaaatggaggagctcggggccggggcgccgcggggcccgggagccgggagggggcggcgggaaggacggggccaaggaggggaggacaaacggcccctcagagagtggcggatttgcctttatttacagccgcggctttctttttattttttattttttatggggtttggtgagcttttcccgtctttctcgtgctgcgttcaagcacgatgcagggacggcaggggtttggaactggataggccttgtcgccctgttccaaagggcagggcaggtcctgtctgggagacaaggaggcctaggaaagatgagggccaggaagcctcccccacctccttccatcaggggaagggcgagcgaaaggggagagaaaacccacgttcaggagagcatgggggcgggaggggagggcgctgcttatcccaactcgcgtagttgaaacctgagcagaggctcgggcaagcctggagtgacctcgcaaccttacagcgggtcgcaggtgcccgttattcctagactgtcccaggagccaggaaagagggattcggatcatatttaaccctatcttctggctcgctgatgctgcttctctcatggtttatcaccggaatggaaaggaggaaacggggagtgggggaaagggcgaagccaccagaagcagctgcggcattttgctgactattcgcccatggagccggtttgccatccagtgatgccagagtcccggcgcgacagaaagcaggactcccaagatcttcctcctgctgcattttaggcactgaaccccaatcccgaccgtatgttaacactgaattctgagtaggagttttgttttggcagtgtgacgactgcgcatgctcggaaaggggacgcaagtccgagatcccaaacgcggtacagaccaaaccgcagtccacgttacggatcggcttactccgcggagttggcctcatttctgcagtcggcgctccctgtagtttctcctctcgaacgccaggtggagcaaccggccggataccgccacagccctggcaggcggcgctgtgatgcctgagctgatcctctctcctgccacagctcctcaccccctgaaaatgttcgcctgctccaagtttgtctccactccctccttggtcaagagcacctcacagctgctgagccgtccgctatctgcagtggtgctgaaacgaccggagatactgacagatgagagcctcagcagcttggcagtctcatgtccccttacctcacttgtctctagccgcagcttccaaaccagcgccatttcaagggacatcgacacagcagccaagttcattggagctggggctgccacagttggggtggctggttctggggctgggattggaactgtgtttgggagcctcatcattggttatgccaggaacccttctctgaagcaacagctcttctcctacgccattctgggctttgccctctcggaggccatggggctcttttgtctgatggtagcctttctcatcctctttgccatgtgaaggagccgtctccacctcccatagttctcccgcgtctggttggccccgtgtgttccttttcctatacctccccaggcagcctggggaacgtggttggctcagggtttgacag

SEQ ID NO: 2662 - DNA, 878 bp, Homo sapiens
  source 1..878: mol_type = unassigned DNA
ccacgttacggatcggcttactccgcggagttggcctcatttctgcagtcggcgctccctgtagtttctcctctcgaacgccaggtggagcaaccggccggataccgccacagccctggcaggcggcgctgtgatgcctgagctgatcctgtatgttgcaatcactctatccgtggctgagcgactcgttggcccgggtcacgcatgcgctgagccttcctttcgctcttcccgctgctccgcccctctctgtcttctctgcagtgggagcagctctcctgccacagctcctcaccccctgaaaatgttcgcctgctccaagtttgtctccactccctccttggtcaagagcacctcacagctgctgagccgtccgctatctgcagtggtgctgaaacgaccggagatactgacagatgagagcctcagcagcttggcagtctcatgtccccttacctcacttgtctctagccgcagcttccaaaccagcgccatttcaagggacatcgacacagcagccaagttcattggagctggggctgccacagttggggtggctggttctggggctgggattggaactgtgtttgggagcctcatcattggttatgccaggaacccttctctgaagcaacagctcttctcctacgccattctgggctttgccctctcggaggccatggggctcttttgtctgatggtagcctttctcatcctctttgccatgtgaaggagccgtctccacctcccatagttctcccgcgtctggttggccccgtgtgttccttttcctatacctccccaggcagcctggggaacgtggttggctcagggtttgacagagaaaagacaaataaatactgtattaataagatgtt

SEQ ID NO: 2663 - DNA, 745 bp, Homo sapiens
  source 1..745: mol_type = unassigned DNA
tgtgacgactgcgcatgctcggaaaggggacgcaagtccgagatcccaaacgcggtacagaccaaaccgcagtccacgttacggatcggcttactccgcggagttggcctcatttctgcagtcggcgctccctgtagtttctcctctcgaacgccagctctcctgccacagctcctcaccccctgaaaatgttcgcctgctccaagtttgtctccactccctccttggtcaagagcacctcacagctgctgagccgtccgctatctgcagtggtgctgaaacgaccggagatactgacagatgagagcctcagcagcttggcagtctcatgtccccttacctcacttgtctctagccgcagcttccaaaccagcgccatttcaagggacatcgacacagcagccaagttcattggagctggggctgccacagttggggtggctggttctggggctgggattggaactgtgtttgggagcctcatcattggttatgccaggaacccttctctgaagcaacagctcttctcctacgccattctgggctttgccctctcggaggccatggggctcttttgtctgatggtagcctttctcatcctctttgccatgtgaaggagccgtctccacctcccatagttctcccgcgtctggttggccccgtgtgttccttttcctatacctccccaggcagcctggggaacgtggttggctcagggtttgacagagaaaagacaaataaatac

SEQ ID NO: 2664 - DNA, 5484 bp, Homo sapiens
  source 1..5484: mol_type = unassigned DNA
ctaaaaaaagaatcccaggattttacctcctgtgtgttttcttcttgcttcttcatggtccatgataccagctgaggttgttagtacaataaaaccaaaccggccggatagaagcagattattctgccatttttccagatgtttgagttgcacatcaaatctggggctgattactcaacgcttgtttagcctacctgtgaggttcacaacaatttttcccagctctgtaatcatcagtgattcaaatttgccaatgtaaccatacttcaccattacagtgagaaaccagatgatgattttggagcacagcctaataagaacctggggtttgcctcttctttcggcattgttgatgctcttgagagcatcaggcaggacattcatgtgcaccattgtggcggcacgaaaagatggcggaaagagccaaacgacaaccctttcattgctcttgacaccgtgggtcaggaatttgggtaaagctcatttggatggctcatttttgttcctcgtggtgttgggaaggcttgacgagagctagagatccaagaaggcctcactcatgtgttggacacctcagttctctttggacttttttctatccaagtggtttctggagagggctatatttgggagtgatctgtcatacttctctttgctatcggatttctatcttcatcatgccatcatcactcaggctatcatcatcacccggtcttatcagatattgccaaattatgatgtcataacttactatgactgtccccactgtccatgaaaaaacacagaaaagattagatacttctcagggaggtccctgttcatctttatggcctcactttagtcctctcagaaggtactctttttcttcaatcttcctcagtgcaaatatccaccctcaatcaacatcaacatgggttggtgttactccaattcactcctctttttcttttctttttttttttgtttttgtttttttgagatggagtctcgctctgtcacccaggctggagtgcagtggcgtgatcttggctcacggcaacctctgactcccaggttcacgccattctcctgacttagcctcctgagtagctgggactacaggcacctgccacaacgcttggctaattttttgtatttttagtaaaaagacggggtttcaccgtgttagccaggatggtctccatctcctggccttgtgatccgcccgccttggcctcccaagtgccgggattacaggcgtgaaccaccgtgcctggccttcattctcctctttctataacgcaatcttaggatgcaaaaccaagcaaagtctgaattaatctatctagaatagcaccgtggagtcacagccatggtcaggcccctccaaagaacagactggatttcggaacccatgtctctccctgccacaagcaactagtccatatgcaacttggaagcagccactgtggatcttggcttctttcttgcttcctcctcaatagttactgccactgatttagtgctaaagagataggaacatcacttaaaaccatctctacacataaatccacttagaataattttttcccctggaggatctattattgaagtacaaggctttactgtttattctactgtagacaccacaggacaccatgttcttggttagaattgagtacttgagaaactatatgaataattgcttgttgaacagtacacgtgaattatctctattttccagctaaagattgagcctaaaatgattagtatttttgtaattttgaatcatttgatccatttgaagttggattagtgacaaagtcttattcatttttcaagtgttagttctgagggcttctcccagaactagcagcaaccagcgttgctgctagataatattgcacctttaagctaacaagtaaaaagctgatcctctgggttgatgttgtctcatgctagggctctaggcagagtgggctggagttcagtccccagccatcttcttagcagggcattctagatgtttaatcttttatgttgacgtgttgatatcacttccattagccatttgttagaattactaaattaaatttacataattcaaggatctaaaaagaccagaagttcagtcagagccatttttctgagatatttctgcatccctctgaagaagataatttgtccaaacttaacaaaaacaggtgttaaaattgagtacgttctgagaatactcagactttttttaagactttttttagtctcaaaccctacatgaaatacaatcccttaaatcttccaatcttagagctagaagaaaagtcgagcaccctcactttacccagaggcaattttgtgccccagatgacaaagctcttagatctactcatttgcttatggctccaccagtacttctaggtcaggccctctttcacctgaaggattagccatacttctggaaccattttccaggttccttgaaataaatatcttcgctttgctggggaccctagtttcctgttaagtagtgaatgacccttctttcctcccgccagccacagtcctatttcacagaggaagagaatgaccagcaagtcaacttctactacagagaagcagcaactgataaaaggccaaatcttacaaggtgccaacgtgaagaaaaaggcccactatcctgcagccaactcatatcaaaagttaatctgtttagtcctctctgccggggtgaatctacagtttttctttttgtctccctcttgccccatcaccaggtggttgtcgttgtccttcccggctagttgccaataaagttgttacaaagtgaccttgagtgtcttccttggtgcacccgaaaccccgccttcttcatccgggtgctgcggcgcgaataagagccggaccgcgcttgcgcattgagtcccactccttcgacctctgccgcagcccgtgccgccgccgcctcctgggaagagaggaagcgggagaggagcccacgtcgcctgtcacccaatatctccagccgcgcagtcccgaagagtgtaagatgttcgcctgcgccaagctcgcctgcaccccctctctgatccgagctggatccagagttgcatacagaccaatttctgcatcagtgttatctcgaccagaggctagtaggactggagagggctctacggtatttaatggggcccagaatggtgtgtctcagctaatccaaagggagtttcagaccagtgcaatcagcagagacattgatactgctgccaaatttattggtgcaggtgctgcaacagtaggagtggctggttctggtgctggtattggaacagtctttggcagccttatcattggttatgccagaaacccttcgctgaagcagcagctgttctcatatgctatcctgggatttgccttgtctgaagctatgggtctcttttgtttgatggttgctttcttgattttgtttgccatgtaacaaattactgcttgacatgttggcattcatattaattacggatgtaattctgtgtatcttactgtgactccgaaaactgtagtattggtgtcatgggaatgtacgttatttccaaagtcatttcattaaagatgaaaactttaatttcttctgtgatttgtacttacactaagtttagattatcacaaagaagaacgtgcattcaggcagatgctgtcccattcagaggaagctacagcagttgctccactgatgaaaaatattccaatgtaatttttatgggaattcttttatatagtgttctgcatattgtaattcatagggcttttgtttattcatataaaggataaatatttgggtgttttgagcttctataaaatatgattaattaaaggtagttaatactcaagatggtcttgagtttttaaggtctaacatcagttagaatacttcaaatcagaatcaccttccaagactgacttgacaggtggttctaaaaataaatcacgtcagctttttaggaaatgaagccttaagctagggggtaatgtgacttttgtttttcagtaagtctcacattaagcaattgtgtgcctctaatgaatcttccatgtcttttcagaacaggctcagtccaactagcagctagtttcttacttgaacaagactattaaaaaccaaatatcaaaaaactgaattggctagatttttacagccaaaaattgctgtaaggcagtgtgtatcactgttgctaacatgtttatagtgggagtcttggggatgatagctggttcaacagtattttgctgctaatactttatgttgcttcttggtcaaacttttcccattcaaaggaagaagatggtgctactatagacagtttttcccctagcaaatatattgtaccataatatctatcatccaagtttcagggttttttgaaagttgataattaggaaagtgacattttacttttcttagtgccctttgcctgtttgatttccattgagaaagagcagtcaccaaagttcctcaagtgtcggaagaccacctccatcagaatcagtgcttgtttaaaaaataaaaatccctaggttccagacctactgaattggactctttggacatgagactcagcaatctacatctttaaaaaggcttcccaggtggtttttgtgcatactgtttgagagtcactaagttatatatatatcctaccttctgtaaagtgaaatgaggccccaaaaagctaaagaggtagagctgctacctcgtttttagttgattcatcatctagtctatatcacccaaaagaattggaaataggtattcaaacaaaaacctgtatacaagtattcatagaagcactacttacaatagccgaaaggtagaaacaaccaaatgtctatcagctgatgaatggataagtaaaatacatccatataatggaatattcagccatgaaaaggaatgaggcactgatacataatgaatagatgtgagtgaaccctaagaaagcatgctaagtggaagaagccagccacatgattccatttatatgaaatatccaaaataggcaaatccacggtgacaaagccaattagtagttatcaggaactagggagggggtgaaaagggagtgactgcgtaatgcgtatggggattccttttaggatgatgaaaattggatgaattacagctggtctgatggtagtgggttatcagaacttattaacattagtgtcattaaagttggtatatagcccctcactgctaaatctggctcaaaaattaaaagattattaaaatttgatgaattagtggtgatggttgcacaacattgtaaatataataaatgtcactgaattgtacactttaaggtggttaaaatggcaaattttacatgtcttactgaaactactatttaatacaaagtacatagtataaaattttaaaagtgataggaaaatgcttagattaatattcacctattccaagtatattttaaataaaaacagtcttggtaaaga

SEQ ID NO: 2665 - DNA, 842 bp, Homo sapiens
  source 1..842: mol_type = unassigned DNA
ctgggaaggtaagtggagggcacagggagcccggcctggccagggcggagcggcgcccagtagggacccattcattgtgccggcgcctcactgggcacggggcccaagctgacggcgtgcacgggagcctgcggggcctgggtgggaagaacaggcccctggagggcacttgaccttaagcctcttttcctccgcagagaggaagcgggagaggagcccacgtcgcctgtcacccaatatctccagccgcgcagtcccgaagagtgtaagatgttcgcctgcgccaagctcgcctgcaccccctctctgatccgagctggatccagagttgcatacagaccaatttctgcatcagtgttatctcgaccagaggctagtaggactggagagggctctacggtatttaatggggcccagaatggtgtgtctcagctaatccaaagggagtttcagaccagtgcaatcagcagagacattgatactgctgccaaatttattggtgcaggtgctgcaacagtaggagtggctggttctggtgctggtattggaacagtctttggcagccttatcattggttatgccagaaacccttcgctgaagcagcagctgttctcatatgctatcctgggatttgccttgtctgaagctatgggtctcttttgtttgatggttgctttcttgattttgtttgccatgtaacaaattactgcttgacatgttggcattcatattaattacggatgtaattctgtgtatcttactgtgactccgaaaactgtagtattggtgtcatgggaatgtacgttatttccaaagtcatttcattaaagatgaaaacttta

SEQ ID NO: 2666 - DNA, 795 bp, Homo sapiens
  source 1..795: mol_type = unassigned DNA
agtcccactccttcgacctctgccgcagcccgtgccgccgccgcctcctgggaagcctcttttcctccgcagagaggaagcgggagaggagcccacgtcgcctgtcacccaatatctccagccgcgcagtcccgaagagtgtaagatgttcgcctgcgccaagctcgcctgcaccccctctctgatccgagctggatccagagttgcatacagaccaatttctgcatcagtgttatctcgaccagaggctagtaggactggagagggctctacggtatttaatggggcccagaatggtgtgtctcagctaatccaaagggagtttcagaccagtgcaatcagcagagacattgatactgctgccaaatttattggtgcaggtgctgcaacagtaggagtggctggttctggtgctggtattggaacagtctttggcagccttatcattggttatgccagaaacccttcgctgaagcagcagctgttctcatatgctatcctgggatttgccttgtctgaagctatgggtctcttttgtttgatggttgctttcttgattttgtttgccatgtaacaaattactgcttgacatgttggcattcatattaattacggatgtaattctgtgtatcttactgtgactccgaaaactgtagtattggtgtcatgggaatgtacgttatttccaaagtcatttcattaaagatgaaaactttaatttcttctgtgatttgtacttacactaagtttagattatcacaaagaagaacgtgcattcaggcagatgctgtccca

SEQ ID NO: 2667 - DNA, 365 bp, Homo sapiens
  source 1..365: mol_type = unassigned DNA
agctccgcctttgcctccaaggctttgctggcttgtgcggcatcctgctccgtctgcaggttgtgcttccggtgcggaggtcagggacaagatggtgccaccggtgcaggtctctccgctcatcaagctcggccgctactccgccctgttcctcggtgtggcctacggagccacgcgctacaattacctaaaacctcgggcagaagaggagaggaggatagcagcagaagagaagaagaagcaggatgaactgaaacggattgccagagaattggcagaagatgacagcatattaaagtgagtgaccctgcgacccactctttggaccagcagcggatgaataaagcttcctgtgttgtgtgata

SEQ ID NO: 2668 - DNA, 614 bp, Homo sapiens
  source 1..614: mol_type = unassigned DNA
tgaaacggcggcccataatgcattgcgatggcgggtaggcgtgtgggggcggagccagggccggaagtagagcggaggtggtggcggcggaggctttggcagctcgggactgagtgcaagaatcagcatgattcttcagaggctcttcaggttctcctctgtcattcggtcagccgtctcagtccatttgcggaggaacattggtgttacagcagtggcatttaataaggaacttgatcctatacagaaactctttgtggacaagattagagaatacaaatctaagcgacagacatctggaggacctgttgatgctagttcagagtatcagcaagagctggagagggagctttttaagctcaagcaaatgtttggtaatgcagacatgaatacatttcccaccttcaaatttgaagatcccaaatttgaagtcatcgaaaaaccccaggcctgaagaaataaagtaaaattaatctggtaatttgtcacggattagttgtacaactagttagaagtttcagaataaacatgcatttcataactgtcaaatgttcttttaattctgagtccaaataaattatttggtgatgttgagtgtgttcttgatgaattga

SEQ ID NO: 2669 - DNA, 826 bp, Homo sapiens
  source 1..826: mol_type = unassigned DNA
aaaaggccccggaacgaggccggcccgcgagggcccgcgctcccctcctccccggcggccgcactcacccactccggaatcggccctgtcgcccccgcccgcactccagagccggctgagaacggcagcggcgagggctccacgtgcagcgtctctccgggtaagacctgcagctcccgcgactagaagtgtgaggtcccagggcccttcccgcggaatcggcgctgagaagccccaacccccctcccgcctcccaggcaccttcgggtccaggactacaactcccggcagggtgcgcaaaacgaccgcccaaggcaacggaggctcacgagaatcagcatgattcttcagaggctcttcaggttctcctctgtcattcggtcagccgtctcagtccatttgcggaggaacattggtgttacagcagtggcatttaataaggaacttgatcctatacagaaactctttgtggacaagattagagaatacaaatctaagcgacagacatctggaggacctgttgatgctagttcagagtatcagcaagagctggagagggagctttttaagctcaagcaaatgtttggtaatgcagacatgaatacatttcccaccttcaaatttgaagatcccaaatttgaagtcatcgaaaaaccccaggcctgaagaaataaagtaaaattaatctggtaatttgtcacggattagttgtacaactagttagaagtttcagaataaacatgcatttcataactgtcaaatgttcttttaattctgagtccaaataaattatttggtgatgttgagtgtgttcttgatgaattga

SEQ ID NO: 2670 - DNA, 647 bp, Homo sapiens
  source 1..647: mol_type = unassigned DNA
cccggaacgaggccggcccgcgagggcccgcgctcccctcctccccggcggccgcactcacccactccggaatcggccctgtcgcccccgcccgcactccagagccggctgagaacggcagcggcgagggctccacgtgcagcgtctctccggaatcagcatgattcttcagaggctcttcaggttctcctctgtcattcggtcagccgtctcagtccatttgcggaggaacattggtgttacagcagtggcatttaataaggaacttgatcctatacagaaactctttgtggacaagattagagaatacaaatctaagcgacagacatctggaggacctgttgatgctagttcagagtatcagcaagagctggagagggagctttttaagctcaagcaaatgtttggtaatgcagacatgaatacatttcccaccttcaaatttgaagatcccaaatttgaagtcatcgaaaaaccccaggcctgaagaaataaagtaaaattaatctggtaatttgtcacggattagttgtacaactagttagaagtttcagaataaacatgcatttcataactgtcaaatgttcttttaattctgagtccaaataaattatttggtgatgttgagtgtgttcttgatgaattga

SEQ ID NO: 2671 - DNA, 1179 bp, Homo sapiens
  source 1..1179: mol_type = unassigned DNA
gcggccgcgggggggcccttgtgggggaaaaggccccggaacgaggccggcccgcgagggcccgcgctcccctcctccccggcggccgcactcacccactccggaatcggccctgtcgcccccgcccgcactccagagccggctgagaacggcagcggcgagggctccacgtgcagcgtctctccgggtaagacctgcagctcccgcgactagaagtgtgaggtcccagggcccttcccgcggaatcggcgctgagaagccccaacccccctcccgcctcccaggcaccttcgggtccaggactacaactcccggcagggtgcgcaaaacgaccgcccaaggcaacggaggctcacgaggtacaaggaagcacaacgccccaatccgctttgttttacacagtctcactttccctgcacctttatacacttcgataaccctaacgaacaggacgctgactcggaggggagcttgaactaggggaaaggccactcaaagagcgcatgcgtacagagcaaggtttcaaggaggggaaaaagaacgggtcaaattaggcgaagaaaagatggcggaggctgtgccaggggacccggaagcacttaccctccacttcctcctcctgtttggcttctgtctcacctagacccgtccggtcgcagactgtctccgagacgcttcctgtccgaatcagcatgattcttcagaggctcttcaggttctcctctgtcattcggtcagccgtctcagtccatttgcggaggaacattggtgttacagcagtggcatttaataaggaacttgatcctatacagaaactctttgtggacaagattagagaatacaaatctaagcgacagacatctggaggacctgttgatgctagttcagagtatcagcaagagctggagagggagctttttaagctcaagcaaatgtttggtaatgcagacatgaatacatttcccaccttcaaatttgaagatcccaaatttgaagtcatcgaaaaaccccaggcctgaagaaataaagtaaaattaatctggtaatttgtcacggattagttgtacaactagttagaagtttcagaataaacatgcatttcataactgtcaaatgttcttttaattctgagtccaaataaattatttggtgatgttgagtgtgttcttgatgaattga

SEQ ID NO: 2672 - DNA, 589 bp, Homo sapiens
  source 1..589: mol_type = unassigned DNA
agagcggaggtggtggcggcggaggctttggcagctcgggactgagtgcaaggaatatgcactgaagaggcagcgaacctactaacctttggccgaatcagcatgattcttcagaggctcttcaggttctcctctgtcattcggtcagccgtctcagtccatttgcggaggaacattggtgttacagcagtggcatttaataaggaacttgatcctatacagaaactctttgtggacaagattagagaatacaaatctaagcgacagacatctggaggacctgttgatgctagttcagagtatcagcaagagctggagagggagctttttaagctcaagcaaatgtttggtaatgcagacatgaatacatttcccaccttcaaatttgaagatcccaaatttgaagtcatcgaaaaaccccaggcctgaagaaataaagtaaaattaatctggtaatttgtcacggattagttgtacaactagttagaagtttcagaataaacatgcatttcataactgtcaaatgttcttttaattctgagtccaaataaattatttggtgatgttgagtgtgttcttgatgaattga

SEQ ID NO: 2673 - DNA, 589 bp, Homo sapiens
  source 1..589: mol_type = unassigned DNA
tagacccgtccggtcgcagactgtctccgagacgcttcctgtccggtgagcgtcgaccgactgaaacggcggcccataatgcattgcgatggcggaatcagcatgattcttcagaggctcttcaggttctcctctgtcattcggtcagccgtctcagtccatttgcggaggaacattggtgttacagcagtggcatttaataaggaacttgatcctatacagaaactctttgtggacaagattagagaatacaaatctaagcgacagacatctggaggacctgttgatgctagttcagagtatcagcaagagctggagagggagctttttaagctcaagcaaatgtttggtaatgcagacatgaatacatttcccaccttcaaatttgaagatcccaaatttgaagtcatcgaaaaaccccaggcctgaagaaataaagtaaaattaatctggtaatttgtcacggattagttgtacaactagttagaagtttcagaataaacatgcatttcataactgtcaaatgttcttttaattctgagtccaaataaattatttggtgatgttgagtgtgttcttgatgaattga

SEQ ID NO: 2674 - DNA, 4380 bp, Homo sapiens
  source 1..4380: mol_type = unassigned DNA
ctgcgcgtgctgggagccggctggcaaggcgtgcggtgggcggggcgccgcgctgacgttgcccgggatgcggacaggttccgccgcctccagcgccgccgccgcagctgccgccgccgccgcctccgcctcgcctgccaccggggtttgtatgaaaacaccgggcggcgggcggcgagggatccgccgtgatccaggtgctgagccgggtgctgcggctctgcgcggtccccgccagcgccccatcctgagccgattatctgcaattatgaaatgaagtaactcaagatgagcaagttaaaagtgataccagaaaaaagccttaccaataattctaggatcgtaggactcctggctcaactggagaagatcaatgctgagccttcagaatcagacactgcccgatatgttacatcaaaaattcttcatctggctcagagtcaagaaaaaacaaggagagaaatgacagccaaaggttctacaggaatggaaattctgctgtcaacattagagaacacaaaagatcttcaaactacacttaatatcttaagcattcttgttgagctggtgtcagctggtggaggtcgaagagtgagtttcttagtcaccaaaggtggttcacaaatattgttgcagttacttatgaatgccagcaaagaatctcccccacatgaggacttaatggtacagattcattctattcttgcaaagattggaccaaaagataaaaaatttggagtaaaggctagaattaatggggctctgaatataaccctgaatttggtcaagcagaatttgcagaatcatcgcttggttctaccttgccttcagcttttacgagtatattctgccaactctgtgaattcagtatccttagggaaaaatggagttgtggaactgatgtttaaaatcattggaccatttagtaagaagaattccagtcttataaaaaacaaatgccaggagagctgtagacagaggatatgtccaagtgcttttaacaatttatgtagattggcaccgccatgataaccggcatagaaacatgctcattcggaaaggaattttacagagtttaaaaagtgttacaaacatcaagttgggaagaaaagcatttattgatgccaatgggatgaaaattctgtataatacttcgcaattgcctgttattcctgtgactggtcctgtggctcagctctacagcttacctcctgaagtggatgacgtagtagatgaaagtgatgacaacgatgatattgatgtagaagctgaaaacgaaactgagaatgaagatgacctagatcaaaattttaagaatgatgatattgaaacagatattaacaaactaaaaccccagcaagaaccgggacgaacaatagaagatctaaaaatgtatgaacaccttttccctgagcttgttgatgattttcaggactatgatttaatctccaaagaaccaaagccttttgtatttgagggaaaagtacgtggtcctattgttgttcctacggcaggcgaggaaacatctgggaattctggcaatttaagaaaagttgtaatgaaggagaacatatcttctaaaggagatgaaggtgaaaagaagtctacctttatggatctagcaaaagaagatattaaagataatgatagaacattacaacagcagccaggtgatcaaaatagaactatttcatcagtccatggtttaaacaatgatattgtaaaggccttggaccgaattacattgcagaatattccttctcaaacagccccaggttttactgcagaaatgaagaaggactgcagtcttcctcttactgtccttacctgtgctaaagcatgtccacacatggctacttgtggaaatgttctgtttgagggaagaacagttcagctagggaagctttgctgcactggagttgaaactgaagatgatgaagatactgagtcaaattcatcggtagaacaagcatcggttgaagtacctgatggaccaacactccatgacccagacctctatattgagattgtgaaaaatacgaagtctgtcccagaatattcagaggtggcttatcccgattattttggtcacattccgcctccattcaaagagcctattttagaaaggccttatggtgtacaaaggacaaaaattgctcaagatattgaaaggctaatacatcagagtgatatcatagatcgtgtggtatatgacttggataacccaaattacaccattccagaagagggagatattttgaaatttaactccaaatttgagtctgggaatctgcgcaaagtaattcaaattagaaaaaatgaatatgatcttattctgaactcagacataaacagcaatcattatcatcagtggttttactttgaagtcagtggaatgcgaccaggtgttgcttacaggtttaacatcattaactgtgaaaagtccaacagtcagtttaattatggtatgcaaccactcatgtattcggttcaggaagcattaaatgccagaccatggtggattcgtatggggactgacatttgttactataaaaatcatttctcaagaagttcagttgctgcaggtgggcaaaagggaaaatcctactatacaattacatttactgtcaattttccacataaagatgatgtttgctactttgcttatcactatccatatacgtattcaactttacagatgcatcttcaaaaattggaatcagcacacaatcctcagcaaatctattttcggaaagatgtgttatgtgaaaccctgtctggaaacagctgccccttggtgactataacagcaatgccagagtctaattattatgaacatatctgccatttcagaaatcgcccttacgttttcttgtctgctcgggtacatcctggagaaactaatgcaagttgggttatgaaaggaacgttggaatatctcatgagcaataaccccactgctcagagcttacgagaatcttatatttttaaaattgtccctatgttaaatccagatggtgtcatcaatggaaatcatcgctgttctttaagtggagaggatttgaataggcagtggcaaagtccaagtccggatttacatcctacaatttaccatgctaaggggctgttgcaatacttggctgcagtgaagcgtttacccttggtttattgtgattatcatggccattcccgaaagaagaatgtatttatgtatggttgcagcatcaaagagacagtgtggcataccaatgataatgcaacttcatgtgatgttgtggaggatacgggatacaggacattgcctaagatactgagccatatcgccccagcattttgcatgagcagctgtagcttcgtagtggaaaaatctaaagaatccacagcacgtgttgtagtttggagggaaataggagtacaaagaagttataccatggagagtactttatgtggctgtgatcagggaaaatacaagggtttacagattggtacccgagaactggaagagatgggagcaaaattttgtgttggtcttttacgtttgaaaagactgacctctccattggagtataatctgccttccagcctgcttgactttgaaaatgatttaattgaatcaagctgcaaagtaactagccctaccacttatgtcttggatgaagatgaacctcgattccttgaagaagttgattacagtgcagaaagtaatgatgagttagatattgagttggctgaaaatgtaggagattatgaaccttctgctcaagaagaagtactttctgactctgaattatcaagaacatacctaccttgagcccgctgccatctcttgttaactgcaaagaataaatgaaatatcttggtttttatttcccaggaagcttgagagaaatgagtttatacagagctgactcaaaaagacaaaaagtaacttgggccagtttggtttcaagataataaatgtgttattaattaatgataaaattggcgcttgttttattttcgatattcaatgcactttatgtagcattgaatgatcaaatattggatttacctttaaaaaaaaaacctgagtatcattgcatgaatttttatctccctatggttatatcctgcatcaagtggataattttgaagtgtgttcagaatataaaattgaaattttagagttgttgaaaatcctgacttgttgaaaactaatatatatgtacatggatttctatagatgtgtttgtttagaagtgggtagatattgcagataagactgttcttcagaatcatgttaactattgggttgtgactgaagtagtccagggtttgccttgaaaccattacattctacatttaccaaattaaacaaataaaaactgtattaaatgttgc

SEQ ID NO: 2675 - DNA, 4393 bp, Homo sapiens
  source 1..4393: mol_type = unassigned DNA
gggtttgtatgaaaacaccgggcggcgggcggcgagggatccgccgtgatccaggtgctgagccgggtgctgcggctctgcgcggtccccgccagcgccccatcctgagccgattatctgcaattatgaaatgaagtaactcaagatgagcaagttaaaagtgataccagaaaaaagccttaccaataattctaggatcgtaggactcctggctcaactggagaagatcaatgctgagccttcagaatcagacactgcccgatatgttacatcaaaaattcttcatctggctcagagtcaagaaaaaacaaggagagaaatgacagccaaaggttctacaggaatggaaattctgctgtcaacattagagaacacaaaagatcttcaaactacacttaatatcttaagcattcttgttgagctggtgtcagctggtggaggtcgaagagtgagtttcttagtcaccaaaggtggttcacaaatattgttgcagttacttatgaatgccagcaaagaatctcccccacatgaggacttaatggtacagattcattctattcttgcaaagattggaccaaaagataaaaaatttggagtaaaggctagaattaatggggctctgaatataaccctgaatttggtcaagcagaatttgcagaatcatcgcttggttctaccttgccttcagcttttacgagtatattctgccaactctgtgaattcagtatccttagggaaaaatggagttgtggaactgatgtttaaaatcattggaccatttagtaagaagaattccagtcttataaaggttgctttagacactcttgctgcattgctaaaatcaaaaacaaatgccaggagagctgtagacagaggatatgtccaagtgcttttaacaatttatgtagattggcaccgccatgataaccggcatagaaacatgctcattcggaaaggaattttacagagtttaaaaagtgttacaaacatcaagttgggaagaaaagcatttattgatgccaatgggatgaaaattctgtataatacttcgcaagaatgtctggcagtcaggactctggatcctcttgtcaatacctccagtctgataatgaggaagtgtttcccaaaaaatcgactgccactcccaacaattaaaagttcttttcatttccagttgcctgttattcctgtgactggtcctgtggctcagctctacagcttacctcctgaagtggatgacgtagtagatgaaagtgatgacaacgatgatattgatgtagaagctgaaaacgaaactgagaatgaagatgacctagatcaaaattttaagaatgatgatattgaaacagatattaacaaactaaaaccccagcaagaaccgggacgaacaatagaagatctaaaaatgtatgaacaccttttccctgagcttgttgatgattttcaggactatgatttaatctccaaagaaccaaagccttttgtatttgagggaaaagtacgtggtcctattgttgttcctacggcaggcgaggaaacatctgggaattctggcaatttaagaaaagttgtaatgaaggagaacatatcttctaaaggagatgaaggtgaaaagaagtctacctttatggatctagcaaaagaagatattaaagataatgatagaacattacaacagcagccaggtgatcaaaatagaactatttcatcagtccatggtttaaacaatgatattgtaaaggccttggaccgaattacattgcagaatattccttctcaaacagccccaggttttactgcagaaatgaagaaggactgcagtcttcctcttactgtccttacctgtgctaaagcatgtccacacatggctacttgtggaaatgttctgtttgagggaagaacagttcagctagggaagctttgctgcactggagttgaaactgaagatgatgaagatactgagtcaaattcatcggtagaacaagcatcggttgaagtacctgatggaccaacactccatgacccagacctctatattgagattgtgaaaaatacgaagtctgtcccagaatattcagaggtggcttatcccgattattttggtcacattccgcctccattcaaagagcctattttagaaaggccttatggtgtacaaaggacaaaaattgctcaagatattgaaaggctaatacatcagagtgatatcatagatcgtgtggtatatgacttggataacccaaattacaccattccagaagagggagatattttgaaatttaactccaaatttgagtctgggaatctgcgcaaagtaattcaaattagaaaaaatgaatatgatcttattctgaactcagacataaacagcaatcattatcatcagtggttttactttgaagtcagtggaatgcgaccaggtgttgcttacaggtttaacatcattaactgtgaaaagtccaacagtcagtttaattatggtatgcaaccactcatgtattcggttcaggaagcattaaatgccagaccatggtggattcgtatggggactgacatttgttactataaaaatcatttctcaagaagttcagttgctgcaggtgggcaaaagggaaaatcctactatacaattacatttactgtcaattttccacataaagatgatgtttgctactttgcttatcactatccatatacgtattcaactttacagatgcatcttcaaaaattggaatcagcacacaatcctcagcaaatctattttcggaaagatgtgttatgtgaaaccctgtctggaaacagctgccccttggtgactataacagcaatgccagagtctaattattatgaacatatctgccatttcagaaatcgcccttacgttttcttgtctgctcgggtacatcctggagaaactaatgcaagttgggttatgaaaggaacgttggaatatctcatgagcaataaccccactgctcagagcttacgagaatcttatatttttaaaattgtccctatgttaaatccagatggtgtcatcaatggaaatcatcgctgttctttaagtggagaggatttgaataggcagtggcaaagtccaagtccggatttacatcctacaatttaccatgctaaggggctgttgcaatacttggctgcagtgaagcgtttacccttggtttattgtgattatcatggccattcccgaaagaagaatgtatttatgtatggttgcagcatcaaagagacagtgtggcataccaatgataatgcaacttcatgtgatgttgtggaggatacgggatacaggacattgcctaagatactgagccatatcgccccagcattttgcatgagcagctgtagcttcgtagtggaaaaatctaaagaatccacagcacgtgttgtagtttggagggaaataggagtacaaagaagttataccatggagagtactttatgtggctgtgatcagggaaaatacaagggtttacagattggtacccgagaactggaagagatgggagcaaaattttgtgttggtcttttacgtttgaaaagactgacctctccattggagtataatctgccttccagcctgcttgactttgaaaatgatttaattgaatcaagctgcaaagtaactagccctaccacttatgtcttggatgaagatgaacctcgattccttgaagaagttgattacagtgcagaaagtaatgatgagttagatattgagttggctgaaaatgtaggagattatgaaccttctgctcaagaagaagtactttctgactctgaattatcaagaacatacctaccttgagcccgctgccatctcttgttaactgcaaagaataaatgaaatatcttggtttttatttcccaggaagcttgagagaaatgagtttatacagagctgactcaaaaagacaaaaagtaacttgggccagtttggtttcaagataataaatgtgttattaattaatgataaaattggcgcttgttttattttcgatattcaatgcactttatgtagcattgaatgatcaaatattggatttacctttaaaaaaaaaacctgagtatcattgcatgaatttttatctccctatggttatatcctgcatcaagtggataattttgaagtgtgttcagaatataaaattgaaattttagagttgttgaaaatcctgacttgttgaaaactaatatatatgtacatggatttctatagatgtgtttgtttagaagtgggtagatattgcagataagactgttcttcagaatcatgttaactattgggttgtgactgaagtagtccagggtttgccttgaaaccattacattctacatttaccaaattaaacaaataaaaactgtattaaatgtt

SEQ ID NO: 2676 - DNA, 787 bp, Homo sapiens
  source 1..787: mol_type = unassigned DNA
ggctcaactggagaagatcaatgctgagccttcagaatcagacactgcccgatatgttacatcaaaaattcttcatctggctcagagtcaagaaaaaacaaggagagaaatgacagccaaaggttctacaggaatggaaattctgctgtcaacattagagaacacaaaagatcttcaaactacacttaatatcttaagcattcttgttgagctggtgtcagctggtggaggtcgaagagtgagtttcttagtcaccaaaggtggttcacaaatattgttgcagttacttatgaatgccagcaaagaatctcccccacatgaggacttaatggtacagattcattctattcttgcaaagattggaccaaaagataaaaaatttggagtaaaggctagaattaatggggctctgaatataaccctgaatttggtcaagcagaatttgcagaatcatcgcttggttctaccttgccttcagcttttacgagtatattctgccaactctgtgaattcagtatccttagggaaaaatggagttgtggaactgatgtttaaaatcattggaccatttagtaagaagaattccagtcttataaaaaacaaatgccaggagagctgtagacagaggatatgtccaagtgcttttaacaatttatgtagattggcaccgccatgataaccggcatagaaacatgctcattcggaaaggaattttacagagtttaaaaagtgttacaaacatcaagttgggaagaaaagcatttattgatgccaatgggatgaaaat

SEQ ID NO: 2677 - DNA, 914 bp, Homo sapiens
  source 1..914: mol_type = unassigned DNA
cggggtttgtatgaaaacaccgggcggcgggcggcgagggatccgccgtgatccaggtgctgagccgggtgctgcggctctgcgcggtccccgccagcgccccatcctgagccgattatctgcaattatgaaatgaagtaactcaagatgagcaagttaaaagtgataccagaaaaaagccttaccaataattctaggatcgtaggactcctggctcaactggagaagatcaatgctgagccttcagaatcagacactgcccgatatgttacatcaaaaattcttcatctggctcagagtcaagaaaaaacaaggagagaaatgacagccaaaggttctacaggaatggaaattctgctgtcaacattagagaacacaaaagatcttcaaactacacttaatatcttaagcattcttgttgagctggtgtcagctggtggaggtcgaagagtgagtttcttagtcaccaaaggtggttcacaaatattgttgcagttacttatgaatgccagcaaagaatctcccccacatgaggacttaatggtacagattcattctattcttgcaaagattggaccaaaagataaaaaatttggagtaaaggctagaattaatggggctctgaatataaccctgaatttggtcaagcagaatttgcagaatcatcgcttggttctaccttgccttcagcttttacgagtatattctgccaactctgtgaattcagtatccttagggaaaaatggagttgtggaactgatgtttaaaatcattggaccatttagtaagaagaattccagtcttataaagaatgtctggcagtcaggactctggatcctcttgtcaatacctccagtctgataatgaggaagtgtttcccaaaaaatcgactgccactcccaacaattaaaagt

SEQ ID NO: 2678 - DNA, 4205 bp, Homo sapiens
  source 1..4205: mol_type = unassigned DNA
gctgcggctctgcgcggtccccgccagcgccccatcctgagccgattatctgcaattatgaaatgaagtaactcaagatgagcaagttaaaagtgataccagaaaaaagccttaccaataattctaggatcgtaggactcctggctcaactggagaagatcaatgctgagccttcagaatcagacactgcccgatatgttacatcaaaaattcttcatctggctcagagtcaagaaaaaacaaggagagaaatgacagccaaaggttctacaggaatggaaattctgctgtcaacattagagaacacaaaagatcttcaaactacacttaatatcttaagcattcttgttgagctggtgtcagctggtggaggtcgaagagtgagtttcttagtcaccaaaggtggttcacaaatattgttgcagttacttatgaatgccagcaaagaatctcccccacatgaggacttaatggtacagattcattctattcttgcaaagattggaccaaaagataaaaaatttggagtaaaggctagaattaatggggctctgaatataaccctgaatttggtcaagcagaatttgcagaatcatcgcttggttctaccttgccttcagcttttacgagtatattctgccaactctgtgaattcagtatccttagggaaaaatggagttgtggaactgatgtttaaaatcattggaccatttagtaagaagaattccagtcttataaaggttgctttagacactcttgctgcattgctaaaatcaaaaacaaatgccaggagagctgtagacagaggatatgtccaagtgcttttaacaatttatgtagattggcaccgccatgataaccggcatagaaacatgctcattcggaaaggaattttacagagtttaaaaagtgttacaaacatcaagttgggaagaaaagcatttattgatgccaatgggatgaaaattctgtataatacttcgcaattgcctgttattcctgtgactggtcctgtggctcagctctacagcttacctcctgaagtggatgacgtagtagatgaaagtgatgacaacgatgatattgatgtagaagctgaaaacgaaactgagaatgaagatgacctagatcaaaattttaagaatgatgatattgaaacagatattaacaaactaaaaccccagcaagaaccgggacgaacaatagaagatctaaaaatgtatgaacaccttttccctgagcttgttgatgattttcaggactatgatttaatctccaaagaaccaaagccttttgtatttgagggaaaagtacgtggtcctattgttgttcctacggcaggcgaggaaacatctgggaattctggcaatttaagaaaagttgtaatgaaggagaacatatcttctaaaggagatgaaggtgaaaagaagtctacctttatggatctagcaaaagaagatattaaagataatgatagaacattacaacagcagccaggtgatcaaaatagaactatttcatcagtccatggtttaaacaatgatattgtaaaggccttggaccgaattacattgcagaatattccttctcaaacagccccaggttttactgcagaaatgaagaaggactgcagtcttcctcttactgtccttacctgtgctaaagcatgtccacacatggctacttgtggaaatgttctgtttgagggaagaacagttcagctagggaagctttgctgcactggagttgaaactgaagatgatgaagatactgagtcaaattcatcggtagaacaagcatcggttgaagtacctgatggaccaacactccatgacccagacctctatattgagattgtgaaaaatacgaagtctgtcccagaatattcagaggtggcttatcccgattattttggtcacattccgcctccattcaaagagcctattttagaaaggccttatggtgtacaaaggacaaaaattgctcaagatattgaaaggctaatacatcagagtgatatcatagatcgtgtggtatatgacttggataacccaaattacaccattccagaagagggagatattttgaaatttaactccaaatttgagtctgggaatctgcgcaaagtaattcaaattagaaaaaatgaatatgatcttattctgaactcagacataaacagcaatcattatcatcagtggttttactttgaagtcagtggaatgcgaccaggtgttgcttacaggtttaacatcattaactgtgaaaagtccaacagtcagtttaattatggtatgcaaccactcatgtattcggttcaggaagcattaaatgccagaccatggtggattcgtatggggactgacatttgttactataaaaatcatttctcaagaagttcagttgctgcaggtgggcaaaagggaaaatcctactatacaattacatttactgtcaattttccacataaagatgatgtttgctactttgcttatcactatccatatacgtattcaactttacagatgcatcttcaaaaattggaatcagcacacaatcctcagcaaatctattttcggaaagatgtgttatgtgaaaccctgtctggaaacagctgccccttggtgactataacagcaatgccagagtctaattattatgaacatatctgccatttcagaaatcgcccttacgttttcttgtctgctcgggtacatcctggagaaactaatgcaagttgggttatgaaaggaacgttggaatatctcatgagcaataaccccactgctcagagcttacgagaatcttatatttttaaaattgtccctatgttaaatccagatggtgtcatcaatggaaatcatcgctgttctttaagtggagaggatttgaataggcagtggcaaagtccaagtccggatttacatcctacaatttaccatgctaaggggctgttgcaatacttggctgcagtgaagcgtttacccttggtttattgtgattatcatggccattcccgaaagaagaatgtatttatgtatggttgcagcatcaaagagacagtgtggcataccaatgataatgcaacttcatgtgatgttgtggaggatacgggatacaggacattgcctaagatactgagccatatcgccccagcattttgcatgagcagctgtagcttcgtagtggaaaaatctaaagaatccacagcacgtgttgtagtttggagggaaataggagtacaaagaagttataccatggagagtactttatgtggctgtgatcagggaaaatacaagggtttacagattggtacccgagaactggaagagatgggagcaaaattttgtgttggtcttttacgtttgaaaagactgacctctccattggagtataatctgccttccagcctgcttgactttgaaaatgatttaattgaatcaagctgcaaagtaactagccctaccacttatgtcttggatgaagatgaacctcgattccttgaagaagttgattacagtgcagaaagtaatgatgagttagatattgagttggctgaaaatgtaggagattatgaaccttctgctcaagaagaagtactttctgactctgaattatcaagaacatacctaccttgagcccgctgccatctcttgttaactgcaaagaataaatgaaatatcttggtttttatttcccaggaagcttgagagaaatgagtttatacagagctgactcaaaaagacaaaaagtaacttgggccagtttggtttcaagataataaatgtgttattaattaatgataaaattggcgcttgttttattttcgatattcaatgcactttatgtagcattgaatgatcaaatattggatttacctttaaaaaaaaaacctgagtatcattgcatgaatttttatctccctatggttatatcctgcatcaagtggataattttgaagtgtgttcagaatataaaattgaaattttagagttgttgaaaatcctgacttgttgaaaactaatatatatgtacatggatttctatagatgtgtttgtttagaagtgggtagatattgcagataagactgttcttcagaatcatgttaactattgggttgtgactgaagtagtccagggtttgccttgaaaccattacattctacatttaccaaattaaacaaataaaaactgtattaaatgtt

SEQ ID NO: 2679 - DNA, 4222 bp, Homo sapiens
  source 1..4222: mol_type = unassigned DNA
ctgcgcgtgctgggagccggctggcaaggcgtgcggtgggcggggcgccgcgctgacgttgcccgggatgcggacaggttccgccgcctccagcgccgccgccgcagctgccgccgccgccgcctccgcctcgcctgccaccggggtttgtatgaaaacaccgggcggcgggcggcgagggatccgccgtgatccaggtgctgagccgggtgctgcggctctgcgcggtccccgccagcgccccatcctgagccgccttaccaataattctaggatcgtaggactcctggctcaactggagaagatcaatgctgagccttcagaatcagacactgcccgatatgttacatcaaaaattcttcatctggctcagagtcaagaaaaaacaaggagagaaatgacagccaaaggttctacaggaatggaaattctgctgtcaacattagagaacacaaaagatcttcaaactacacttaatatcttaagcattcttgttgagctggtgtcagctggtggaggtcgaagagtgagtttcttagtcaccaaaggtggttcacaaatattgttgcagttacttatgaatgccagcaaagaatctcccccacatgaggacttaatggtacagattcattctattcttgcaaagattggaccaaaagataaaaaatttggagtaaaggctagaattaatggggctctgaatataaccctgaatttggtcaagcagaatttgcagaatcatcgcttggttctaccttgccttcagcttttacgagtatattctgccaactctgtgaattcagtatccttagggaaaaatggagttgtggaactgatgtttaaaatcattggaccatttagtaagaagaattccagtcttataaaggttgctttagacactcttgctgcattgctaaaatcaaaaacaaatgccaggagagctgtagacagaggatatgtccaagtgcttttaacaatttatgtagattggcaccgccatgataaccggcatagaaacatgctcattcggaaaggaattttacagagtttaaaaagtgttacaaacatcaagttgggaagaaaagcatttattgatgccaatgggatgaaaattctgtataatacttcgcaattgcctgttattcctgtgactggtcctgtggctcagctctacagcttacctcctgaagtggatgacgtagtagatgaaagtgatgacaacgatgatattgatgtagaagctgaaaacgaaactgagaatgaagatgacctagatcaaaattttaagaatgatgatattgaaacagatattaacaaactaaaaccccagcaagaaccgggacgaacaatagaagatctaaaaatgtatgaacaccttttccctgagcttgttgatgattttcaggactatgatttaatctccaaagaaccaaagccttttgtatttgagggaaaagtacgtggtcctattgttgttcctacggcaggcgaggaaacatctgggaattctggcaatttaagaaaagttgtaatgaaggagaacatatcttctaaaggagatgaaggtgaaaagaagtctacctttatggatctagcaaaagaagatattaaagataatgatagaacattacaacagcagccaggtgatcaaaatagaactatttcatcagtccatggtttaaacaatgatattgtaaaggccttggaccgaattacattgcagaatattccttctcaaacagccccaggttttactgcagaaatgaagaaggactgcagtcttcctcttactgtccttacctgtgctaaagcatgtccacacatggctacttgtggaaatgttctgtttgagggaagaacagttcagctagggaagctttgctgcactggagttgaaactgaagatgatgaagatactgagtcaaattcatcggtagaacaagcatcggttgaagtacctgatggaccaacactccatgacccagacctctatattgagattgtgaaaaatacgaagtctgtcccagaatattcagaggtggcttatcccgattattttggtcacattccgcctccattcaaagagcctattttagaaaggccttatggtgtacaaaggacaaaaattgctcaagatattgaaaggctaatacatcagagtgatatcatagatcgtgtggtatatgacttggataacccaaattacaccattccagaagagggagatattttgaaatttaactccaaatttgagtctgggaatctgcgcaaagtaattcaaattagaaaaaatgaatatgatcttattctgaactcagacataaacagcaatcattatcatcagtggttttactttgaagtcagtggaatgcgaccaggtgttgcttacaggtttaacatcattaactgtgaaaagtccaacagtcagtttaattatggtatgcaaccactcatgtattcggttcaggaagcattaaatgccagaccatggtggattcgtatggggactgacatttgttactataaaaatcatttctcaagaagttcagttgctgcaggtgggcaaaagggaaaatcctactatacaattacatttactgtcaattttccacataaagatgatgtttgctactttgcttatcactatccatatacgtattcaactttacagatgcatcttcaaaaattggaatcagcacacaatcctcagcaaatctattttcggaaagatgtgttatgtgaaaccctgtctggaaacagctgccccttggtgactataacagcaatgccagagtctaattattatgaacatatctgccatttcagaaatcgcccttacgttttcttgtctgctcgggtacatcctggagaaactaatgcaagttgggttatgaaaggaacgttggaatatctcatgagcaataaccccactgctcagagcttacgagaatcttatatttttaaaattgtccctatgttaaatccagatggtgtcatcaatggaaatcatcgctgttctttaagtggagaggatttgaataggcagtggcaaagtccaagtccggatttacatcctacaatttaccatgctaaggggctgttgcaatacttggctgcagtgaagcgtttacccttggtttattgtgattatcatggccattcccgaaagaagaatgtatttatgtatggttgcagcatcaaagagacagtgtggcataccaatgataatgcaacttcatgtgatgttgtggaggatacgggatacaggacattgcctaagatactgagccatatcgccccagcattttgcatgagcagctgtagcttcgtagtggaaaaatctaaagaatccacagcacgtgttgtagtttggagggaaataggagtacaaagaagttataccatggagagtactttatgtggctgtgatcagggaaaatacaagggtttacagattggtacccgagaactggaagagatgggagcaaaattttgtgttggtcttttacgtttgaaaagactgacctctccattggagtataatctgccttccagcctgcttgactttgaaaatgatttaattgaatcaagctgcaaagtaactagccctaccacttatgtcttggatgaagatgaacctcgattccttgaagaagttgattacagtgcagaaagtaatgatgagttagatattgagttggctgaaaatgtaggagattatgaaccttctgctcaagaagaagtactttctgactctgaattatcaagaacatacctaccttgagcccgctgccatctcttgttaactgcaaagaataaatgaaatatcttggtttttatttcccaggaagcttgagagaaatgagtttatacagagctgactcaaaaagacaaaaagtaacttgggccagtttggtttcaagataataaatgtgttattaattaatgataaaattggcgcttgttttattttcgatattcaatgcactttatgtagcattgaatgatcaaatattggatttacctttaaaaaaaaaacctgagtatcattgcatgaatttttatctccctatggttatatcctgcatcaagtggataattttgaagtgtgttcagaatataaaattgaaattttagagttgttgaaaatcctgacttgttgaaaactaatatatatgtacatggatttctatagatgtgtttgtttagaagtgggtagata

SEQ ID NO: 2680 - DNA, 2317 bp, Homo sapiens
  source 1..2317: mol_type = unassigned DNA
tctgctgtcaacattagagaacacaaaagatcttcaaactacacttaatatcttaagcattcttgttgagctggtgtcagctggtggaggtcgaagagtgagtttcttagtcaccaaaggtggttcacaaatattgttgcagttacttatgaatgccagcaaagaatctcccccacatgaggacttaatggtacagattcattctattcttgcaaagattggaccaaaagctgtgaattcagtatccttagggaaaaatggagttgtggaactgatgtttaaaatcattggaccatttagtaagaagaattccagtcttataaaggttgctttagacactcttgctgcattgctaaaatcaaaaacaaatgccaggagagctgtagacagaggatatgtccaagtgcttttaacaatttatgtagattggcaccgccatgataaccggcatagaaacatgctcattcggaaaggaattttacagagtttaaaaagtgttacaaacatcaagttgggaagaaaagcatttattgatgccaatgggatgaaaattctgtataatacttcgcaagaatgtctggcagtcaggactctggatcctcttgtcaatacctccagtctgataatgaggaagtgtttcccaaaaaatcgactgccactcccaacaattaaaagttcttttcatttccagttgcctgttattcctgtgactggtcctgtggctcagctctacagcttacctcctgaagtggatgacgtagtagatgaaagtgatgacaacgatgatattgatgtagaagctgaaaacgaaactgagaatgaagatgacctagatcaaaattttaagaatgatgatattgaaacagatattaacaaactaaaaccccagcaagaaccgggacgaacaatagaagatctaaaaatgtatgaacaccttttccctgagcttgttgatgattttcaggactatgatttaatctccaaagaaccaaagccttttgtatttgagggaaaagtacgtggtcctattgttgttcctacggcaggcgaggaaacatctgggaattctggcaatttaagaaaagttgtaatgaaggagaacatatcttctaaaggagatgaaggtgaaaagaagtctacctttatggatctagcaaaagaagatattaaagataatgatagaacattacaacagcagccaggtgatcaaaatagaactatttcatcagtccatggtttaaacaatgatattgtaaaggccttggaccgaattacattgcagaatattccttctcaaacagccccaggttttactgcagaaatgaagaaggactgcagtcttcctcttactgtccttacctgtgctaaagcatgtccacacatggctacttgtggaaatgttctgtttgagggaagaacagttcagctagggaagctttgctgcactggagttgaaactgaagatgatgaagatactgagtcaaattcatcggtagaacaagcatcggttgaagtacctgatggaccaacactccatgacccagacctctatattgagattgtgaaaaatacgaagtctgtcccagaatattcagaggtggcttatcccgattattttggtcacattccgcctccattcaaagagcctattttagaaaggccttatggtgtacaaaggacaaaaattgctcaagatattgaaaggctaatacatcagagtgatatcatagatcgtgtggtatatgacttggataacccaaattacaccattccagaagagggagatattttgaaatttaactccaaatttgagtctgggaatctgcgcaaagtaattcaaattagaaaaaatgaatatgatcttattctgaactcagacataaacagcaatcattatcatcagtggttttactttgaagtcagtggaatgcgaccaggtgttgcttacaggtttaacatcattaactgtgaaaagtccaacagtcagtttaattatgccctaccacttatgtcttggatgaagatgaacctcgattccttgaagaagttgattacagtgcagaaagtaatgatgagttagatattgagttggctgaaaatgtaggagattatgaaccttctgctcaagaagaagtactttctgactctgaattatcaagaacatacctaccttgagcccgctgccatctcttgttaactgcaaagaataaatgaaatatcttggtttttatttcccaggaagcttgagagaaatgagtttatacagagctgactcaaaaagacaaaaagtaacttgggccagtttggtttcaagata

SEQ ID NO: 2681 - DNA, 4640 bp, Homo sapiens
  source 1..4640: mol_type = unassigned DNA
agctggttcccgtggggcctcatgggatggttgtcgtatccttctgaggtcctttaaggaccgtctcggacctgggaacccccggaggaaaggtcaccccggtcttctcccacgccctacctcagtgccgcccccaagcgccccgcagcccttagtatctagaggattaacctccaagggcgtcccgggcctcgccttggcgtccggcccggcctgggcccttagggtctgcttagctcttccccaagactcgtgccattcccgagggaatctttgtcggcatcctggtcactgtgggggtttgaggtcgtcccggaagacttcagaaccaggcgaacctagacgaaggcggctggaatgaaccaggttaacattcaagatggtacatgctgaagccttttctcgtcctttgagtcggaatgaagttgttggtttaattttccgtttgacaatatttggtgcagtgacatactttactatcaaatggatggtagatgcaattgatccaaccagaaagcaaaaagtagaagctcagaaacaggcagaaaaactaatgaagcaaattggagtgaaaaatgtgaagctctcagaatatgaaatgagtattgctgctcatcttgtagaccctcttaatatgcatgttacttggagtgatatagcaggtttagatgatgtcattacggatctgaaagacacagtcatcttacctatcaaaaagaaacatttgtttgagaattccaggcttctgcagcctccaaaaggtgttcttctctatgggcctccaggctgtggtaaaacgttgattgccaaggccacagccaaagaagcaggctgtcgatttattaaccttcagccttcgacactgaccgataagtggtatggagaatctcagaaattggctgctgctgtcttctcccttgccataaagctacaaccatccatcatctttatagatgaaatagactcctttctacgaaaccgttcaagttctgaccatgaagctacagccatgatgaaagctcagtttatgagtctctgggatggattggatactgatcacagctgccaggtcatagtaatgggagctaccaatcgtcctcaggaccttgactcggctataatgagaagaatgcctacaagatttcatatcaaccagcctgctttaaaacagagagaagcaatcctgaaactcatcttgaaaaatgaaaatgtggataggcatgtagacctgctagaagttgcccaggaaactgatgggttttcaggaagtgacctaaaagagatgtgtcgagatgctgccctcctctgtgttagagaatatgttaattctacatcagaagaaagccatgacgaagatgaaattcggcctgttcaacagcaggacctgcatcgggcaattgaaaagatgaagaaatcaaaggatgcagcatttcagaatgttttaacacatgtttgtttagattaagagtaaagatcatttgtacagttcagtgatctagtttggtgtgtcctcttatcagttagtggaaatagaacggaaagagtgctctttaaacaatgagggagctcagtgtttatggttttatactctgaattctaagttattgagatatagttgttacataggtggtattactgttggtcaaaaatcatgaggaggaacagttgaatccagcctgaacgtgggtgcttgtgtttgaccttttcagccatatattgtacagccttatagaatctaagctggtcttaaagtcataaatgattcattgggtcattagtgagaaacggggatgtggttaggtgctggttcctagacatgtgagtatgcgtttgtgtgtgtgcgtgtatgtatgtgtatattaaatgtatatatccacacattttatattgacattctgtagatatgtttgaatatagaaactttttttaccccaactactgaatccaggagtaccaaataatatatagtaaaactaagatttaaggttgtgtcaaaaaggtacagtgattcagccatttccatttgtcatttgtttcaaccttttttaagttgagtgtttttatttctgcagttattagttggatcctccacatcttgcatatatacatgggctcaattattatgtttgtcaggataatcaaatgaaaatactagttcagtgatcagcattgaatggttgttaggcagccatgtgctcaacactgatttcacctcttgagtataaactttttaaatttaaattggtttacatgaaagtggattaaaaggcctttcaaaagaatgggtttgaaaaacctcagtaccctttaatacatgtacatttctttccttttttcatttaatgtaacatgtctgttgtaactatgtttcttaaatattattttaaggttatgtgttctttaattatggtcaaatataatttggtcaccaaaaatgaaataatagtttaaaacaagtagctgttactaagtgtgctaaaaatactcattttataattaattttagttttcttagtatattattataaattgtgccctaagtcaggtacaaatgtacacatcaaaatgcccatattgtatctatctgtagtcgtttaatgtgaattatatgtgaatttttttcaaaattttactaaccagaattctgttataggcacctaaccacgcagcatgaggaaaacggcacaacacaatcttgaggtgccttctgaatcatcagattaaattatgcttcatatgtttttgcttttactgtatttctttaaaaactctaaatctttattcatgtgtcactggattaatttatctgataatgtgtctcacaagaatctgttagatcgtttattcttcagttgtactttgaatggtggggtggaagtttcaggtgaacaatggataacaaaaagcaagttatggaagattgtgaagaggatggaaaaactgaatacaagataccaaaaatgaaaaaaagtgtcccatttttaataactatattctattattttataaatgtgtaataaaggggtccctctttattggttgttctccacttaatctttggtctttttcagtaattttaagttttctgggattttttttggtttataaaacttgtgtttagactttatcttgctatggagttttcacacttctatagcacatatcctagtatctagtcatttctgttttaatatgaatttcagtaatttaattttaatctggtgacatattaatcgaaaataaggagtaatgtatacctccacatgtcctttctttttgtcttctcttaaattcacaatatccagtaggagtggttattcaatttcttcgtggttttaatcatcaaatgaagttagagaagtatactaatcccagcaactatgactcatctaggcatgttaagaccataaagtaattcaggaaactattttcctgatttttaaataacttttagtgttatgtaacatctatccttctgttttagacatgcatttcacatatagttgaattctagattctaagataattcattttgggtaatacttcagagtactggatctagaatcaggcttcctgaatttaaactcaggctccccattaactgtgtgtctgtgagcccagtttctcatctgtaaaatggggcaacagtggcactcatcttaaagggttggataataaaataatgcatgtaaggccctcagcatagtgcctggcacagaattactgctcaaatgttagctgtcgtattaatattgtcacttttgcacactgatgtacatttcctgttgaccaggctcattctttaagcattctccatgcttaaaccagttccataatccctaggcctgtactccagggattgagactgaaaggatcatttatgccatgtttctctaaaagcatcattgctggaagacttttgataagtctgatgtgtctcaagctattctcaggccttttttgtagagtttagaaatgaagtatttgaatcaatttagtatctcctttactatgtttctccttttaatctcagccaaccccctacctgcaggtaaacccagcattcattaagagctgggttggggtactctattctgtatgcatcataatagcttaacattatttagtagctgtaacttacaggtttaatgctagatgaggatgtctcaagccgtgagtgtgcttgtgtaaaaatggtggcaacatcatctcgttggtaggaattttttacttgaattgttattttgggaaaatgttaacagatttcttctggataaagaaaataaattggatgatgtatattttatgtttctttttagcttctcttaaaatcagaatattgaacagaattctgatatgctgaatatatatagtgcatggctgaaactccagcaccaactgggtgcttcaaatgaagtcatagaataattccatctagagctgacagaaatctttcagagccttcattattaaatttgttatagatttagttatcaaagatagagttctctaatcttttttttaaagctaaagttctctttatttacatgtataggaaaacattctgcctaaatcatgatgttaatgaaaatcatattgaggagaacttgaaccttattaaatatgagcttctaacataa

SEQ ID NO: 2682 - DNA, 2939 bp, Homo sapiens
  source 1..2939: mol_type = unassigned DNA
gtatttttcaaataaaatgattaattctactaccaaataaatcttaatttctagtctacttctagtttgcaagaggagctttaaatgtatttgtttacttaacatttaaaaatccatttctccttaaaatgaaacactttttttaaggtaggtaatattttaatttgactagaagttagtttttctttcttagtttaagctactttgttagtcttacaattttaataagtatagttattacctagtgacatttctgtttgtttttttaaggttaacattcaagatggtacatgctgaagccttttctcgtcctttgagtcggaatgaagttgttggtttaattttccgtttgacaatatttggtgcagtgacatactttactatcaaatggatggtagatgcaattgatccaaccagaaagcaaaaagtagaagctcagaaacaggcagaaaaactaatgaagcaaattggagtgaaaaatgtgaagctctcagaatatgaaatgagtattgctgctcatcttgtagaccctcttaatatgcatgttacttggagtgatatagcaggtttagatgatgtcattacggatctgaaagacacagtcatcttacctatcaaaaagaaacatttgtttgagaattccaggcttctgcagcctccaaaaggtgttcttctctatgggcctccaggctgtggtaaaacgttgattgccaaggccacagccaaagaagcaggctgtcgatttattaaccttcagccttcgacactgaccgataagtggtatggagaatctcagaaattggctgctgctgtcttctcccttgccataaagctacaaccatccatcatctttatagatgaaatagactcctttctacgaaaccgttcaagttctgaccatgaagctacagccatgatgaaagctcagtttatgagtctctgggatggattggatactgatcacagctgccaggtcatagtaatgggagctaccaatcgtcctcaggaccttgactcggctataatgagaagaatgcctacaagatttcatatcaaccagcctgctttaaaacagagagaagcaatcctgaaactcatcttgaaaaatgaaaatgtggataggcatgtagacctgctagaagttgcccaggaaactgatgggttttcaggaagtgacctaaaagagatgtgtcgagatgctgccctcctctgtgttagagaatatgttaattctacatcagaagaaagccatgacgaagatgaaattcggcctgttcaacagcaggacctgcatcgggcaattgaaaagatgaagaaatcaaaggatgcagcatttcagaatgttttaacacatgtttgtttagattaagagtaaagatcatttgtacagttcagtgatctagtttggtgtgtcctcttatcagttagtggaaatagaacggaaagagtgctctttaaacaatgagggagctcagtgtttatggttttatactctgaattctaagttattgagatatagttgttacataggtggtattactgttggtcaaaaatcatgaggaggaacagttgaatccagcctgaacgtgggtgcttgtgtttgaccttttcagccatatattgtacagccttatagaatctaagctggtcttaaagtcataaatgattcattgggtcattagtgagaaacggggatgtggttaggtgctggttcctagacatgtgagtatgcgtttgtgtgtgtgcgtgtatgtatgtgtatattaaatgtatatatccacacattttatattgacattctgtagatatgtttgaatatagaaactttttttaccccaactactgaatccaggagtaccaaataatatatagtaaaactaagatttaaggttgtgtcaaaaaggtacagtgattcagccatttccatttgtcatttgtttcaaccttttttaagttgagtgtttttatttctgcagttattagttggatcctccacatcttgcatatatacatgggctcaattattatgtttgtcaggataatcaaatgaaaatactagttcagtgatcagcattgaatggttgttaggcagccatgtgctcaacactgatttcacctcttgagtataaactttttaaatttaaattggtttacatgaaagtggattaaaaggcctttcaaaagaatgggtttgaaaaacctcagtaccctttaatacatgtacatttctttccttttttcatttaatgtaacatgtctgttgtaactatgtttcttaaatattattttaaggttatgtgttctttaattatggtcaaatataatttggtcaccaaaaatgaaataatagtttaaaacaagtagctgttactaagtgtgctaaaaatactcattttataattaattttagttttcttagtatattattataaattgtgccctaagtcaggtacaaatgtacacatcaaaatgcccatattgtatctatctgtagtcgtttaatgtgaattatatgtgaatttttttcaaaattttactaaccagaattctgttataggcacctaaccacgcagcatgaggaaaacggcacaacacaatcttgaggtgccttctgaatcatcagattaaattatgcttcatatgtttttgcttttactgtatttctttaaaaactctaaatctttattcatgtgtcactggattaatttatctgataatgtgtctcacaagaatctgttagatcgtttattcttcagttgtactttgaatggtggggtggaagtttcaggtgaacaatggataacaaaaagcaagttatggaagattgtgaagaggatggaaaaactgaatacaagataccaaaaatgaaaaaaagtgtcccatttttaataactatattctattattttataaatgtgtaataaaggggtccctcttta

SEQ ID NO: 2683 - DNA, 1277 bp, Homo sapiens
  source 1..1277: mol_type = unassigned DNA
aggcagaaaaactaatgaagcaaattggagtgaaaaatgtgaagctctcagaatatgaaatgagtattgctgctcatcttgtagaccctcttaatatgcatgttacttggagtgatatagcaggtttagatgatgtcattacggatctgaaagacacagtcatcttacctatcaaaaagaaacatttgtttgagaattccaggcttctgcagcctccaaaaggtgttcttctctatgggcctccaggctgtggtaaaacgttgattgccaaggccacagccaaagaagcaggctgtcgatttattaaccttcagccttcgacactgaccgataagtggtatggagaatctcagaaattggctgctgctgtcttctcccttgccataaagctacaaccatccatcatctttatagatgaaatagactcctttctacgaaaccgttcaagttctgaccatgaagctacagccatgatgaaagctcagtttatgagtctctgggatggattggatactgatcacagctgccaggctttaaaacagagagaagcaatcctgaaactcatcttgaaaaatgaaaatgtggataggcatgtagacctgctagaagttgcccaggaaactgatgggttttcaggaagtgacctaaaagagatgtgtcgagatgctgccctcctctgtgttagagaatatgttaattctacatcagaagaaagccatgacgaagatgaaattcggcctgttcaacagcaggacctgcatcgggcaattgaaaagatgaagaaatcaaaggatgcagcatttcagaatgttttaacacatgtttgtttagattaagagtaaagatcatttgtacagttcagtgatctagtttggtgtgtcctcttatcagttagtggaaatagaacggaaagagtgctctttaaacaatgagggagctcagtgtttatggttttatactctgaattctaagttattgagatatagttgttacataggtggtattactgttggtcaaaaatcatgaggaggaacagttgaatccagcctgaacgtgggtgcttgtgtttgaccttttcagccatatattgtacagccttatagaatctaagctggtcttaaagtcataaatgattcattgggtcattagtgagaaacggggatgtggttaggtgctggttcctagacatgtgagtatgcgtttgtgtgtgtgcgtgtatgtatgtgtatattaaatgtatatatccacacattttatattgacattctgtagatatg

SEQ ID NO: 2684 - DNA, 1243 bp, Homo sapiens
  source 1..1243: mol_type = unassigned DNA
agctggttcccgtggggcctcatgggatggttgtcgtatccttctgaggtcctttaaggaccgtctcggacctgggaacccccggaggaaaggtcaccccggtcttctcccacgccctacctcagtgccgcccccaagcgccccgcagcccttagtatctagaggattaacctccaagggcgtcccgggcctcgccttggcgtccggcccggcctgggcccttagggtctgcttagctcttccccaagactcgtgccattcccgagggaatctttgtcggcatcctggtcactgtgggggtttgaggtcgtcccggaagacttcagaaccaggcgaacctagacgaaggcggctggaatgaaccaggttaacattcaagatggtacatgctgaagccttttctcgtcctttgagtcggaatgaagttgttggtttaattttccgtttgacaatatttggtgcagtgacatactttactatcaaatggatggtagatgcaattgatccaaccagaaagcaaaaagtagaagctcagaaacaggcagaaaaactaatgaagcaaattggagtgaaaaatgtgaagctctcagaatatgaaatgagtattgctgctcatcttgtagaccctcttaatatgcatgttacttggagtgatatagcaggtttagatgatgtcattacggatctgaaagacacagtcatcttacctatcaaaaagaaacatttgtttgagaattccaggcttctgcagcctccaaaaggtgttcttctctatgggcctccaggctgtggtaaaacgttgattgccaaggccacagccaaagaagcaggctgtcgatttattaaccttcagccttcgacactgaccgataagtggtatggagaatctcagaaattggctgctgctgtcttctcccttgccataaagctacaaccatccatcatctttatagatgaaatagactcctttctacgaaaccgttcaagttctgaccatgaagctacagccatgatgaaagctcagtttatgagtctctgggatggattggatactgatcacagctgccaggtcatagtaatgggagctaccaatcgtcctcaggaccttgactcggctataatgagaagaatgcctacaagatttcatatcaaccagcctgctttaaaacagagagaagcaatcctgaaactcatcttgaaaaatgaaaatctgaggaaactgaaacccagagaagttttgtaa

SEQ ID NO: 2685 - DNA, 5565 bp, Homo sapiens
  source 1..5565: mol_type = unassigned DNA
cgcggagcttgtggcgccagaattcggagcgcggaagagccagagctgcgagcgcctggagctggatctctctccggtcgcgcacgccgaggccagtagggagagaagatggtggttctccgcagcagcttggagctgcacaaccactccgcggcctcggccacgggctccttggacctgtccagtgacttcctcagtctggagcacatcggccggaggcggctccgctcggccggcgcggcgcagaagaaacccgcggcgaccacagccaaagcgggcgatgggtcatcagttaaggaagttgaaacctaccaccggacacgtgctttaagatctttgagaaaagatgcacagaattcttcagattctagttttgagaagaatgtggaaataacggagcaacttgctaatggcaggcattttacaaggcagttggccagacagcaggctgataaaaaaaaagaagagcacagagaagacaaagtgattccagttactcggtcattgagggctagaaacatcgttcaaagtacagaacacttacatgaagataatggtgatgttgaagtgcgtcgaagttgtaggattagaagtcgttatagtggtgtaaaccagtccatgctgtttgacaaacttataactaacactgctgaagctgtacttcaaaaaatggatgacatgaagaagatgcgtagacagcgaatgagagaacttgaagacttgggagtgtttaatgaaacagaagaaagcaatcttaatatgtacacaagaggaaaacagaaagatattcaaagaactgatgaagaaacaactgataatcaagaaggcagtgtggagtcatctgaagagggtgaagaccaagaacatgaagatgatggtgaagatgaagatgatgaagatgatgatgatgatgacgatgatgatgatgatgatgatgatgaagatgatgaagatgaagaagatggagaagaagagaatcagaagcgatattatcttagacagagaaaagctactgtttactatcaggctccattggaaaaacctcgtcaccagagaaagcccaacatattttatagtggcccagcttctcctgcaagaccaagataccgattatcttccgcaggaccaagaagtccttactgtaaacgaatgaacaggcgaaggcatgcaatccacagtagtgactcgacttcatcttcctcctctgaagatgaacagcactttgagaggcggaggaaaaggagtcgtaatagggctatcaataggtgcctcccactaaattttcggaaagatgaattaaaaggcatttataaagatcgaatgaaaattggagcaagccttgccgatgttgatccaatgcaactagattcttcagtacgatttgatagtgttggtggcctgtctaatcatatagcagctctaaaagagatggtggtgtttccattactttatccagaagtctttgaaaaatttaaaattcaacccccaagaggttgtttgttttatgggccacctggaactggaaagactctggttgccagagcacttgccaatgagtgcagtcaaggggataaaagagtagcatttttcatgaggaaaggtgctgattgtctaagtaaatgggtaggagaatctgaaagacagctacgattgctgtttgatcaggcctatcagatgcgcccatcaattattttttttgacgaaattgatggtctggctccagtacggtcaagcaggcaagatcagattcacagttctattgtttccaccctgctagctcttatggatggattggacagcagaggggaaattgtggtcattggtgctacgaacaggctagattctatagatcctgctttacgaaggcctggtcgctttgatagagaattcctctttagcctgcctgataaagaggctcgaaaagagattctaaagattcacaccagggattggaatcccaaaccactggacacatttttagaagagctagcagaaaactgtgttggatactgtggagcagatattaaatcaatatgtgctgaagctgctttatgtgctttacgacgacgctacccacagatctataccactagtgagaaactgcagttggatctctcttcaattaatatctcagctaaggatttcgaggtagctatgcaaaagatgataccagcctcccaaagagctgtgacatcacctgggcaggcactgtccaccgttgtgaaaccactcctgcaaaacactgttgacaagattttagaagccctgcagagagtatttccacatgcagaattcagaacaaataaaacattagactcagatatttcttgtcctctgctagaaagtgacttggcttacagtgatgatgatgttccatcagtttatgaaaatggactttctcagaaatcttctcataaggcaaaagacaattttaattttcttcatttgaatagaaatgcttgttaccaacctatgtcttttcgaccaagaatattgatagtaggagaaccaggatttgggcaaggttctcacttggcaccagctgtcattcatgctttggaaaagtttactgtatatacattagacattcctgttctttttggagttagtactacatcccctgaagaaacatgtgcccaggtgattcgtgaagctaagagaacagcaccaagtatagtgtatgttcctcatatccacgtgtggtgggaaatagttggaccgacacttaaagccacatttaccacattattacagaatattccttcatttgctccagttttactacttgcaacttctgacaaaccccattccgctttgccagaagaggtgcaagaattgtttatccgtgattatggagagatttttaatgtccagttaccggataaagaagaacggacaaaattttttgaagatttaattctaaaacaagctgctaagcctcctatatcaaaaaagaaagcagttttgcaggctttggaggtactcccagtagcaccaccacctgagccaagatcactgacagcagaagaagtgaaacgactagaagaacaagaagaagatacatttagagaactgaggattttcttaagaaatgttacacataggcttgctattgacaagcgattccgagtgtttactaagcctgttgaccctgatgaggttcctgattatgtcactgtaataaagcaaccaatggacctttcatctgtaatcagtaaaattgatctacacaagtatctgactgtgaaagactatttgagagatattgatctaatctgtagtaatgccttagaatacaatccagatagagatcctggagatcgtcttattaggcatagagcctgtgctttaagagatactgcctatgccataattaaagaagaacttgatgaagactttgagcagctctgtgaagaaattcaggaatctagaaagaaaagaggttgtagctcctccaaatatgccccgtcttactaccatgtgatgccaaagcaaaattccactcttgttggtgataaaagatcagacccagagcagaatgaaaagctaaagacaccgagtactcctgtggcttgcagcactcctgctcagttgaagaggaaaattcgcaaaaagtcaaactggtacttaggcaccataaaaaagcgaaggaagatttcacaggcaaaggatgatagccagaatgccatagatcacaaaattgagagtgatacagaggaaactcaagacacaagtgtagatcataatgagaccggaaacacaggagagtcttcggtggaagaaaatgaaaaacagcaaaatgcctctgaaagcaaactggaattgagaaataattcaaatacttgtaatatagagaatgagcttgaagactctaggaagactacagcatgtacagaattgagagacaagattgcttgtaatggagatgcttctagctctcagataatacatatttctgatgaaaatgaaggaaaagaaatgtgtgttctgcgaatgactcgagctagacgttcccaggtagaacagcagcagctcatcactgttgaaaaggctttggcaattctttctcagcctacaccctcacttgttgtggatcatgagcgattaaaaaatcttttgaagactgttgttaaaaaaagtcaaaactacaacatatttcagttggaaaatttgtatgcagtaatcagccaatgtatttatcggcatcgcaaggaccatgataaaacatcacttattcagaaaatggagcaagaggtagaaaacttcagttgttccagatgatgatgtcatggtatcgagtattctttatattcagttcctatttaagtcatttttgtcatgtccgcctaattgatgtagtatgaaaccctgcatctttaaggaaaagattaaaatagtaaaataaaagtatttaaactttcctgatatttatgtacatattaagataaatgtcatgtgtaagataactgataaatattggaactttgctagaacaagaccctgtagtaatagtaataatagttgaagtttggccaactcttaataaagttattttggtaactaatgttttatggcacttaagaataattagcagcgttaaattttgtttgtattaagcacttttaattttatccttcctaaaaatagtttattgtatctgacaagaaacttacttaaccattgtgtccttcccatcttttttgtcatctttgttttcttcaaatgccctcctcccatctgccttgagattccctcgtcttcacttaaaagccagagtgcaagtcatgatttgcgggagggctcttgaaccacttctggctgcaccacaattctgtacttgagtatcacagtcattgtttttgagacaaacatttttataattctaatttgggttaataaagattttaaatatttcttggtttacttttgtaattatatacacaacaaatgtattaataactaccttgttaaacaccttttaatagcacaaggtttttatatttgcaagctgttgatatctttctaaaactgtttaggttatagtctattgatactttttatatacaattttataaatataaatattataattttatattaatggtaccaaaaatacatttcttaaggttaaaagcatgcacttccatgcatacttgcttttggggagagtggggagaagacattctaataatcagtttgtgaaatagcttctgttggaaaccttttgaggggaataaggaatggtcatctaaaatgagagattctggattttaatgcagttcaaagttgagctgtatttttgttgttgatttatctggattttttttaaagccttctaaaacccagtgaattcaataccttaattagtacatactatcttatgtaatgcataaagcaatgccagtcactgagaacatttaaatatatttatattcctggagatacacattctcatttttgttggtttattataaattattcttctagatgcatcttttataactaggatttcattttgtgtgtatagcttatgtaataaattttaaaggtgaaaactctcttaaa

SEQ ID NO: 2686 - DNA, 2330 bp, Homo sapiens
  source 1..2330: mol_type = unassigned DNA
gggagccctggcccttgccgctcctcgccgctgtcggcagccacttcccgggcgagactgcgcccccggagcacccccggccggagccgtgtcgcgtgccgggaggatcggactctttccgtcacccgtttgcacctctgcagctgtcaggagcgggtcaggttatgccaaggacgccctgaatctggcacagatgcaggagcagacgctgcagttggagcaacagtccaagctcaaagagtatgaggccgccgtggagcagctcaagagcgagcagatccgggcgcaggctgaggagaggaggaagaccctgagcgaggagacccggcagcaccaggccagggcccagtatcaagacaagctggcccggcagcgctacgaggaccaactgaagcagcagcaacttctcaatgaggagaatttacggaagcaggaggagtccgtgcagaagcaggaagccatgcggcgagccaccgtggagcgggagatggagctgcggcacaagaatgagatgctgcgagtggaggccgaggcccgggcgcgcgccaaggccgagcgggagaatgcagacatcatccgcgagcagatccgcctgaaggcggccgagcaccgtcagaccgtcttggagtccatcaggacggctggcaccttgtttggggaaggattccgtgcctttgtgacagactgggacaaagtgacagccacggtggctgggctgacgctgctggctgttggggtctactcagccaagaatgccacgcttgtcgccggccgcttcatcgaggctcggctggggaagccgtccctagtgagggagacgtcccgcatcacggtgcttgaggcgctgcggcaccccatccaggtcagccggcggctcctcagtcgaccccaggacgcgctggagggtgttgtgctcagtcccagcctggaagcacgggtgcgcgacatcgccatagcaacaaggaacaccaagaagaaccgcagcctgtacaggaacatcctgatgtacgggccaccaggcaccgggaagacgctgtttgccaagaaactcgccctgcactcaggcatggactacgccatcatgacaggcggggacgtggcccccatggggcgggaaggcgtgaccgccatgcacaagctctttgactgggccaataccagccggcgcggcctcctgctctttgtggatgaagcggacgccttccttcggaagcgagccaccgagaagataagcgaggacctcagggccacactgaacgccttcctgtaccgcacgggccagcacagcaacaagttcatgctggtcctggccagcaaccaaccagagcagttcgactgggccatcaatgaccgcatcaatgagatggtccacttcgacctgccagggcaggaggaacgggagcgcctggtgagaatgtattttgacaagtatgttcttaagccggccacagaaggaaagcagcgcctgaagctggcccagtttgactacgggaggaagtgctcggaggtcgctcggctgacggagggcatgtcgggccgggagatcgctcagctggccgtgtcctggcaggccacggcgtatgcctccgaggacggggtcctgaccgaggccatgatggacacccgcgtgcaagatgctgtccagcagcaccagcagaagatgtgctggctgaaggcggaagggcctgggcgtggggacgagccctccccatcctgagtccacagggagatccacagctcacggagcctggccgcggacccctcccacccctgccttgccggcccctgcacatttaggatatgctcctgggtggggactgggctgtgcccagggcctctgtcccccaggatgtcttgtggtgcgggtcggccgttctgccccccagggcaccccctgttgtaggcactggctagggaggggcaggcctccttcctgcccctcgagacactcttgggagatgcattttccgtctggctcacagggggagggtgaggctttgcaccccagcccctgcccaggccactgtgagggtgggtgctggctgagcccccggggcagcaggagccaggcaggtgatgtctttgttctcggctcccacagcagagccaggtgagggggcgcctgccagggccagacccaggtggggcagcctgaaccctgcttccccctgtggccggcatgccccgatctttcacacactggtgaccctgagagaggagggaggagggaacctggcgggggtgtctgaggccgcactgtcagctggccggtccaagcctgtggctggagctggggtctgtttacctaataaagtcccacaggtgcctca

SEQ ID NO: 2687 - DNA, 2612 bp, Homo sapiens
  source 1..2612: mol_type = unassigned DNA
accggctcgcggcgcgtggaggctgctcccagccgcgcgcgagtcagactcgggtgggggtcccggcggcggtagcggcggcggcggtgcgagcatgtcgtggctcttcggcattaacaagggccccaagggtgaaggcgcggggccgccgccgcctttgccgcccgcgcagcccggggccgagggcggcggggaccgcgggttgggagaccggccggcgcccaaggacaaatggagcaacttcgaccccaccggcctggagcgcgccgccaaggcggcgcgcgagctggagcactcgcgttatgccaaggacgccctgaatctggcacagatgcaggagcagacgctgcagttggagcaacagtccaagctcaaaatgcggctggaagccctgagcctgctgcacacactagtctgggcatggagtctctgccgtgccggagccgtgcagacacaggagcggctgtcaggcagtgccagccctgagcaagtgccagctggtgagtgctgtgctctgcaggagtatgaggccgccgtggagcagctcaagagcgagcagatccgggcgcaggctgaggagaggaggaagaccctgagcgaggagacccggcagcaccaggccagggcccagtatcaagacaagctggcccggcagcgctacgaggaccaactgaagcagcagcaacttctcaatgaggagaatttacggaagcaggaggagtccgtgcagaagcaggaagccatgcggcgagccaccgtggagcgggagatggagctgcggcacaagaatgagatgctgcgagtggaggccgaggcccgggcgcgcgccaaggccgagcgggagaatgcagacatcatccgcgagcagatccgcctgaaggcggccgagcaccgtcagaccgtcttggagtccatcaggacggctggcaccttgtttggggaaggattccgtgcctttgtgacagactgggacaaagtgacagccacggtggctgggctgacgctgctggctgttggggtctactcagccaagaatgccacgcttgtcgccggccgcttcatcgaggctcggctggggaagccgtccctagtgagggagacgtcccgcatcacggtgcttgaggcgctgcggcaccccatccaggtcagccggcggctcctcagtcgaccccaggacgcgctggagggtgttgtgctcagtcccagcctggaagcacgggtgcgcgacatcgccatagcaacaaggaacaccaagaagaaccgcagcctgtacaggaacatcctgatgtacgggccaccaggcaccgggaagacgctgtttgccaagaaactcgccctgcactcaggcatggactacgccatcatgacaggcggggacgtggcccccatggggcgggaaggcgtgaccgccatgcacaagctctttgactgggccaataccagccggcgcggcctcctgctctttgtggatgaagcggacgccttccttcggaagcgagccaccgagaagataagcgaggacctcagggccacactgaacgccttcctgtaccgcacgggccagcacagcaacaagttcatgctggtcctggccagcaaccaaccagagcagttcgactgggccatcaatgaccgcatcaatgagatggtccacttcgacctgccagggcaggaggaacgggagcgcctggtgagaatgtattttgacaagtatgttcttaagccggccacagaaggaaagcagcgcctgaagctggcccagtttgactacgggaggaagtgctcggaggtcgctcggctgacggagggcatgtcgggccgggagatcgctcagctggccgtgtcctggcaggccacggcgtatgcctccgaggacggggtcctgaccgaggccatgatggacacccgcgtgcaagatgctgtccagcagcaccagcagaagatgtgctggctgaaggcggaagggcctgggcgtggggacgagccctccccatcctgagtccacagggagatccacagctcacggagcctggccgcggacccctcccacccctgccttgccggcccctgcacatttaggatatgctcctgggtggggactgggctgtgcccagggcctctgtcccccaggatgtcttgtggtgcgggtcggccgttctgccccccagggcaccccctgttgtaggcactggctagggaggggcaggcctccttcctgcccctcgagacactcttgggagatgcattttccgtctggctcacagggggagggtgaggctttgcaccccagcccctgcccaggccactgtgagggtgggtgctggctgagcccccggggcagcaggagccaggcaggtgatgtctttgttctcggctcccacagcagagccaggtgagggggcgcctgccagggccagacccaggtggggcagcctgaaccctgcttccccctgtggccggcatgccccgatctttcacacactggtgaccctgagagaggagggaggagggaacctggcgggggtgtctgaggccgcactgtcagctggccggtccaagcctgtggctggagctggggtctgtttacctaataaagtcccacaggtgcctca

SEQ ID NO: 2688 - DNA, 2492 bp, Homo sapiens
  source 1..2492: mol_type = unassigned DNA
ggcgcctgcgcagtggcggtgaccaccggctcgcggcgcgtggaggctgctcccagccgcgcgcgagtcagactcgggtgggggtcccggcggcggtagcggcggcggcggtgcgagcatgtcgtggctcttcggcattaacaagggccccaagggtgaaggcgcggggccgccgccgcctttgccgcccgcgcagcccggggccgagggcggcggggaccgcgggttgggagaccggccggcgcccaaggacaaatggagcaacttcgaccccaccggcctggagcgcgccgccaaggcggcgcgcgagctggagcactcgcgttatgccaaggacgccctgaatctggcacagatgcaggagcagacgctgcagttggagcaacagtccaagctcaaagagtatgaggccgccgtggagcagctcaagagcgagcagatccgggcgcaggctgaggagaggaggaagaccctgagcgaggagacccggcagcaccaggccagggcccagtatcaagacaagctggcccggcagcgctacgaggaccaactgaagcagcagcaacttctcaatgaggagaatttacggaagcaggaggagtccgtgcagaagcaggaagccatgcggcgagccaccgtggagcgggagatggagctgcggcacaagaatgagatgctgcgagtggaggccgaggcccgggcgcgcgccaaggccgagcgggagaatgcagacatcatccgcgagcagatccgcctgaaggcggccgagcaccgtcagaccgtcttggagtccatcaggacggctggcaccttgtttggggaaggattccgtgcctttgtgacagactgggacaaagtgacagccacggtggctgggctgacgctgctggctgttggggtctactcagccaagaatgccacgcttgtcgccggccgcttcatcgaggctcggctggggaagccgtccctagtgagggagacgtcccgcatcacggtgcttgaggcgctgcggcaccccatccaggtcagccggcggctcctcagtcgaccccaggacgcgctggagggtgttgtgctcagtcccagcctggaagcacgggtgcgcgacatcgccatagcaacaaggaacaccaagaagaaccgcagcctgtacaggaacatcctgatgtacgggccaccaggcaccgggaagacgctgtttgccaagaaactcgccctgcactcaggcatggactacgccatcatgacaggcggggacgtggcccccatggggcgggaaggcgtgaccgccatgcacaagctctttgactgggccaataccagccggcgcggcctcctgctctttgtggatgaagcggacgccttccttcggaagcgagccaccgagaagataagcgaggacctcagggccacactgaacgccttcctgtaccgcacgggccagcacagcaacaagttcatgctggtcctggccagcaaccaaccagagcagttcgactgggccatcaatgaccgcatcaatgagatggtccacttcgacctgccagggcaggaggaacgggagcgcctggtgagaatgtattttgacaagtatgttcttaagccggccacagaaggaaagcagcgcctgaagctggcccagtttgactacgggaggaagtgctcggaggtcgctcggctgacggagggcatgtcgggccgggagatcgctcagctggccgtgtcctggcaggccacggcgtatgcctccgaggacggggtcctgaccgaggccatgatggacacccgcgtgcaagatgctgtccagcagcaccagcagaagatgtgctggctgaaggcggaagggcctgggcgtggggacgagccctccccatcctgagtccacagggagatccacagctcacggagcctggccgcggacccctcccacccctgccttgccggcccctgcacatttaggatatgctcctgggtggggactgggctgtgcccagggcctctgtcccccaggatgtcttgtggtgcgggtcggccgttctgccccccagggcaccccctgttgtaggcactggctagggaggggcaggcctccttcctgcccctcgagacactcttgggagatgcattttccgtctggctcacagggggagggtgaggctttgcaccccagcccctgcccaggccactgtgagggtgggtgctggctgagcccccggggcagcaggagccaggcaggtgatgtctttgttctcggctcccacagcagagccaggtgagggggcgcctgccagggccagacccaggtggggcagcctgaaccctgcttccccctgtggccggcatgccccgatctttcacacactggtgaccctgagagaggagggaggagggaacctggcgggggtgtctgaggccgcactgtcagctggccggtccaagcctgtggctggagctggggtctgtttacctaataaagtcccacaggtgcctca

SEQ ID NO: 2689 - DNA, 2689 bp, Homo sapiens
  source 1..2689: mol_type = unassigned DNA
accggctcgcggcgcgtggaggctgctcccagccgcgcgcgagtcagactcgggtgggggtcccggcggcggtagcggcggcggcggtgcgagcatgtcgtggctcttcggcattaacaagggccccaagggtgaaggcgcggggccgccgccgcctttgccgcccgcgcagcccggggccgagggcggcggggaccgcgggttgggagaccggccggcgcccaaggacaaatggagcaacttcgaccccaccggcctggagcgcgccgccaaggcggcgcgcgagctggagcactcgcgttatgccaaggacgccctgaatctggcacagatgcaggagcagacgctgcagttggagcaacagtccaagctcaaaatgcggctggaagccctgagcctgctgcacacactagtctgggcatggagtctctgccgtgccggagccgtgcagacacaggagcggctgtcaggcagtgccagccctgagcaagtgccagctggtgagtgctgtgctctgcaggagtatgaggccgccgtggagcagctcaagagcgagcagatccgggcgcaggctgaggagaggaggaagaccctgagcgaggagacccggcagcaccaggccagggcccagtatcaagacaagctggcccggcagcgctacgaggaccaactgaagcagcagcaacttctcaatgaggagaatttacggaagcaggaggagtccgtgcagaagcaggaagccatgcggcgagccaccgtggagcgggagatggagctgcggcacaagaatgagatgctgcgagtggaggccgaggcccgggcgcgcgccaaggccgagcgggagaatgcagacatcatccgcgagcagatccgcctgaaggcggccgagcaccgtcagaccgtcttggagtccatcaggacggctggcaccttgtttggggaaggattccgtgcctttgtgacagactgggacaaagtgacagccacggtggctgggctgacgctgctggctgttggggtctactcagccaagaatgccacgcttgtcgccggccgcttcatcgaggctcggctggggaagccgtccctagtgagggagacgtcccgcatcacggtgcttgaggcgctgcggcaccccatccaggtcagccggcggctcctcagtcgaccccaggacgcgctggagggtgttgtgctcagtcccagcctggaagcacgggtgcgcgacatcgccatagcaacaaggaacaccaagaagaaccgcagcctgtacaggaacatcctgatgtacgggccaccaggcaccgggaagacgctgtttgccaagaaactcgccctgcactcaggcatggactacgccatcatgacaggcggggacgtggcccccatggggcgggaaggcgtgaccgccatgcacaagctctttgactgggccaataccagccggcgcggcctcctgctctttgtggatgaagcggacgccttccttcggaagcgagccaccgagaagataagcgaggacctcagggccacactgaacgccttcctgtaccgcacgggccagcacagcaacaaccccagtcacgtgtcacacggaggatcaagtcctgctggtcggccgtggctgactcctcaggcacgttgggctcccaggttcatgctggtcctggccagcaaccaaccagagcagttcgactgggccatcaatgaccgcatcaatgagatggtccacttcgacctgccagggcaggaggaacgggagcgcctggtgagaatgtattttgacaagtatgttcttaagccggccacagaaggaaagcagcgcctgaagctggcccagtttgactacgggaggaagtgctcggaggtcgctcggctgacggagggcatgtcgggccgggagatcgctcagctggccgtgtcctggcaggccacggcgtatgcctccgaggacggggtcctgaccgaggccatgatggacacccgcgtgcaagatgctgtccagcagcaccagcagaagatgtgctggctgaaggcggaagggcctgggcgtggggacgagccctccccatcctgagtccacagggagatccacagctcacggagcctggccgcggacccctcccacccctgccttgccggcccctgcacatttaggatatgctcctgggtggggactgggctgtgcccagggcctctgtcccccaggatgtcttgtggtgcgggtcggccgttctgccccccagggcaccccctgttgtaggcactggctagggaggggcaggcctccttcctgcccctcgagacactcttgggagatgcattttccgtctggctcacagggggagggtgaggctttgcaccccagcccctgcccaggccactgtgagggtgggtgctggctgagcccccggggcagcaggagccaggcaggtgatgtctttgttctcggctcccacagcagagccaggtgagggggcgcctgccagggccagacccaggtggggcagcctgaaccctgcttccccctgtggccggcatgccccgatctttcacacactggtgaccctgagagaggagggaggagggaacctggcgggggtgtctgaggccgcactgtcagctggccggtccaagcctgtggctggagctggggtctgtttacctaataaagtcccacaggtgcctc

SEQ ID NO: 2690 - DNA, 603 bp, Homo sapiens
  source 1..603: mol_type = unassigned DNA
aaactcgccctgcactcaggcatggactacgccatcatgacaggcggggacgtggcccccatggggcgggaaggcgtgaccgccatgcacaagctctttgactgggccaataccagccggcgcggcctcctgctctttgtggatgaagcggacgccttccttcggaagcgagccaccgagaagataagcgaggacctcagggccacactgaacgccttcctgtaccgcacgggccagcacagcaacaaccccagtcacgtgtcacacggaggatcaagtcctgctggtcggccgtggctgactcctcaggcacgttgggctcccaggttcatgctggtcctggccagcaaccaaccagagcagttcgactgggccatcaatgaccgcatcaatgagatggtccacttcgacctgccagggcaggaggaacgggagcgcctggtgagaatgtattttgacaagtatgttcttaagccggccacagaaggaaagcagcgcctgaagctggcccagtttgactacgggaggaagtgctcggaggtcgctcggctgacggagggcatgtcgggccgggagatcgctcagctggccgtgtcctggcag

SEQ ID NO: 2691 - DNA, 498 bp, Homo sapiens
  source 1..498: mol_type = unassigned DNA
gctgatggcgcgtcggagtccccggcgctccgcccagtcggcccagactgcagctcccggctgagatgtgtctttgccgccctcttctcccccagagggcccagtatcaagacaagctggcccggcagcgctacgaggaccaactgaagcagcagcaacttctcaatgaggagaatttacggaagcaggaggagtccgtgcagaagcaggaagccatgcggcgagccaccgtggagcgggagatggagctgcggcacaagaatgagatgctgcgagtggaggccgaggcccgggcgcgcgccaaggccgagcgggagaatgcagacatcatccgcgagcagatccgcctgaaggcggccgagcaccgtcagaccgtcttggagtccatcaggacggctggcaccttgtttggggaaggattccgtgcctttgtgacagactgggacaaagtgacagccacggtggctgggctgacgctgctggctgttggggtctact

SEQ ID NO: 2692 - DNA, 403 bp, Homo sapiens
  source 1..403: mol_type = unassigned DNA
ggtgtccggcctccctcccggggggccttcgcgggcttctgctggtgcttctgtgcctgtgggtctggattcctccagggcctgatcctgggtgcagatgcggctggaagccctgagcctgctgcacacactagtctgggcatggagtctctgccgtgccggagccgtgcagacacaggagcggctgtcaggcagtgccagccctgagcaagtgccagctggtgagtgctgtgctctgcaggagtatgaggccgccgtggagcagctcaagagcgagcagatccgggcgcaggctgaggagaggaggaagaccctgagcgaggagacccggcagcaccaggccagggcccagtatcaagacaagctggcccggcagcgctacgaggaccaactgaagcagcag

SEQ ID NO: 2693 - DNA, 2332 bp, Homo sapiens
  source 1..2332: mol_type = unassigned DNA
gggagccctggcccttgccgctcctcgccgctgtcggcagccacttcccgggcgagactgcgcccccggagcacccccggccggagccgtgtcgcgtgccgggaggatcggactctttccgtcacccgtttgcacctctgcagctgtcaggagcgggtcaggttatgccaaggacgccctgaatctggcacagatgcaggagcagacgctgcagttggagcaacagtccaagctcaaagagtatgaggccgccgtggagcagctcaagagcgagcagatccgggcgcaggctgaggagaggaggaagaccctgagcgaggagacccggcagcaccaggccagggcccagtatcaagacaagctggcccggcagcgctacgaggaccaactgaagcagcagcaacttctcaatgaggagaatttacggaagcaggaggagtccgtgcagaagcaggaagccatgcggcgagccaccgtggagcgggagatggagctgcggcacaagaatgagatgctgcgagtggaggccgaggcccgggcgcgcgccaaggccgagcgggagaatgcagacatcatccgcgagcagatccgcctgaaggcggccgagcaccgtcagaccgtcttggagtccatcaggacggctggcaccttgtttggggaaggattccgtgcctttgtgacagactgggacaaagtgacagccacggtggctgggctgacgctgctggctgttggggtctactcagccaagaatgccacgcttgtcgccggccgcttcatcgaggctcggctggggaagccgtccctagtgagggagacgtcccgcatcacggtgcttgaggcgctgcggcaccccatccaggtcagccggcggctcctcagtcgaccccaggacgcgctggagggtgttgtgctcagtcccagcctggaagcacgggtgcgcgacatcgccatagcaacaaggaacaccaagaagaaccgcagcctgtacaggaacatcctgatgtacgggccaccaggcaccgggaagacgctgtttgccaagaaactcgccctgcactcaggcatggactacgccatcatgacaggcggggacgtggcccccatggggcgggaaggcgtgaccgccatgcacaagctctttgactgggccaataccagccggcgcggcctcctgctctttgtggatgaagcggacgccttccttcggaagcgagccaccgagaagataagcgaggacctcagggccacactgaacgccttcctgtaccgcacgggccagcacagcaacaagttcatgctggtcctggccagcaaccaaccagagcagttcgactgggccatcaatgaccgcatcaatgagatggtccacttcgacctgccagggcaggaggaacgggagcgcctggtgagaatgtattttgacaagtatgttcttaagccggccacagaaggaaagcagcgcctgaagctggcccagtttgactacgggaggaagtgctcggaggtcgctcggctgacggagggcatgtcgggccgggagatcgctcagctggccgtgtcctggcaggccacggcgtatgcctccgaggacggggtcctgaccgaggccatgatggacacccgcgtgcaagatgctgtccagcagcaccagcagaagatgtgctggctgaaggcggaagggcctgggcgtggggacgagccctccccatcctgagtccacagggagatccacagctcacggagcctggccgcggacccctcccacccctgccttgccggcccctgcacatttaggatatgctcctgggtggggactgggctgtgcccagggcctctgtcccccaggatgtcttgtggtgcgggtcggccgttctgccccccagggcaccccctgttgtaggcactggctagggaggggcaggcctccttcctgcccctcgagacactcttgggagatgcattttccgtctggctcacagggggagggtgaggctttgcaccccagcccctgcccaggccactgtgagggtgggtgctggctgagcccccggggcagcaggagccaggcaggtgatgtctttgttctcggctcccacagcagagccaggtgagggggcgcctgccagggccagacccaggtggggcagcctgaaccctgcttccccctgtggccggcatgccccgatctttcacacactggtgaccctgagagaggagggaggagggaacctggcgggggtgtctgaggccgcactgtcagctggccggtccaagcctgtggctggagctggggtctgtttacctaataaagtcccacaggtgcctcatt

SEQ ID NO: 2694 - DNA, 2448 bp, Homo sapiens
  source 1..2448: mol_type = unassigned DNA
cgcctgcgcagtggtcctggccaccggctcgcggcgcgtggaggctgctcccagccgcgcccgagtcagactcgggtgggggtcccggcggcggtagcggcggcggcggtgcgagcatgtcgtggctcttcggcgttaacaagggccccaagggtgaaggcgcggggccgccgccgcctttgccgcccgcgcagcccggggccgagggcggcggggaccgcggtttgggagaccggccggcgcccaaggacaaatggagcaacttcgaccccaccggcctggagcgcgccgccaaggcggcgcgcgagctggagcactcgcgttacgccaaggaggccctgaatctggcgcagatgcaggagcagacgctgcagttggagcaacagtccaagctcaaagagtatgaggccgccgtggagcagctcaagagcgagcagatccgggcgcaggctgaggagaggaggaagaccctgagcgaggagacccggcagcaccaggccagggcccagtatcaagacaagctggcccggcagcgctacgaggaccaactgaagcagcagcaacttctcaatgaggagaatttacggaagcaggaggagtccgtgcagaagcaggaagccatgcggcgagccaccgtggagcgggagatggagctgcggcacaagaatgagatgctgcgagtggagaccgaggcccgggcgcgcgccaaggccgagcgggagaatgcagacatcatccgcgagcagatccgcctgaaggcgtccgagcaccgtcagaccgtcttggagtccatcaggacggctggcaccttgtttggggaaggattccgtgcctttgtgacagaccgggacaaagtgacagccacggtggctgggctgacgctgctggctgtcggggtctactcagccaagaatgcgacagccgtcactggccgcttcatcgaggctcggctggggaagccgtccctagtgagggagacgtcccgcatcacggtgctggaggcgctgcggcaccccatccaggtcagccggcggctcctcagtcgaccccaggacgtgctggagggtgttgtgcttagtcccagcctggaagcacgggtgcgcgacatcgccatagcaaccaggaacaccaagaagaaccggggcctgtacaggcacatcctgctgtatgggccaccaggcaccgggaagacgctgtttgccaagaaactcgccctgcactcaggcatggactacgccatcatgacaggcggggacgtggcccccatggggcgggaaggcgtgaccgccatgcacaagctctttgactgggccaataccagccggcgcggcctcctgctcttcatggatgaagcagacgccttccttcggaagcgagccactgaggagataagcaaggacctcagagccacactgaacgccttcctgtaccacatgggccaacacagcaacaaattcatgctggtcctggccagcaatctgcctgagcagttcgactgtgccatcaacagccgcattgacgtgatggtccacttcgacctgccgcagcaggaggagcgggagcgcctggtgagactgcattttgacaactgtgttcttaagccggccacagaaggaaaacggcgcctgaagctggcccagtttgactacgggaggaagtgctcggaggtcgctcggctgacggagggcatgtcgggccgggagatcgctcagctggccgtgtcctggcaggccacggcatatgcctccaaggacggggtcctcactgaggccatgatggacgcctgtgtgcaagatgctgtccagcagtaccgacagaagatgcgctggctgaaggcggaggggcctgggcgcggggtcgagcaccccctatccggagtccaaggcgagaccctcacctcatggagcctggccacggacccctcctacccctgccttgccggcccctgcacatttaggatatgctcctggatggggactgggctgtgcccagggcctctgtcccccaggatgtcttgtggtggcggtcggccgttctgccccccagggcaccccctgttgtaggcactggctagggaggggcaggcctccttcctgcccctcgagacactcttgggagatgcattttccgtctggctcacagggggagggtgaggctttgtaccccagcccctgcccaggccactgtgagggtgggtgctggctgagcccctggggcagaaggagtggggcaggcggggtctttgttctcggctcccacagcagagccaggtgagggggggcctgccaggactagacagaagtggggcggcctgaaccctgcttccagccatggccaggggccacggaacccggcaggggtgtctgaggccgccctgtcagctggccggtccaagcctgtggctggagctggtgtgtgtttatctaataaagtcccacaggtgcctca

SEQ ID NO: 2695 - DNA, 2138 bp, Homo sapiens
  source 1..2138: mol_type = unassigned DNA
gtgtttcgcctgcgcagtggtcctggccaccggctcgcggcgcgtggaggctgctcccagccgcgcccgagtcagactcgggtgggggtcccggcggcggtagcggcggcggcggtgcgagcatgtcgtggctcttcggcgttaacaagggccccaagggtgaaggcgcggggccgccgccgcctttgccgcccgcgcagcccggggccgagggcggcggggaccgcggtttgggagaccggccggcgcccaaggacaaatggagcaacttcgaccccaccggcctggagcgcgccgccaaggcggcgcgcgagctggagcactcgcgttacgccaaggaggccctgaatctggcgcagatgcaggagcagacgctgcagttggagcaacagtccaagctcaaacaacttctcaatgaggagaatttacggaagcaggaggagtccgtgcagaagcaccgtcagaccgtcttggagtccatcaggacggctggcaccttgtttggggaaggattccgtgcctttgtgacagaccgggacaaagtgacagccacggtggctgggctgacgctgctggctgtcggggtctactcagccaagaatgcgacagccgtcactggccgcttcatcgaggctcggctggggaagccgtccctagtgagggagacgtcccgcatcacggtgctggaggcgctgcggcaccccatccagcaggtcagccggcggctcctcagtcgaccccaggacgtgctggagggtgttgtgcttagtcccagcctggaagcacgggtgcgcgacatcgccatagcaaccaggaacaccaagaagaaccggggcctgtacaggcacatcctgctgtatgggccaccaggcaccgggaagacgctgtttgccaagaaactcgccctgcactcaggcatggactacgccatcatgacaggcggggacgtggcccccatggggcgggaaggcgtgaccgccatgcacaagctctttgactgggccaataccagccggcgcggcctcctgctcttcatggatgaagcagacgccttccttcggaagcgagccactgaggagataagcaaggacctcagagccacactgaacgccttcctgtaccacatgggccaacacagcaacaaattcatgctggtcctggccagcaatctgcctgagcagttcgactgtgccatcaacagccgcattgacgtgatggtccacttcgacctgccgcagcaggaggagcgggagcgcctggtgagactgcattttgacaactgtgttcttaagccggccacagaaggaaaacggcgcctgaagctggcccagtttgactacgggaggaagtgctcggaggtcgctcggctgacggagggcatgtcgggccgggagatcgctcagctggccgtgtcctggcaggccacggcatatgcctccaaggacggggtcctcactgaggccatgatggacgcctgtgtgcaagatgctgtccagcagtaccgacagaagatgcgctggctgaaggcggaggggcctgggcgcggggtcgagcaccccctatccggagtccaaggcgagaccctcacctcatggagcctggccacggacccctcctacccctgccttgccggcccctgcacatttaggatatgctcctggatggggactgggctgtgcccagggcctctgtcccccaggatgtcttgtggtggcggtcggccgttctgccccccagggcaccccctgttgtaggcactggctagggaggggcaggcctccttcctgcccctcgagacactcttgggagatgcattttccgtctggctcacagggggagggtgaggctttgtaccccagcccctgcccaggccactgtgagggtgggtgctggctgagcccctggggcagaaggagtggggcaggcggggtctttgttctcggctcccacagcagagccaggtgagggggggcctgccaggactagacagaagtggggcggcctgaaccctgcttccagccatggccaggggccacggaacccggcaggggtgtctgaggccgccctgtcagctggccggtccaagcctgtggctggagctggtgtgtgtttatctaataaagtcccacaggtgcctc

SEQ ID NO: 2696 - DNA, 510 bp, Homo sapiens
  source 1..510: mol_type = unassigned DNA
agggcccagtatcaagacaagctggcccggcagcgctacgaggaccaactgaagcagcagcaacttctcaatgaggagaatttacggaagcaggaggagtccgtgcagaagcaggaagccatgcggcgagccaccgtggagcgggagatggagctgcggcacaagaatgagatgctgcgagtggagaccgaggcccgggcgcgcgccaaggccgagcgggagaatgcagacatcatccgcgagcagatccgcctgaaggcgtccgagcaccgtcagaccgtcttggagtccatcaggacggctggcaccttgtttggggaaggattccgtgcctttgtgacagaccgggacaaagtgacagccacggtaaacatattcataaaacagggctggcaggtggctgagaggcagcattttcggaggcggaggtgggcggatcacgaggtccggagatcgagatcatcctggtaagagtgaaaccctgtctctactaaaaaaaagaaaaaaaaa

SEQ ID NO: 2697 - DNA, 2510 bp, Homo sapiens
  source 1..2510: mol_type = unassigned DNA
gtgtttcgcctgcgcagtggtcctggccaccggctcgcggcgcgtggaggctgctcccagccgcgcccgagtcagactcgggtgggggtcccggcggcggtagcggcggcggcggtgcgagcatgtcgtggctcttcggcgttaacaagggccccaagggtgaaggcgcggggccgccgccgcctttgccgcccgcgcagcccggggccgagggcggcggggaccgcggtttgggagaccggccggcgcccaaggacaaatggagcaacttcgaccccaccggcctggagcgcgccgccaaggcggcgcgcgagctggagcactcgcgttacgccaaggaggccctgaatctggcgcagatgcaggagcagacgctgcagttggagcaacagtccaagctcaaagagtatgaggccgccgtggagcagctcaagagcgagcagatccgggcgcaggctgaggagaggaggaagaccctgagcgaggagacccggcagcaccaggccagggcccagtatcaagacaagctggcccggcagcgctacgaggaccaactgaagcagcagcaacttctcaatgaggagaatttacggaagcaggaggagtccgtgcagaagcaggaagccatgcggcgagccaccgtggagcgggagatggagctgcggcacaagaatgagatgctgcgagtggagaccgaggcccgggcgcgcgccaaggccgagcgggagaatgcagacatcatccgcgagcagatccgcctgaaggcgtccgagcaccgtcagaccgtcttggagtccatcaggacggctggcaccttgtttggggaaggattccgtgcctttgtgacagaccgggacaaagtgacagccacggtggctgggctgacgctgctggctgtcggggtctactcagccaagaatgcgacagccgtcactggccgcttcatcgaggctcggctggggaagccgtccctagtgagggagacgtcccgcatcacggtgctggaggcgctgcggcaccccatccaggtcagccggcggctcctcagtcgaccccaggacgtgctggagggtgttgtgcttagtgtaagtcccagcctggaagcacgggtgcgcgacatcgccatagcaaccaggaacaccaagaagaaccggggcctgtacaggcacatcctgctgtatgggccaccaggcaccgggaagacgctgtttgccaagaaactcgccctgcactcaggcatggactacgccatcatgacaggcggggacgtggcccccatggggcgggaaggcgtgaccgccatgcacaagctctttgactgggccaataccagccggcgcggtctgcaggaggagataagcaaggacctcagagccacactgaacgccttcctgtaccacatgggccaacacagcaacaacagattcatgctggtcctggccagcaatctgcctgagcagttcgactgtgccatcaacagccgcattgacgtgatggtccacttcgacctgccgcagcaggaggagcgggagcgcctggtgagactgcattttgacaactgtgttcttaagccggccacagaaggaaaacgcatgggtgtaggccagctgcctgtcttccggcctccacctcatggtgtggggtccgcggccttggctgcctcacttgggaactccttccccaggcgcctgaagctggcccagtttgactacgggaggaagtgctcggaggtcgctcggctgacggagggcatgtcgggccgggagatcgctcagctggccgtgtcctggcaggccacggcatatgcctccaaggacggggtcctcactgaggccatgatggacgcctgtgtgcaagatgctgtccagcagtaccgacagaagatgcgctggctgaaggcggaggggcctgggcgcggggtcgagcaccccctatccggagtccaaggcgagaccctcacctcatggagcctggccacggacccctcctacccctgccttgccggcccctgcacatttaggatatgctcctggatggggactgggctgtgcccagggcctctgtcccccaggatgtcttgtggtggcggtcggccgttctgccccccagggcaccccctgttgtaggcactggctagggaggggcaggcctccttcctgcccctcgagacactcttgggagatgcattttccgtctggctcacagggggagggtgaggctttgtaccccagcccctgcccaggccactgtgagggtgggtgctggctgagcccctggggcagaaggagtggggcaggcggggtctttgttctcggctcccacagcagagccaggtgagggggggcctgccaggactagacagaagtggggcggcctgaaccctgcttccagccatggccaggggccacggaacccggcaggggtgtctgaggccgccctgtcagctggccggtccaagcctgtggctggagctggtgtgtgtttatctaataaagtcccacaggtgcctc

SEQ ID NO: 2698 - DNA, 980 bp, Homo sapiens
  source 1..980: mol_type = unassigned DNA
gtgtttcgcctgcgcagtggtcctggccaccggctcgcggcgcgtggaggctgctcccagccgcgcccgagtcagactcgggtgggggtcccggcggcggtagcggcggcggcggtgcgagcatgtcgtggctcttcggcgttaacaagggccccaagggtgaaggcgcggggccgccgccgcctttgccgcccgcgcagcccggggccgagggcggcggggaccgcggtttgggagaccggccggcgcccaaggacaaatggagcaacttcgaccccaccggcctggagcgcgccgccaaggcggcgcgcgagctggagcactcgcgttacgccaaggaggccctgaatctggcgcagatgcaggagcagacgctgcagttggagcaacagtccaagctcaaagagtatgaggccgccgtggagcagctcaagagcgagcagatccgggcgcaggctgaggagaggaggaagaccctgagcgaggagacccggcagcaccaggccagggcccagtatcaagacaagctggcccggcagcgctacgaggaccaactgaagcagcagcaacttctcaatgaggagaatttacggaagcaggaggagtccgtgcagaagcaggaagccatgcggcgagccaccgtggagcgggagatggagctgcggcacaagaatgagatgctgcgagtggagaccgaggcccgggcgcgcgccaaggccgagcgggagaatgcagacatcatccgcgagcagatccgcctgaaggcgtccgagcaccgtcagaccgtcttggagtccatcaggacggctggcaccttgtttggggaaggattccgtgcctttgtgacagaccgggacaaagtgacagccacggtaaacatattcataaaacagggctggcaggtggctgagaggcagcatcattttcggaggcggaggtgggcggatcacgaggtccggagatcgagatcatcctggtaa

SEQ ID NO: 2699 - DNA, 6277 bp, Homo sapiens
  source 1..6277: mol_type = unassigned DNA
gcaggacggcgcgaaaacccaattgacaagaattccctccgaagctctgtggtccgatctgcggtccgcttgctttccctgcccggtcccgagcgctcagcctgaagcgccgctttcgagggcaccctgcatacactggccgcgcctcagggatctcattgcccgcgctttctcattgcctctttccgtgttcgattcggctgatctgggcccagcctccgctcccgctctctgtcggtgggcgcgggggaatccgaaacggctcagcagaatcccagcagcttgctgctactggagcgggccgcctccatggcctccaggcaggccgggctggaccgcgtgaggtcctaggagacgggattccgggaagcggggagtatggtgggggtcctggccatggcggctgcagctgctccgcctcccgtgaaggactgcgagattgagccatgcaaaaagcgaaagaaagatgatgacacatctacctgcaaaacaattacaaaatatttatcaccactagggaagactagagacagggtttttgctccaccaaaacctagtaatattctggattattttagaaagacttcacccacaaatgagaagacacaattagggaaagagtgcaagataaagtcacctgaatcagtacctgttgacagcaacaaagactgtacgacacctttggaaatgttctcaaatgtagagtttaagaagaaaagaaagagggttaatttatctcatcaactaaataatattaaaactgaaaatgaagctccaattgaaattagtagcgacgatagcaaagaagactatagtttaaataatgattttgtggaaagtagtacttctgttttacgttacaagaaacaagtagaggtacttgcagaaaacattcaagatacaaaaagtcaaccaaatactatgacctccctgcaaaattctaaaaaagtaaatcctaaacaagggaccacaaaaaatgacttcaaaaagttgagaaaaaggaaatgcagagatgtagtagatctatctgaaagcttacccttggcagaggaactaaatttgcttaaaaaagatggtaaagatactaaacagatggagaatactacaagccatgcaaactctagagataacgtaactgaagcagcccagttaaatgatagtataataactgtctcatatgaggaatttttaaaaagtcacaaggaaaataaagtggaagagataccagactctacaatgtcaatttgtgttccttctgaaactgtcgacgaaatagtcaaaagtggttatataagtgaatcagaaaactccgaaatttcccagcaggtacgctttaagacagttactgttcttgcacaggttcaccctattccgcccaaaaagacagggaaaataccccgaattttcttgaaacaaaagcaatttgaaatggaaaatagtttatctgatcctgagaatgaacagacagttcagaaaagaaaatctaatgttgttatacaggaggaagaattagaattggctgttttggaagctggaagttctgaagctgtgaaaccaaaatgcactctagaagaaagacagcaatttatgaaagcatttaggcagccagcatcagatgcacttaaaaatggagttaaaaagtcttctgataagcagaaagaccttaatgaaaaatgtctatatgaagtaggaagagatgataattctaaaaaaatcatggaaaattctggtatccaaatggtttcaaaaaatggcaatttacagttacacactgataaaggaagttttctgaaggagaaaaataaaaagctaaagaagaagaataagaaaacattagatactggggctattccaggcaaaaacagagagggaaacactcaaaagaaagaaacaacctttttcttaaaagagaaacaatatcaaaatagaatgagtttaagacaaaggaaaacagagtttttcaaaagcagcactttatttaacaatgaaagtcttgtttatgaagatatagcaaatgatgaccttctaaaggtttcctctctgtgtaacaataataaattgtcaagaaaaaccagcataccagttaaagatattaagcttacacagtctaaagctgaatctgaagccagcttgctaaatgtttccacgcccaagtcaactagaagatctggaagaattagcagcacacctactacagaaaccattagaggtattgattctgacgatgtacaagataatagtcaactaaaggcttccactcaaaaagcagccaacttatcggaaaagcacagcttatatacagcagaattaataacagtaccctttgattcagagagccctattagaatgaaattcaccagaattagtactcccaaaaaatctaagaaaaaatctaacaaaagatctgagaaatctgaagcaactgatggaggttttacttctcagattagaaaggcaagcaatacttcaaaaaacatatcaaaagcaaaacaattgattgaaaaagcaaaagctttacacatcagtaggtcaaaggtgactgaagaaatagcgatacccttaaggcgctcctctagacatcagacacttcctgaaaggaagaaattgtcagaaacagaagattctgttataataatagattcaagtcctactgctttaaagcatccagagaaaaatcagaagaaacttcagtgtttgaatgatgtgctaggaaaaaaacttaacacatccactaaaaatgtacctggaaaaatgaaagtcgctcctttatttcttgtcagaaaagcacaaaaagcagctgatcctgtccctagttttgatgaaagcagtcaagatacatctgaaaaatctcaggattgtgatgttcaatgtaaagcaaagcgtgacttcctaatgagtggtttgccagatttgttgaaacggcaaattgcaaagaaagctgctgcgctggatgtgtacaatgcagtgagtaccagtttccagagagtcgtacatgtgcaacaaaaggatgatgggtgttgtttgtggcatttgaaaccaccctcttgtcctctcttaactaaatttaaagaactgaacactaaagtaatagatctctcaaaatgtggtattgctcttggtgaattttcaacattgaattcaaagttgaaaagcggtaactctgctgctgtgttcatgaggacaaggaaggaatttactgaagaagtaagaaatcttttgcttgaggaaattaggtggtcaaatcctgaattttcattgaaaaaatattttcccttactcctaaaaaaacaaattgagcaccaagtactttcttccgagtgtcatagtaaacaagaactggaggctgatgtcagccataaagaaaccaaaaggaaactcgtagaagcagaaaattctaagtcaaaaagaaagaaaccaaatgagtattcaaaaaatctggagaagaccaataggaagtcagaagaacttagcaaaagaaacaactcttctgggataaagctagattcttccaaagattctggaactgaagacatgctttggacagaaaagtatcaacctcagactgccagtgaacttataggaaatgagttagctataaaaaagttacatagttggttgaaagactggaaaagaagagctgaattggaagaaaggcagaatctgaagggaaaaagagatgagaaacatgaagatttctcgggtggcatagactttaaaggcagttcagatgatgaagaagagagtcgtctttgcaatactgtccttataacagggccaacaggagtgggaaaaactgctgcagtgtatgcttgtgcccaggagcttggatttaagatatttgaagtgaatgcctcttcccagcgcagtggtagacaaattctatctcagttgaaggaagctactcagtcccatcaagtagacaaacaaggtgtaaactcacaaaaaccctgtttttttaatagctactacataggcaagtcaccaaaaaaaataagctcccctaagaaagttgttacatcaccaagaaaagttcctccaccatcaccaaaaagtagtggaccaaagcgagcacttcctcccaaaaccttggcaaattattttaaagtatctcccaaacctaaaaataatgaagaaataggaatgcttctggaaaataataaaggaataaaaaattcttttgaacagaaacaaattactcagactaaatctacaaatgcaactaattcaaatgtcaaagacgttggagctgaagaacccagcagaaaaaatgcaacatctcttattctttttgaggaggttgatgtaatttttgatgaagatgctgggtttttgaatgcaatcaaaacattcatggcaacaactaaacgacctgtaatccttactacaagtgacccaacatttagtttaatgtttgatggctgctttgaagaaatcaagttcagtactccttccctgctaaatgttgccagctacctacaaatgatttgcttaactgagaattttagaactgatgtaaaagactttgtaaccttgttaactgcaaatacttgtgatatcagaaaaagtatcctttacttacaattctggattagaagtggaggtggagttttagaagaacgaccattaaccctttatcgtggaaatagcagaaatgtacaactagtttgctctgaacatggccttgataacaaaatttaccctaaaaatactaaaaagaaacgtgtagaccttccaaaatgtgacagtggctgtgctgagaccttgtttggccttaagaacattttttccccatctgaagacttattttcatttttaaagcacaaaatcacaatgaaggaagaatggcataaattcatccagcttcttacagaattccaaatgcggaatgtagattttttatatagtaatcttgagtttattctaccattaccagttgataccattccagaaactaaaaacttttgtggcccatcagtaactgtggatgccagtgcagcaacaaaaagtatgaattgtcttgctaggaaacactctgaaagagaacagccattgaaaaagtcccagaaaaagaaacaaaagaaaacattggtaatattagatgatagtgatctatttgacactgacttggactttcctgatcaatctattagcctgtcctctgtatcatcttcctcaaatgcagaagaaagcaaaaccggagacgaagaaagcaaagccagagacaaaggaaacaatccagagacaaagaaatctattccttgtcctcctaaaacaactgcaggaaaaaaatgttctgcccttgtttctcattgtttaaattctctctctgagttcatggataacatgtccttcttagatgcacttttaactgatgtaagggaacaaaacaaatacggtagaaatgactttagttggacaaatggaaaggttacaagtggactttgtgatgagtttagtcttgagagtaatgatggatggacttctcaaagctctggagaattaaaggcagctgcagaagctctcagctttactaaatgttcttctgctatttcaaaagcattggaaaccttgaattcttgcaagaaattaggaagagatccaaccaacgatcttactttttatgtttcacaaaagcgcaataatgtatactttagtcagtcagcagctaatttagacaatgcttggaagaggatatcagtcattaaaagtgtattttcgagtcgatctcttctctatgtgggtaatagacaagctagtataattgaatacctgccaacccttcgaaacatctgtaagactgagaagctaaaagaacaaggaaaaagtaaaagaagattcctgcactattttgaaggaattcatcttgacattccaaaagagactgtgaatactttggcagctgacttcccttaatgttccatactaacaatgctttgtatagattatcatgtggtccttaagatacatttttatattatgtggatcttcatggaaaagtatatttctcgatgtacattttaaacaaacaatttgtatatttttttattggcgggtaaatatttaaaatatttgagttacaaattttatatatgattgtaattttttttctgaattttttgtattatctgatttagctttgttggagtattttttgtatgtgagtgaactgtttctggaaggtagagttcattaagatgaactccctatttcaagtgtttatattatatattagcttaatattcagatacattatcttggctgctaacattagtgtcac

SEQ ID NO: 2700 - DNA, 3840 bp, Homo sapiens
  source 1..3840: mol_type = unassigned DNA
gcgccggggccggcgatgagcgcgaggagccggcatgagcgcagacagcagccctctcgtgggcagcacgcccaccggttatgggaccctgacgatagggacatcaatagatcccctcagctcctcagtttcatccgtgaggctcagcggctactgtggcagtccatggagggtcatcggctatcacgtcgtggtctggatgatggctgggatccctttgctgctcttccgttggaagcccctgtggggggtgcggctgcggctccggccctgcaacctggcccacgccgaaacactcgttatcgaaataagagacaaagaggatagttcctggcagctcttcactgtccaggtgcagactgaggccatcggcgagggcagcctggagccgtccccacagtcccaggcagaggatggccggagccaggcggcagttggggcggtaccagagggtgcctggaaggatacggcccagctccacaagagcgaggaggcggtgagtgtcggacagaagcgggtgctgcggtattacctcttccagggccagcgctatatctggatcgagacccagcaagccttctaccaggtcagcctcctggaccatggccgctcttgtgacgacgtccaccgctcccgccatggcctcagcctccaggaccaaatggtgaggaaggccatttacggccccaacgtgatcagcataccggtcaagtcctacccccagctgctggtggacgaggcactgaacccctactatgggttccaggccttcagcatcgcgctgtggctggctgaccactactactggtacgccctgtgcatcttcctcatttcctccatctccatctgcctgtcgctgtacaagaccagaaagcaaagccagactctaagggacatggtcaagttgtccatgcgggtgtgcgtgtgccggccagggggagaggaagagtgggtggactccagtgagctagtgcccggagactgcctggtgctgccccaggagggtgggctgatgccctgtgatgccgccctggtggccggcgagtgcatggtgaatgagagctctctgacaggagagagcattccagtgctgaagacggcactgccggaggggctggggccctactgtgcagagacacaccggcggcacacactcttctgcgggaccctcatcttgcaggcccgggcctatgtgggaccgcacgtcctggcagtggtgacccgcacagggttctgcacggcaaaagggggcctggtgagctccatcttgcacccccggcccatcaacttcaagttctataaacacagcatgaagtttgtggctgccctctctgtcctggctctcctcggcaccatctacagcatcttcatcctctaccgaaaccgggtgcctctgaatgagattgtaatccgggctctcgacctggtgaccgtggtggtgccacctgccctgcctgctgccatgactgtgtgcacgctctacgcccagagccgactgcggagacagggcattttctgcatccacccactgcgcatcaacctggggggcaagctgcagctggtgtgtttcgacaagacgggcaccctcactgaggacggcttagacgtgatgggggtggtgcccctgaaggggcaggcattcctgcccctggtcccagagcctcgccgcctgcctgtggggcccctgctccgagcactggccacctgccatgccctcagccggctccaggacacccccgtgggcgaccccatggacttgaagatggtggagtctactggctgggtcctggaggaagagccggctgcagactcagcatttgggacccaggtcttggcagtgatgagacccccactttgggagccccagctgcaggcaatggaggagcccccggtgccagtcagcgtcctccaccgcttccccttctcttcggctctgcagcgcatgagtgtggtggtggcgtggccaggggccactcagcccgaggcctacgtcaaaggctccccggagctggtggcagggctctgcaaccccgagacagtgcccaccgacttcgcccagatgctgcagagctatacagctgctggctaccgtgtcgtggccctggccagcaagccactgcccactgtgcccagcctggaggcagcccagcaactgacgagggacactgtggaaggagacctgagcctcctggggctgctggtcatgaggaacctactgaagccgcagacaacgccagttatccaggctctgcgaaggacccgcatccgcgccgtcatggtgacaggggacaacctgcagacagcggtgactgtggcccggggctgtggcatggtggccccccaggagcatctgatcatcgtccacgccacccaccctgagcggggtcagcctgcctctctcgagttcctgccgatggagtcccccacagccgtgaatggcgttaaggatcctgaccaggctgcaagctacaccgtggagccagacccccgatccaggcacctggccctcagcgggcccacctttggtatcattgtgaagcacttccccaagctgctgcccaaggtcctggtccagggcactgtctttgcccgcatggcccctgagcagaagacagagctggtgtgcgagctacagaagcttcagtactgcgtgggcatgtgcggagacggcgccaatgactgtggggccctgaaggcggctgatgtcggcatctcgctgtcccaggcagaagcctcagtggtctcacccttcacctcgagcatggccagtattgagtgcgtgcccatggtcatcagggaggggcgctgttcccttgacacttcgttcagcgtcttcaagtacatggctctgtacagcctgacccagttcatctccgtcctgatcctctacacgatcaacaccaacctgggtgacctgcagttcctggccatcgacctggtcatcaccaccacagtggcagtgctcatgagccgcacggggccagcgctggtcctgggacgggtgcggccaccgggggcgctgctcagcgtgcccgtgctcagcagcctgctgctgcagatggtcctggtgaccggcgtgcagctagggggctacttcctgaccctggcccagccatggttcgtgcctctgaacaggacagtggccgcaccagacaacctgcccaactacgagaacaccgtggtcttctctctgtccagcttccagtacctcatcctggctgcagccgtgtccaagggggcgcccttccgccggccgctctacaccaatgtgcccttcctggtggccctggcgctcctgagctccgtcctggtgggccttgtcctggtccccggcctcctgcaggggccgctggcgctgaggaacatcactgacaccggcttcaagctgctgctgctgggtctggtcaccctcaacttcgtgggggccttcatgctggagagcgtgctagaccagtgcctccccgcctgcctgcgccgcctccggcccaagcgggcctccaagaagcgcttcaagcagctggaacgagagctggccgagcagccctggccgccgctgcccgccggccccctgaggtagtgcaggcccacgggcaccccagacactggaactccctgcctctgagccaccaactggacccctctccagcaacaccaccgccaccacctcccacatccctgaggttggcgactgtctacactcctcccccgagaccacccccaccctggggaagcgttgactactgtcccctaccttggaccatcccgcgtaggggtggcagcccccagctcccctcagtgctgctgtcagtgtagcaaataaagtcatgatattttcctggc

SEQ ID NO: 2701 - DNA, 3681 bp, Homo sapiens
  source 1..3681: mol_type = unassigned DNA
cgccgagcctggtggcccaggtgccccgcccgcgtcagccctgctccagccccgcgctagcccagcgcccctcgccccgggccgtccggaccgcgcccccgcccagggccttgcgcacgccggggcccaggccgagggccgcagcgccggggccggcgatgagcgcgaggagccggcatgagcgcagacagcagccctctcgtgggcagcacgcccaccggttatgggaccctgacgatagggacatcaatagatcccctcagctcctcagtttcatccgtgaggctcagcggctactgtggcagtccatggagggtcatcggctatcacgtcgtggtctggatgatggctgggatccctttgctgctcttccgttggaagcccctgtggggggtgcggctgcggctccggccctgcaacctggcccacgccgaaacactcgttatcgaaataagagacaaagaggatagttcctggcagctcttcactgtccaggtgcagactgaggccatcggcgagggcagcctggagccgtccccacagtcccaggcagaggatggccggagccaggcggcagttggggcggtaccagagggtgcctggaaggatacggcccagctccacaagagcgaggaggcgaagcgggtgctgcggtattacctcttccagggccagcgctatatctggatcgagacccagcaagccttctaccaggtcagcctcctggaccatggccgctcttgtgacgacgtccaccgctcccgccatggcctcagcctccaggaccaaatggtgaggaaggccatttacggccccaacgtgatcagcataccggtcaagtcctacccccagctgctggtggacgaggcactgaacccctactatgggttccaggccttcagcatcgcgctgtggctggctgaccactactactggtacgccctgtgcatcttcctcatttcctccatctccatctgcctgtcgctgtacaagaccagaaagcaaagccagactctaagggacatggtcaagttgtccatgcgggtgtgcgtgtgccggccagggggagaggaagagtgggtggactccagtgagctagtgcccggagactgcctggtgctgccccaggagggtgggctgatgccctgtgatgccgccctggtggccggcgagtgcatggtgaatgagagctctctgacaggagagagcattccagtgctgaagacggcactgccggaggggctggggccctactgtgcagagacacaccggcggcacacactcttctgcgggaccctcatcttgcaggcccgggcctatgtgggaccgcacgtcctggcagtggtgacccgcacagggttctgcacggcaaaagggggcctggtgagctccatcttgcacccccggcccatcaacttcaagttctataaacacagcatgaagtttgtggctgccctctctgtcctggctctcctcggcaccatctacagcatcttcatcctctaccgaaaccgggtgcctctgaatgagattgtaatccgggctctcgacctggtgaccgtggtggtgccacctgccctgcctgctgccatgactgtgtgcacgctctacgcccagagccgactgcggagacagggcattttctgcatccacccactgcgcatcaacctggggggcaagctgcagctggtgtgtttcgacaagacgggcaccctcactgaggacggcttagacgtgatgggggtggtgcccctgaaggggcaggcattcctgcccctggtcccagagcctcgccgcctgcctgtggggcccctgctccgagcactggccacctgccatgccctcagccggctccaggacacccccgtgggcgaccccatggacttgaagatggtggagtctactggctgggtcctggaggaagagccggctgcagactcagcatttgggacccaggtcttggcagtgatgagacccccactttgggagccccagctgcaggcaatggaggagcccccggtgccagtcagcgtcctccaccgcttccccttctcttcggctctgcagcgcatgagtgtggtggtggcgtggccaggggccactcagcccgaggcctacgtcaaaggctccccggagctggtggcagggctctgcaaccccgagacagtgcccaccgacttcgcccagatgctgcagagctatacagctgctggctaccgtgtcgtggccctggccagcaagccactgcccactgtgcccagcctggaggcagcccagcaactgacgagggacactgtggaaggagacctgagcctcctggggctgctggtcatgaggaacctactgaagccgcagacaacgccagttatccaggctctgcgaaggacccgcatccgcgccgtcatggtgacaggggacaacctgcagacagcggtgactgtggcccggggctgtggcatggtggccccccaggagcatctgatcatcgtccacgccacccaccctgagcggggtcagcctgcctctctcgagttcctgccgatggagtcccccacagccgtgaatggcgttaaggtcctggtccagggcactgtctttgcccgcatggcccctgagcagaagacagagctggtgtgcgagctacagaagcttcagtactgcgtgggcatgtgcggagacggcgccaatgactgtggggccctgaaggcggctgatgtcggcatctcgctgtcccaggcagaagcctcagtggtctcacccttcacctcgagcatggccagtattgagtgcgtgcccatggtcatcagggaggggcgctgttcccttgacacttcgttcagcgtcttcaagtacatggctctgtacagcctgacccagttcatctccgtcctgatcctctacacgatcaacaccaacctgggtgacctgcagttcctggccatcgacctggtcatcaccaccacagtggcagtgctcatgagccgcacggggccagcgctggtcctgggacgggtgcggccaccgggggcgctgctcagcgtgcccgtgctcagcagcctgctgctgcagatggtcctggtgaccggcgtgcagctagggggctacttcctgaccctggcccagccatggttcgtgcctctgaacaggacagtggccgcaccagacaacctgcccaactacgagaacaccgtggtcttctctctgtccagcttccagtacctcatcctggctgcagccgtgtccaagggggcgcccttccgccggccgctctacaccaatgagcgtgctagaccagtgcctccccgcctgcctgcgccgcctccggcccaagcgggcctccaagaagcgcttcaagcagctggaacgagagctggccgagcagccctggccgccgctgcccgccggccccctgaggtagtgcaggcccacgggcaccccagacactggaactccctgcctctgagccaccaactggacccctctccagcaacaccaccgccaccacctcccacatccctgaggttggcgactgtctacactcctcccccgagaccacccccaccctggggaagcgttgactactgtcccctaccttggaccatcccgcgtaggggtggcagcccccagctcccctcagtgctgctgtcagtgtagcaaataaagtcatgatattttcctggc

SEQ ID NO: 2702 - DNA, 3981 bp, Homo sapiens
  source 1..3981: mol_type = unassigned DNA
agtgtcggagccgcgccgagcctggtggcccaggtgccccgcccgcgtcagccctgctccagccccgcgctagcccagcgcccctcgccccgggccgtccggaccgcgcccccgcccagggccttgcgcacgccggggcccaggccgagggccgcagcgccggggccggcgatgagcgcgaggagccggcatgagcgcagacagcagccctctcgtgggcagcacgcccaccggttatgggaccctgacgatagggacatcaatagatcccctcagctcctcagtttcatccgtgaggctcagcggctactgtggcagtccatggagggtcatcggctatcacgtcgtggtctggatgatggctgggatccctttgctgctcttccgttggaagcccctgtggggggtgcggctgcggctccggccctgcaacctggcccacgccgaaacactcgttatcgaaataagagacaaagaggatagttcctggcagctcttcactgtccaggtgcagactgaggccatcggcgagggcagcctggagccgtccccacagtcccaggcagaggatggccggagccaggcggcagttggggcggtaccagagggtgcctggaaggatacggcccagctccacaagagcgaggaggcgaagcgggtgctgcggtattacctcttccagggccagcgctatatctggatcgagacccagcaagccttctaccaggtcagcctcctggaccatggccgctcttgtgacgacgtccaccgctcccgccatggcctcagcctccaggaccaaatggtgaggaaggccatttacggccccaacgtgatcagcataccggtcaagtcctacccccagctgctggtggacgaggcactgaacccctactatgggttccaggccttcagcatcgcgctgtggctggctgaccactactactggtacgccctgtgcatcttcctcatttcctccatctccatctgcctgtcgctgtacaagaccagaaagcaaagccagactctaagggacatggtcaagttgtccatgcgggtgtgcgtgtgccggccagggggagaggaagagtgggtggactccagtgagctagtgcccggagactgcctggtgctgccccaggagggtgggctgatgccctgtgatgccgccctggtggccggcgagtgcatggtgaatgagagctctctgacaggagagagcattccagtgctgaagacggcactgccggaggggctggggccctactgtgcagagacacaccggcggcacacactcttctgcgggaccctcatcttgcaggcccgggcctatgtgggaccgcacgtcctggcagtggtgacccgcacagggttctgcacggcaaaagggggcctggtgagctccatcttgcacccccggcccatcaacttcaagttctataaacacagcatgaagtttgtggctgccctctctgtcctggctctcctcggcaccatctacagcatcttcatcctctaccgaaaccgggtgcctctgaatgagattgtaatccgggctctcgacctggtgaccgtggtggtgccacctgccctgcctgctgccatgactgtgtgcacgctctacgcccagagccgactgcggagacagggcattttctgcatccacccactgcgcatcaacctggggggcaagctgcagctggtgtgtttcgacaagacgggcaccctcactgaggacggcttagacgtgatgggggtggtgcccctgaaggggcaggcattcctgcccctggtcccagagcctcgccgcctgcctgtggggcccctgctccgagcactggccacctgccatgccctcagccggctccaggacacccccgtgggcgaccccatggacttgaagatggtggagtctactggctgggtcctggaggaagagccggctgcagactcagcatttgggacccaggtcttggcagtgatgagacccccactttgggagccccagctgcaggcaatggaggagcccccggtgccagtcagcgtcctccaccgcttccccttctcttcggctctgcagcgcatgagtgtggtggtggcgtggccaggggccactcagcccgaggcctacgtcaaaggctccccggagctggtggcagggctctgcaaccccgagacagtgcccaccgacttcgcccagatgctgcagagctatacagctgctggctaccgtgtcgtggccctggccagcaagccactgcccactgtgcccagcctggaggcagcccagcaactgacgagggacactgtggaaggagacctgagcctcctggggctgctggtcatgaggaacctactgaagccgcagacaacgccagttatccaggctctgcgaaggacccgcatccgcgccgtcatggtgacaggggacaacctgcagacagcggtgactgtggcccggggctgtggcatggtggccccccaggagcatctgatcatcgtccacgccacccaccctgagcggggtcagcctgcctctctcgagttcctgccgatggagtcccccacagccgtgaatggcgttaaggatcctgaccaggctgcaagctacaccgtggagccagacccccgatccaggcacctggccctcagcgggcccacctttggtatcattgtgaagcacttccccaagctgctgcccaaggtcctggtccagggcactgtctttgcccgcatggcccctgagcagaagacagagctggtgtgcgagctacagaagcttcagtactgcgtgggcatgtgcggagacggcgccaatgactgtggggccctgaaggcggctgatgtcggcatctcgctgtcccaggcagaagcctcagtggtctcacccttcacctcgagcatggccagtattgagtgcgtgcccatggtcatcagggaggggcgctgttcccttgacacttcgttcagcgtcttcaagtacatggctctgtacagcctgacccagttcatctccgtcctgatcctctacacgatcaacaccaacctgggtgacctgcagttcctggccatcgacctggtcatcaccaccacagtggcagtgctcatgagccgcacggggccagcgctggtcctgggacgggtgcggccaccgggggcgctgctcagcgtgcccgtgctcagcagcctgctgctgcagatggtcctggtgaccggcgtgcagctagggggctacttcctgaccctggcccagccatggttcgtgcctctgaacaggacagtggccgcaccagacaacctgcccaactacgagaacaccgtggtcttctctctgtccagcttccagtacctcatcctggctgcagccgtgtccaagggggcgcccttccgccggccgctctacaccaatgtgcccttcctggtggccctggcgctcctgagctccgtcctggtgggccttgtcctggtccccggcctcctgcaggggccgctggcgctgaggaacatcactgacaccggcttcaagctgctgctgctgggtctggtcaccctcaacttcgtgggggccttcatgctggagagcgtgctagaccagtgcctccccgcctgcctgcgccgcctccggcccaagcgggcctccaagaagcgcttcaagcagctggaacgagagctggccgagcagccctggccgccgctgcccgccggccccctgaggtagtgcaggcccacgggcaccccagacactggaactccctgcctctgagccaccaactggacccctctccagcaacaccaccgccaccacctcccacatccctgaggttggcgactgtctacactcctcccccgagaccacccccaccctggggaagcgttgactactgtcccctaccttggaccatcccgcgtaggggtggcagcccccagctcccctcagtgctgctgtcagtgtagcaaataaagtcatgatattttcctggc

SEQ ID NO: 2703 - DNA, 3674 bp, Homo sapiens
  source 1..3674: mol_type = unassigned DNA
aggacctgttcgttcttctttgggctataagaaggcagaggatgagatgtcccgggccacgtctgttggagaccagctggaggcacccgcccgcaccatttacctcaaccaaccgcatctcaacaaattccgcgacaaccagatcagtacggccaagtacagcgtgttgacatttctacctcgattcttgtatgagcagattagaagagctgctaatgccttctttctcttcattgccttattacagcaaattccagatgtatctccaacaggaagatataccaccctggtgccattgatcattattttaacaattgcaggcatcaaagagattgtagaagattttaagcgacacaaggcagacaatgcagttaacaaaaagaaaacaatagtgttaagaaatggtatgtggcataccattatgtggaaagaggtggcagtgggagacattgtgaaggtcgtcaatgggcagtatcttccagcagatgtggtcctgctgtcatccagtgaacctcaggcaatgtgttatgttgaaacagctaatctggatggggagacgaaccttaaaatacgtcagggtttgagtcacactgctgacatgcaaacacgtgaagttctgatgaagttatctggaactatagagtgtgaagggcccaaccgccacctctatgacttcactggaaacttgaacttagatgggaaaagccttgttgcccttgggcctgaccagatcttattaagaggtacacagcttagaaatactcagtgggtctttggcatagttgtttatactggacacgacaccaaactcatgcagaattcaaccaaagcgcctctcaagagatcaaatgttgagaaggtgactaacgtgcagatcctggtgttgtttggcatcctcttggtcatggccttggtgagctcggcgggggccctgtactggaacaggtctcatggtgaaaagaactggtacatcaagaagatggacaccacctcagataattttggatacaacctactgacgttcatcatcttatacaacaatcttattcccatcagtctgttggtgactcttgaggttgtgaagtatactcaagcccttttcataaactgggacacagatatgtattatataggaaatgacactcctgccatggccaggacatcaaaccttaatgaagagcttgggcaggtgaaatatctcttttctgacaagactggaacgcttacatgcaatatcatgaactttaagaagtgcagcattgccggagtaacctatggtcacttcccagaattggcaagagagccgtcttcagatgacttctgtcggatgcctcctccctgtagtgattcctgtgactttgatgaccccaggctgttgaagaacattgaggatcgccatcccacagccccttgcattcaggagttcctcacccttctggccgtgtgccacacggttgttcctgagaaggatggagataacatcatctaccaggcctcttccccagatgaagctgctttggtgaaaggagctaaaaagctgggctttgtcttcacagccagaacaccattctcagtcatcatagaagcgatgggacaggaacaaacattcggaatccttaatgtcctggaattttctagtgacagaaaaagaatgtctgtaattgttcgaactccttcaggacgacttcggctttactgtaaaggggctgataatgtgatttttgagagactttcaaaagactcaaaatatatggaggaaacattatgccatctggaatactttgccacggaaggcttgcggactctctgtgtggcttatgctgatctctctgagaatgagtatgaggagtggctgaaagtctatcaggaagccagcaccatattgaaggacagagctcaacggttggaagagtgttacgagatcattgagaagaatttgctgctacttggagccacagccatagaagatcgccttcaagcaggagttccagaaaccatcgcaacactgttgaaggcagaaattaaaatatgggtgttgacaggagacaaacaagaaactgcgattaatatagggtattcctgccgattggtatcgcagaatatggcccttatcctattgaaggaggactctttggatgccacaagggcagccattactcagcactgcactgaccttgggaatttgctgggcaaggaaaatgacgtggccctgatcatcgatggccacaccctgaagtacgcgctctccttcgaagtccggaggagtttcctggatttggcactctcgtgcaaagcggtcatatgctgcagagtgtctcctctgcagaagtctgagatagtggatgtggtgaagaagcgggtgaaggccatcaccctcgccatcggagacggcgccaacgatgtcgggatgatccagacagcccacgtgggtgtgggaatcagtgggaatgaaggcatgcaggccaccaacaactcggattacgccatcgcacagttttcctacttagagaagcttctgttggttcatggagcctggagctacaaccgggtgaccaagtgcatcttgtactgcttctataagaacgtggtcctgtatattattgagattttcaccgctttgccgcccttcactctgggaatctttgagaggtcttgcactcaggagagcatgctcaggtttccccagctctacaaaatcacccagaatggcgaaggcttcaacacaaaggttttctggggtcactgcatcaacgccttggtccactccctcatcctcttctggtttcccatgaaagctctggagcatgatactgtgttgacaagtggtcatgctaccgactatttatttgttggaaatattgtttacacatatgttgttgttactgtttgtctgaaagctggtttggagaccacagcttggactaaattcagtcatctggctgtctggggaagcatgctgacctggctggtgttttttggcatctactcgaccatctggcccaccattcccattgctccagatatgagaggacaggcaactatggtcctgagctccgcacacttctggttgggattatttctggttcctactgcctgtttgattgaagatgtggcatggagagcagccaagcacacctgcaaaaagacattgctggaggaggtgcaggagctggaaaccaagtctcgagtcctgggaaaagcggtgctgcgggatagcaatggaaagaggctgaacgagcgcgaccgcctgatcaagaggctgggccggaagacgcccccgacgctgttccggggcagctccctgcagcagggcgtcccgcatgggtatgctttttctcaagaagaacacggagctgttagtcaggaagaagtcatccgtgcttatgacaccaccaaaaagaaatccaggaagaaataagacatgaattttcctgactgatcttaggaaagagattcagtttgttgcacccagtgttaacacatctttgtcagagaagactggcgtcagcagccaaaacaccaggaaacacatttctgtggccttagccaagcagtttgttagttacatattccctcgcaaacctggagtgcagaccacaggggaagctatctttgccctcccaactcgtctgcagtgcttagcctaacttttgtttatgtcgttatgaagcatt

SEQ ID NO: 2704 - DNA, 476 bp, Homo sapiens
  source 1..476: mol_type = unassigned DNA
gacctgttcgttcttctttgggctataagaaggcagaggatgagatgtcccgggccacgtctgttggagaccagctggaggcacccgcccgcaccatttacctcaaccaaccgcatctcaacaaattccgcgacaaccagatcagtacggccaagtacagcgtgttgacatttctacctcgattcttgtatgagcagattagaagagctgctaatgccttctttctcttcattgccttattacagcaaattccagatgtatctccaacaggaagatataccaccctggtgccattgatcattattttaacaattgcaggcatcaaagagattgtagaagattttaagcgacacaaggcagacaatgcagttaacaaaaagaaaacaatagtgttaagaaatggtatgtggcataccattatgtggaaagaggagaattcgccaccctttaaagaaatttctcctttatagtgtttt

SEQ ID NO: 2705 - DNA, 9575 bp, Homo sapiens
  source 1..9575: mol_type = unassigned DNA
acaggcgccggcggtccccgccagctagcagcccggcgaggcgctggcccacccatggtcctcgggcggcggcccctgcgcccagccctgcgcgtagcctccgtctctcgcccggggccgccgagcccccgacacgggcgagatgctgaacggcgcaggcctggacaaagctcttaagatgtccctgccgcggaggtcgaggatccgctcgtccgtgggacctgttcgttcttctttgggctataagaaggcagaggatgagatgtcccgggccacgtctgttggagaccagctggaggcacccgcccgcaccatttacctcaaccaaccgcatctcaacaaattccgcgacaaccagatcagtacggccaagtacagcgtgttgacatttctacctcgattcttgtatgagcagattagaagagctgctaatgccttctttctcttcattgccttattacagcaaattccagatgtatctccaacaggaagatataccaccctggtgccattgatcattattttaacaattgcaggcatcaaagagattgtagaagattttaagcgacacaaggcagacaatgcagttaacaaaaagaaaacaatagtgttaagaaatggtatgtggcataccattatgtggaaagaggtggcagtgggagacattgtgaaggtcgtcaatgggcagtatcttccagcagatgtggtcctgctgtcatccagtgaacctcaggcaatgtgttatgttgaaacagctaatctggatggggagacgaaccttaaaatacgtcagggtttgagtcacactgctgacatgcaaacacgtgaagttctgatgaagttatctggaactatagagtgtgaagggcccaaccgccacctctatgacttcactggaaacttgaacttagatgggaaaagccttgttgcccttgggcctgaccagatcttattaagaggtacacagcttagaaatactcagtgggtctttggcatagttgtttatactggacacgacaccaaactcatgcagaattcaaccaaagcgcctctcaagagatcaaatgttgagaaggtgactaacgtgcagatcctggtgttgtttggcatcctcttggtcatggccttggtgagctcggcgggggccctgtactggaacaggtctcatggtgaaaagaactggtacatcaagaagatggacaccacctcagataattttggatacaacctactgacgttcatcatcttatacaacaatcttattcccatcagtctgttggtgactcttgaggttgtgaagtatactcaagcccttttcataaactgggacacagatatgtattatataggaaatgacactcctgccatggccaggacatcaaaccttaatgaagagcttgggcaggtgaaatatctcttttctgacaagactggaacgcttacatgcaatatcatgaactttaagaagtgcagcattgccggagtaacctatggtcacttcccagaattggcaagagagccgtcttcagatgacttctgtcggatgcctcctccctgtagtgattcctgtgactttgatgaccccaggctgttgaagaacattgaggatcgccatcccacagccccttgcattcaggagttcctcacccttctggccgtgtgccacacggttgttcctgagaaggatggagataacatcatctaccaggcctcttccccagatgaagctgctttggtgaaaggagctaaaaagctgggctttgtcttcacagccagaacaccattctcagtcatcatagaagcgatgggacaggaacaaacattcggaatccttaatgtcctggaattttctagtgacagaaaaagaatgtctgtaattgttcgaactccttcaggacgacttcggctttactgtaaaggggctgataatgtgatttttgagagactttcaaaagactcaaaatatatggaggaaacattatgccatctggaatactttgccacggaaggcttgcggactctctgtgtggcttatgctgatctctctgagaatgagtatgaggagtggctgaaagtctatcaggaagccagcaccatattgaaggacagagctcaacggttggaagagtgttacgagatcattgagaagaatttgctgctacttggagccacagccatagaagatcgccttcaagcaggagttccagaaaccatcgcaacactgttgaaggcagaaattaaaatatgggtgttgacaggagacaaacaagaaactgcgattaatatagggtattcctgccgattggtatcgcagaatatggcccttatcctattgaaggaggactctttggatgccacaagggcagccattactcagcactgcactgaccttgggaatttgctgggcaaggaaaatgacgtggccctgatcatcgatggccacaccctgaagtacgcgctctccttcgaagtccggaggagtttcctggatttggcactctcgtgcaaagcggtcatatgctgcagagtgtctcctctgcagaagtctgagatagtggatgtggtgaagaagcgggtgaaggccatcaccctcgccatcggagacggcgccaacgatgtcgggatgatccagacagcccacgtgggtgtgggaatcagtgggaatgaaggcatgcaggccaccaacaactcggattacgccatcgcacagttttcctacttagagaagcttctgttggttcatggagcctggagctacaaccgggtgaccaagtgcatcttgtactgcttctataagaacgtggtcctgtatattattgagctttggttcgcctttgttaatggattttctgggcagattttatttgaacgttggtgcatcggcctgtacaatgtgattttcaccgctttgccgcccttcactctgggaatctttgagaggtcttgcactcaggagagcatgctcaggtttccccagctctacaaaatcacccagaatggcgaaggcttcaacacaaaggttttctggggtcactgcatcaacgccttggtccactccctcatcctcttctggtttcccatgaaagctctggagcatgatactgtgttgacaagtggtcatgctaccgactatttatttgttggaaatattgtttacacatatgttgttgttactgtttgtctgaaagctggtttggagaccacagcttggactaaattcagtcatctggctgtctggggaagcatgctgacctggctggtgttttttggcatctactcgaccatctggcccaccattcccattgctccagatatgagaggacaggcaactatggtcctgagctccgcacacttctggttgggattatttctggttcctactgcctgtttgattgaagatgtggcatggagagcagccaagcacacctgcaaaaagacattgctggaggaggtgcaggagctggaaaccaagtctcgagtcctgggaaaagcggtgctgcgggatagcaatggaaagaggctgaacgagcgcgaccgcctgatcaagaggctgggccggaagacgcccccgacgctgttccggggcagctccctgcagcagggcgtcccgcatgggtatgctttttctcaagaagaacacggagctgttagtcaggaagaagtcatccgtgcttatgacaccaccaaaaagaaatccaggaagaaataagacatgaattttcctgactgatcttaggaaagagattcagtttgttgcacccagtgttaacacatctttgtcagagaagactggcgtcagcagccaaaacaccaggaaacacatttctgtggccttagccaagcagtttgttagttacatattccctcgcaaacctggagtgcagaccacaggggaagctatctttgccctcccaactcgtctgcagtgcttagcctaacttttgtttatgtcgttatgaagcattcaactgtgctctgtgaggtgtgaaattaaaaacattatgtttcaccaatatttaaacatcagtactagttgtcctgggagaaagggaaaggagttttatgttgcgtgagaggcccatcctgtgtaattggagcagggcacacttgcttcctgttgagttaactcagaggttaagtccaacgggccacatgcagacttcactgtaggcaggttgctctcctgctttgattcctgttttgtgtgtaaaattggcataaacttcttgattgcagtgaaatcacaaaattctctatcggggtggtcaacctgagaacatttatttgaacctcttagccacatttccagcagggcaaaccaactgatgccctggaagagtcttccgcaccctctccaggtgcactcggcccagtcctgccgccgtgtccaggcgcccctcacccccacacctgctgcatggctggccacaccactcagtgcatggcggccgatgggcagccaacccaaacccgcgcctttccttgttccactgcagactcagatacagatgcgaaaaattccttcttccaccgcccttctcgttctgtaaagaaagaaaagaaacatagcctttctgcatatattctaaacgtctctctgcctctgtctgacatggggccaccccacaggtcagagtggtggtagaaccccttcaggactcccagccgtggtcaggctctgaatactcccttcccaacatccagactgctgggcctttggcatccacttacattagaacccacgtttgtttcagagcacattttggactttcactgttgggaaatgaatgaatttataacatgcctgcacagcgaaggaacacacctgtcgctcttagctctagagtcagaggatgagtaaacccagatgcaagagtataggacattgagtggggagaacaagacgaccacagaagtcctcagaaggagaaggaaggacacggagacactgagaggaggacacagaggaatcgccaccagatctttgcagtagaaactctgaaataggccttgagacccagacaattgtcatgatcagcccagtgtgtatgagagcttaaacaagaccttcacacacagttctaattgaaaagaattccaaacatttcagggaaacacctttttaaaaaatatactgacatggtttcctttctgtatcccatcagtgttagacacaggtacctatcagaatacggcatatcctgaattatctaagacaaggaagtgaagagcggaatcactgactttcccaactgcagagtcccacacttaaatctcaacagaacctagatgtcttcaggcatgaatgtgagcacctggagcccttactaaacaacctgcctggagccctgttctctgctctggttgccaaaccagatttttggatggcctaaatacttgtgggcaactgttactggtgaaaaatgggagtggagagcatgttttggattttcactgtggggaaatgaatgaatttatcacatgactgtgcagcgaaggagcacacctgtcactcttagctctagagtcggaggatgagtcaaccctgtaggaatgattgtgctaaattaggaaataacactttagtgcactttgcttcctaacccttttttgtcagaaatctacaacctactgggcatggaaatgatttaaaatatgatctgcattgactaagaaaactcatcctcacttatgaggtgaccaggatgcagagagggcctgaggggcagcagaacaatgcaattcacaggtgaggctccaaaaagggccatttctttctccccaaggtgcatagaacatttttaaatatcagagtacccagcaagacggaaggactgtcatgcaggaactctaacacaaaatgtgcctatgactaacacgacaaaccaaggtgtatggtttctttgcacacccagaaaggtgatggccaagatacagaggagaaacgaaaactggaattgaatgtgcattaggcatcttaactattcatattttgtctcatttgggaactaagcctatttggaaagagtggattagaaattgaattctttgtcaaacagttagctctgtcttgaacttgaagccttccaaatcagaattatgtatttaagtgtgtgtttgtgtttgtttggggtttttgtttcttacattagagttcatattttctgggatttaaggatacaggtgtattttcctattctcttgagaagtagactaaacaatatttgcagtgatgacagacgcacacagaagaaaacattagaagagatgcctttctatcctctcatgtggttgagcattcttacagccaaatgactaaattggctgtaaattggtttctaggaggagcagctgtcactacgtgtgatgtataatatttagccagggccaactcaggggctgtgtcatttgtcctatctttaaattgaggtcagagtgtcacacacaacccctcccctggggcagggtggactggactaggttgcatacgctggctgtcagctcagcaaaaatgccacatggggcttgtcactccgccagacactcactgactcacgggctggcaggtcacgctcggttagcgctccagggcctgactctggattgagctaaactggcagaatccactcaggccaacccttggtctactgctgtgtacagacagcccagtcctgtgttgagtctctcttctcctggatgaccctgcaaaaggaagagaccagttgtactgtgggcttagttctgggtttccactgcacactgacacgtgccagcaagggtagctgtggaaaacacgtatcaggagagcagagtagtctggatgaatactctgtgctgatcagaacgggctcggtcataatttaggagtggagctgatgtgtctgtcctgcctcagtgcagaatattccaggcttcttgaccagggttatgttcacccatctcccaacacacacatgcacacatgaaaacaaaaacatggtaactcttttggttcggcacaccatacaaaacgtgctttggggcgaggagtgctgtttcttttaacacttgtagaggaatatcctgagaagtgaacctgggctttgggagagctcagctgagaattctgttgacattttctttcccttgacaaggcttcaggttcgtctcactatagggagctggctgtgaaaatcagtaataacttgtcaagaagcagtgaaaaatgcgggggggtggaaagagcctaggtaactaatgtcttataatgcatatgtatgtaaatattacaggatttaaggttgaattttttaaaaagaaagttatagtctgtaatttccatttgttataataatgacctttaatcttgtcatttggaaccataaagcatttttatcaggtacctctgttccaagggatttatgtcttagaccatagctgaattgaatgtttgcaaaacactgctataggataaggtggtctttagttttgaacgtgtgaaaggactgcacacttttcagccagggtttgagttactgcccagggtcatcgtctcaaagtaattcaaggagtgatttaacatcagcatttgaaatgtagtcttcatctcctgggatccataaaaaaatgtgaacagggaaatggtggctaagcagagcctgaaataataacttggcaaagaaatgagtttatcaggtcgagtcaaaacatggcatcccctgttacactcaagaaatgttttcttcatgtaaatgtttatacgggcatatataatcacaatgggaacagttaaaaccccctcccttcaaaaaaagaaaatctatatcagttgggtttggttttggttcttcattggctcaaggcagttaactgtctcagtatagccttcggggagatttaacctcattctagccatttttccatcctgaaggccaagaaggactattagaagggtttttgaggggtttcggaggtgagggcccaagacccccataatgacatcattaggcattcttgaaaggtgttaacagaccagcacgctcgatgtgttgtacccttcatttatttttttttctcagcatcccaagttgtccatcagtacattccccttcaccttacctgatcttcatttaatgcccagtctgtaactaatgttctgtttaaagctctcttaatttgttggctatgagtgatttgtgaatctgggatgtaaccctgagtgaggagaaaagggcattgagccagcataaatctgaatgggcagaagccacaaacaaatgggagcagaaaagaagggcgagctcccccgcgccgcaccccgtgtataatccagtgttaacctctgaggaacacctcggctctcccaactgaggagagacaaaagagggattctttttacacccaggctggcgcattttcaagtgacaatctcgggctctagttgcctttgagatatccactctgctctttctcccaggcctcagaccaagaaaaacatgctctcaagattagcccataggcagttcttgtgacctggctgaagaaagaaaggagacctgtttgttttaaaagtcgggcgcaaagtgtcaggtggctttgatttatgacagaaagaggaagaagaaagttggagtaatagcactatccaaataaccctgcccaggaaacttgggggtcaagagagcttatcaagagccttttataggtaagctcttccgtgtgaaagagaaaaggccggaaagagggagagagcccagagagcaggctgcgaactcacttccaatgggattggagtctgttgtattcttaagagatagcctgatatgtggtttataggtgaatcaataaacaccaacaacaacaaaaaaaaaaaaaaaaaaaaaggaagaaaagaaaaaaaggaaaccagccctgtcatggaatttctctccttccctgcacagtaaagacttttgggttttcatggataaaatcaatgtcagtactgaaactcctactctcccctcccgccccactctcccccgttgcccgagatggccaagttcaggcctgtgcaatgccgcttccctctgagcctccctctcaagggccacgcaggcagctgcagcagggccagctgcaggatggggctgccggtcactgaattgtcgttcaaatgcatcatctttgtggcgtctttctcatgcgagcaaagccacgtgctctcctgtctgctgtcacatctgtgcctggattgcttaaatattgtttgtgatggggaggttttaatctggtgatgcagagggaagcagggctgtgggggcacgtttaattggctcccagcagcgtggggggtgcttctatggtgtgtggggttttttgttgcctccctctagaagtgttaccgttttcacgtcctattaatgtcctctggttgttaaattacagcagcacattacagtgcactgggttccctcctggagtgaatacaaacggagggcatctacttgtatttttagaagttttgggagaatttagtgatttgtggctttgatcaatcctgttgactggtgtatgtctgcgcaaacctgtttcaaataaatcttttgttaaagtaa

SEQ ID NO: 2706 - DNA, 4204 bp, Homo sapiens
  source 1..4204: mol_type = unassigned DNA
atgagatgtcccgggccacgtctgttggagaccagctggaggcacccgcccgcaccatttacctcaaccaaccgccacctctatgacttcactggaaacttgaacttagatgggaaaagccttgttgcccttgggcctgaccagatcttattaagaggtacacagcttagaaatactcagtgggtctttggcatagttgtttatactggacacgacaccaaactcatgcagaattcaaccaaagcgcctctcaagagatcaaatgttgagaaggtgactaacgtgcagatcctggtgttgtttggcatcctcttggtcatggccttggtgagctcggcgggggccctgtactggaacaggtctcatggtgaaaagaactggtacatcaagaagatggacaccacctcagataattttggatacaacctactgacgttcatcatcttatacaacaatcttattcccatcagtctgttggtgactcttgaggttgtgaagtatactcaagcccttttcataaactgggacacagatatgtattatataggaaatgacactcctgccatggccaggacatcaaaccttaatgaagagcttgggcaggtgaaatatctcttttctgacaagactggaacgcttacatgcaatatcatgaactttaagaagtgcagcattgccggagtaacctatggtcacttcccagaattggcaagagagccgtcttcagatgacttctgtcggatgcctcctccctgtagtgattcctgtgactttgatgaccccaggctgttgaagaacattgaggatcgccatcccacagccccttgcattcaggagttcctcacccttctggccgtgtgccacacggttgttcctgagaaggatggagataacatcatctaccaggcctcttccccagatgaagctgctttggtgaaaggagctaaaaagctgggctttgtcttcacagccagaacaccattctcagtcatcatagaagcgatgggacaggaacaaacattcggaatccttaatgtcctggaattttctagtgacagaaaaagaatgtctgtaattgttcgaactccttcaggacgacttcggctttactgtaaaggggctgataatgtgatttttgagagactttcaaaagactcaaaatatatggaggaaacattatgccatctggaatactttgccacggaaggcttgcggactctctgtgtggcttatgctgatctctctgagaatgagtatgaggagtggctgaaagtctatcaggaagccagcaccatattgaaggacagagctcaacggttggaagagtgttacgagatcattgagaagaatttgctgctacttggagccacagccatagaagatcgccttcaagcaggagttccagaaaccatcgcaacactgttgaaggcagaaattaaaatatgggtgttgacaggagacaaacaagaaactgcgattaatatagggtattcctgccgattggtatcgcagaatatggcccttatcctattgaaggaggactctttggatgccacaagggcagccattactcagcactgcactgaccttgggaatttgctgggcaaggaaaatgacgtggccctgatcatcgatggccacaccctgaagtacgcgctctccttcgaagtccggaggagtttcctggatttggcactctcgtgcaaagcggtcatatgctgcagagtgtctcctctgcagaagtctgagatagtggatgtggtgaagaagcgggtgaaggccatcaccctcgccatcggagacggcgccaacgatgtcgggatgatccagacagcccacgtgggtgtgggaatcagtgggaatgaaggcatgcaggccaccaacaactcggattacgccatcgcacagttttcctacttagagaagcttctgttggttcatggagcctggagctacaaccgggtgaccaagtgcatcttgtactgcttctataagaacgtggtcctgtatattattgagctttggttcgcctttgttaatggattttctgggcagattttatttgaacgttggtgcatcggcctgtacaatgtgattttcaccgctttgccgcccttcactctgggaatctttgagaggtcttgcactcaggagagcatgctcaggtttccccagctctacaaaatcacccagaatggcgaaggcttcaacacaaaggttttctggggtcactgcatcaacgccttggtccactccctcatcctcttctggtttcccatgaaagctctggagcatgatactgtgttgacaagtggtcatgctaccgactatttatttgttggaaatattgtttacacatatgttgttgttactgtttgtctgaaagctggtttggagaccacagcttggactaaattcagtcatctggctgtctggggaagcatgctgacctggctggtgttttttggcatctactcgaccatctggcccaccattcccattgctccagatatgagaggacaggcaactatggtcctgagctccgcacacttctggttgggattatttctggttcctactgcctgtttgattgaagatgtggcatggagagcagccaagcacacctgcaaaaagacattgctggaggaggtgcaggagctggaaaccaagtctcgagtcctgggaaaagcggtgctgcgggatagcaatggaaagaggctgaacgagcgcgaccgcctgatcaagaggctgggccggaagacgcccccgacgctgttccggggcagctccctgcagcagggcgtcccgcatgggtatgctttttctcaagaagaacacggagctgttagtcaggaagaagtcatccgtgcttatgacaccaccaaaaagaaatccaggaagaaataagacatgaattttcctgactgatcttaggaaagagattcagtttgttgcacccagtgttaacacatctttgtcagagaagactggcgtcagcagccaaaacaccaggaaacacatttctgtggccttagccaagcagtttgttagttacatattccctcgcaaacctggagtgcagaccacaggggaagctatctttgccctcccaactcgtctgcagtgcttagcctaacttttgtttatgtcgttatgaagcattcaactgtgctctgtgaggtgtgaaattaaaaacattatgtttcaccaatatttaaacatcagtactagttgtcctgggagaaagggaaaggagttttatgttgcgtgagaggcccatcctgtgtaattggagcagggcacacttgcttcctgttgagttaactcagaggttaagtccaacgggccacatgcagacttcactgtaggcaggttgctctcctgctttgattcctgttttgtgtgtaaaattggcataaacttcttgattgcagtgaaatcacaaaattctctatcggggtggtcaacctgagaacatttatttgaacctcttagccacatttccagcagggcaaaccaactgatgccctggaagagtcttccgcaccctctccaggtgcactcggcccagtcctgccgccgtgtccaggcgcccctcacccccacacctgctgcatggctggccacaccactcagtgcatggcggccgatgggcagccaacccaaacccgcgcctttccttgttccactgcagactcagatacagatgcgaaaaattccttcttccaccgcccttctcgttctgtaaagaaagaaaagaaacatagcctttctgcatatattctaaacgtctctctgcctctgtctgacatggggccaccccacaggtcagagtggtggtagaaccccttcaggactcccagccgtggtcaggctctgaatactcccttcccaacatccagactgctgggcctttggcatccacttacattagaacccacgtttgtttcagagcacattttggactttcactgttgggaaatgaatgaatttataacatgcctgcacagcgaaggaacacacctgtcgctcttagctctagagtcagaggatgagtaaacccagatgcaagagtataggacattgagtggggagaacaagacgaccacagaagtcctcagaaggagaaggaaggacacggagacactgagaggaggacacagaggaatcgccaccagatctttgcagtagaaactctgaaata

SEQ ID NO: 2707 - DNA, 5095 bp, Homo sapiens
  source 1..5095: mol_type = unassigned DNA
gtttcaggaccgttggcaccgggctaacggttccaccacgtccgccgccctggacgcccgcggcctgcccccccctgcctctcctgcgccgatacacttcgagtggattctggccatttgagcattctctccaactctccaatccccagtctgcccccacgggggtctcccccacctctcccccgtcccacagcctaaacccctcttcgccctgaacctcccttttcctcatgcggtgaatgggcactggccccgctcagactcccaggagcaccagagctggccctgagccaagccctgccccaccaggacctggggacacgggtgactcagacgtgactcaggaaggctcaggtcctgctggcatccgcggaggtgagacggtgatcagagctgggatgggagactccccaggcagaggggcacctgagaggaggcacaaggcccagcctggccgggctaggaagtatgaatggagaccagaaggccccaccagcatgggcagcctcggccagagagaagatctccaagatgaggacaggaactcagcattcacctggaaggtccaggccaacaaccgtgcctacaacgggcagttcaaggagaaggtgatcctgtgctggcaaaggaagaaatacaagaccaatgtcatccgcacggccaagtacaacttctactcgttcctgccgctgaacctgtacgagcagttccaccgcgtgtccaacctgttcttcctcatcatcatcatcctgcagagcattcccgacatctccacgctgccctggttctcgctcagtacccctatggtctgcctcctcttcatccgtgccacccgggacctggtggacgacatggggagacacaagagtgacagagccatcaacaacagaccctgccagattctgatggggaagagcttcaagcagaagaaatggcaggatctgtgcgtgggggatgtggtctgtctccgcaaggacaacatcgtcccagccgacatgctcttgctggccagcacggagcccagcagcctgtgctatgtggagacggtggacattgacggggagaccaacttgaagttcagacaggccctgatggtcacccacaaagaactggccactataaagaagatggcgtcctttcaaggcacagtgacgtgtgaggcgcctaacagtcggatgcaccacttcgtggggtgcctggaatggaatgacaagaaatactccctggacattggcaacctcctcctccgaggctgcaggattcgcaacacagacacctgctatggactggtcatttatgctggttttgacacaaaaattatgaagaactgtggcaagatccatttgaagagaaccaagctggacctcctgatgaacaagctggtggttgtgatcttcatctccgtggtgcttgtctgcctggtgttggccttcggcttcggtttctcagtcaaagaattcaaagaccaccactactacctctcgggggtgcatgggagcagcgtggccgcagagtccttcttcgtcttctggagcttcctcatcctgctcagcgtcaccatcccgatgtccatgttcatcctgtccgagttcatctacctggggaacagcgtcttcatcgactgggacgtgcagatgtactacaagccgcaggacgtgcctgccaaggcccgcagcaccagcctcaacgaccacctgggccaggtggaatacatcttctcggacaagacgggcacgctcacgcagaacatcttgaccttcaacaagtgctgcatcagcggccgcgtctatgggccggattcagaggccacgacccgacctaaggagaacccctacctctggaacaagttcgccgacgggaagctgctcttccacaatgcggccctgctgcacctcgtgcggaccaacggggacgaggccgtgcgggagttctggcgcctgctggccatctgccacacggtgatggtgcgggagagcccccgtgagcgcccagaccagctgttgtaccaggcggcctcccccgacgagggggcgctggtcaccgcagcccggaacttcggctacgtgttcctgtcccgcacccaggacaccgtcacgatcatggagctgggggaggaacgggtctaccaggtcctggccataatggacttcaacagcacgcgcaaacggatgtcggtgctggttcgaaagccagagggcgccatctgcctgtacaccaagggcgccgacacggtcatcttcgaacgcttgcacaggaggggggcaatggaatttgccacagaggaggccttggctgcctttgcccaggagaccctgcggacactgtgcctggcctacagggaggtggctgaggacatttacgaggactggcagcagcgccaccaggaggccagcctcctgctgcagaaccgggcacaggccctgcaacagctgctgggagccacagccatcgaggacagactccaggacggtgtccctgaaaccatcaaatgtctcaagaagagcaacatcaaaatatgggtgctcaccggggacaagcaggaaacggctgtgaacatcggcttcgcctgcgagctgctgtcagagaatatgctcattctggaggagaaggagattagccgcatcctggagacctactgggaaaacagtaacaaccttctaaccagggagtccctgtcgcaggtcaagctggccttggtcattaacggagacttcctggacaaactgctggtgtccctgcggaaggagccgcgcgccctggcgcagaacgtgaacatggacgaggcgtggcaggagctcggccagtccaggagggatttcctctacgccaggcgcctgtccctgctgtgccggaggttcgggctcccgctggctgcaccgccagcccaggactccagagcccgccgtagctccgaggtgctgcaggagcgcgccttcgtggacctggcgtccaagtgccaggcggtcatctgctgccgcgtgacgcccaagcagaaggccctgatcgtggccctggtcaagaagtaccaccaggtggtgaccctggccatcggggacggtgccaacgacatcaacatgatcaagaccgcggacgtgggcgtggggctggcgggccaggagggcatgcaggcagttcagaacagcgacttcgtgctcggccagttctgcttcctgcagcgcctcctgctggtgcacggccgctggtcctacgtgcggatctgcaagttcctgcgctacttcttctacaagagcatggccagcatgatggtgcaggtctggtttgcctgctacaacggcttcaccggccagcccctgtatgaaggatggttcctggctcttttcaacctcctgtacagcaccctgccagttctctacattgggctctttgagcaggacgtgagcgcagagcagagcctggagaagccggagctgtacgtggtggggcagaaggacgagctcttcaactactgggtcttcgtccaagccatcgcccatggtgtgaccacctctctggtcaacttcttcatgacactgtggatcagccgcgacacggcgggacccgccagcttcagcgaccaccagtcctttgcggtcgtggtggccctgtcttgcctgctgtccatcaccatggaggtcattcttatcatcaagtactggaccgccctgtgcgtggcgaccatcctcctcagccttggtttctacgccatcatgactaccaccacccagagcttctggctcttcagagtatcccccacgaccttcccgtttctgtatgccgacctcagcgtgatgtcctctccctccatcctgctggtggtcctgctgagtgtgtccataaacaccttccctgtcctggccctccgagtcatcttcccagccctcaaggagctacgtgccaaggaggagaaggtggaggagggccccagcgaggagattttcaccatggagcccttgcctcatgtacaccgggagtctcgtgcccgccgttccagctatgctttctcccaccgtgagggatatgcaaacctcatcactcagggcacaattctgcggaggggaccaggggtcagcagtgacatagcatctgaatccctagacccatctgatgaagaggcagcttcgagcccaaaagagtcacagtgacacctcaggaagatgtccttcctggggaagaagaagcaccagccacaggggcaggtgtcctcccaggaagtacagctcccccctacacctagctcatcattttctatggatagacaatccgctcttcatccagaaaaccaacctgccctccccaaatatgtgctcaccagcagcaacaggctatctgagtctttccaagagcaattgccaagggcacaggagaggtcattgtcacccaagcagaggccaccttctcctgagaagttgctgttgaccaaggagaggtcacattcttttcaggagaaatcactgttgcacagagaaagccagctgtcgtcatttgagagccagccacagcctctggggagccagtcatttctttcaggccagctgacgttggagagccagccagactcctcggaggagaagtcagcatttttgaagccctccacaccgttccggaagagctggcaaaaggagcctcacacccccaaggaggggacggtgccacttccagacaagacccacaaatctcaggtggagactctgccaccaagtctggaagaatcgtccacgtccacgagcgagcagcctatggaggtggagctgtggcccgcggagaagcagtcatcatcatccatggagtggctgctggtgcccggggaggagcagctatccttgcccccagaggagcagtcattgccctctgcggaggggaccagggttcagcagtgacgtagcatctgaatccctagacccatctgatgaagaggcatcttcgagcccaaaggagtcacgctggcatatcaggaagatgtccttcctgggaagaagaagctccagccagttctgctgcaagtcaaccagcatgcagggggccttcctctaaagacaaggactccacatgcttttctttttctaataaaccagggtccatctgaccccagcgctaa

SEQ ID NO: 2708 - DNA, 2758 bp, Homo sapiens
  source 1..2758: mol_type = unassigned DNA
gtttcaggaccgttggcaccgggctaacggttccaccacgtccgccgccctggacgcccgcggcctgcccccccctgcctctcctgcgccggacctggggacacgggtgactcagacgtgactcaggaaggctcaggtcctgctggcatccgcggaggtgagacggtgatcagagctgggatgggagactccccaggcagaggggcacctgagaggaggcacaaggcccagcctggccgggctaggaagtatgaatggagaccagaaggccccaccagcatgggcagcctcggccagagagaagatctccaagatgaggacaggaactcagcattcacctggaaggtccaggccaacaaccgtgcctacaacgggcagttcaaggagaaggtgatcctgtgctggcaaaggaagaaatacaagaccaatgtcatccgcacggccaagtacaacttctactcgttcctgccgctgaacctgtacgagcagttccaccgcgtgtccaacctgttcttcctcatcatcatcatcctgcagagcattcccgacatctccacgctgccctggttctcgctcagtacccctatggtctgcctcctcttcatccgtgccacccgggacctggtggacgacatggggagacacaagagtgacagagccatcaacaacagaccctgccagattctgatggggaagagcttcaagcagaagaaatggcaggatctgtgcgtgggggatgtggtctgtctccgcaaggacaacatcgtcccagccgacatgctcttgctggccagcacggagcccagcagcctgtgctatgtggagacggtggacattgacggggagaccaacttgaagttcagacaggccctgatggtcacccacaaagaactggccactataaagaagatggcgtcctttcaaggcacagtgacgtgtgaggcgcctaacagtcggatgcaccacttcgtggggtgcctggaatggaatgacaagaaatactccctggacattggcaacctcctcctccgaggctgcaggattcgcaacacagacacctgctatggactggtcatttatgctggttttgacacaaaaattatgaagaactgtggcaagatccatttgaagagaaccaagctggacctcctgatgaacaagctggtggttgtgatcttcatctccgtggtgcttgtctgcctggtgttggccttcggcttcggtttctcagtcaaagaattcaaagaccaccactactacctctcgggggtgcatgggagcagcgtggccgcagagtccttcttcgtcttctggagcttcctcatcctgctcagcgtcaccatcccgatgtccatgttcatcctgtccgagttcatctacctggggaacagcgtcttcatcgactgggacgtgcagatgtactacaagccgcaggacgtgcctgccaaggcccgcagcaccagcctcaacgaccacctgggccaggtggaatacatcttctcggacaagacgggcacgctcacgcagaacatcttgaccttcaacaagtgctgcatcagcggccgcgtctatggtgcggccccgacacctgagctcccagctgggtcctcgatcttcaaggggctcagggtgcctgagaaccagagccacgtctggccccatgcccagcacctccgcccgaatctgaaccagggaaccgtagccagatggcctggtttcctttggagggggccaggaaaattttttttttttttgaggcagagtctcactctgtctacccaggcaggaatgcagtggtgcaatcttggctcactgcaatctccacctcccaggttcaagcgattctcctggctcagcctcccgagtagctgggattacaggcacctgccaccacacctaatttttttgtatttttagcagagatggggtttcaccatgttggccatgctggtctcgaactcctggcctccggcgatccacctgcctcggcctcccaaagtgctgggattacaggcgtgagccaccacgcccggccgactttttttttttttttctctctgagacggagttttgctctcgttgcccaggctggagtgcagtggtgcgatctctgctcactgaaacctccgcctcctgggttgattctcccgcctcagcctcccaagtagctgggattacagttgcgtgccaccccgcctggctaatttttgtattttttttttcagtagagatggggtttcaccctgtttcccaggctggtctcgaactcctgacttcaggtgatctgcctgcctcagcctccaaaatattggcattgcaggcatgagccaccacacctagccaaacttttaaacagtgtgtatttatttattttttgagatggggtcttgctctgccgcccaggctggaatgcagtggtgcaatcatagcttattgcagcctcgaattcctgggctcaagcaatcctcccacttcagcttcccaagtagccgggactacaggagagtgccaccttacccagcttatttttgtattttttgtcaagacagggaatccctatgttgcccaggctggtcttgaactcctgggcttaagcgatccgcctgcctccgcttttcaaagcactggaattacagatgtgagccaccacacccggccactgctcttcttttgactttcacaagcctttatttgtggatgctgaaattcgaattgctgagtatttctcagatcacaaaataaaatagttttgtttgtt

SEQ ID NO: 2709 - DNA, 4014 bp, Homo sapiens
  source 1..4014: mol_type = unassigned DNA
gcctctcctgcgccggtgagcggcgggtgctcccactgctgtgcgtccccgggagcccgcgcaccctctctgggctccacccaggctgagagctggggtcgtggcggcgggggtggagagcgcgcccctagaggacctggggacacgggtgactcagacgtgactcaggaaggctcaggtcctgctggcatccgcggaggtgagacggtgatcagagctgggatgggagactccccaggcagaggggcacctgagaggaggcacaaggcccagcctggccgggctaggaagtatgaatggagaccagaaggccccaccagcatgggcagcctcggccagagagaagatctccaagatgaggacaggaactcagcattcacctggaaggtccaggccaacaaccgtgcctacaacgggcagttcaaggagaaggtgatcctgtgctggcaaaggaagaaatacaagaccaatgtcatccgcacggccaagtacaacttctactcgttcctgccgctgaacctgtacgagcagttccaccgcgtgtccaacctgttcttcctcatcatcatcatcctgcagagcattcccgacatctccacgctgccctggttctcgctcagtacccctatggtctgcctcctcttcatccgtgccacccgggacctggtggacgacatggggagacacaagagtgacagagccatcaacaacagaccctgccagattctgatggggaagagcttcaagcagaagaaatggcaggatctgtgcgtgggggatgtggtctgtctccgcaaggacaacatcgtcccagccgacatgctcttgctggccagcacggagcccagcagcctgtgctatgtggagacggtggacattgacggggagaccaacttgaagttcagacaggccctgatggtcacccacaaagaactggccactataaagaagatggcgtcctttcaaggcacagtgacgtgtgaggcgcctaacagtcggatgcaccacttcgtggggtgcctggaatggaatgacaagaaatactccctggacattggcaacctcctcctccgaggctgcaggattcgcaacacagacacctgctatggactggtcatttatgctgatggatacatgtttgtaggttttgacacaaaaattatgaagaactgtggcaagatccatttgaagagaaccaagctggacctcctgatgaacaagctggtggttgtgatcttcatctccgtggtgcttgtctgcctggtgttggccttcggcttcggtttctcagtcaaagaattcaaagaccaccactactacctctcgggggtgcatgggagcagcgtggccgcagagtccttcttcgtcttctggagcttcctcatcctgctcagcgtcaccatcccgatgtccatgttcatcctgtccgagttcatctacctggggaacagcgtcttcatcgactgggacgtgcagatgtactacaagccgcaggacgtgcctgccaaggcccgcagcaccagcctcaacgaccacctgggccaggtggaatacatcttctcggacaagacgggcacgctcacgcagaacatcttgaccttcaacaagtgctgcatcagcggccgcgtctatgggccggattcagaggccacgacccgacctaaggagaacccctacctctggaacaagttcgccgacgggaagctgctcttccacaatgcggccctgctgcacctcgtgcggaccaacggggacgaggccgtgcgggagttctggcgcctgctggccatctgccacacggtgatggtgcgggagagcccccgtgagcgcccagaccagctgttgtaccaggcggcctcccccgacgagggggcgctggtcaccgcagcccggaacttcggctacgtgttcctgtcccgcacccaggacaccgtcacgatcatggagctgggggaggaacgggtctaccaggtcctggccataatggacttcaacagcacgcgcaaacggatgtcggtgctggttcgaaagccagagggcgccatctgcctgtacaccaagggcgccgacacggtcatcttcgaacgcttgcacaggaggggggcaatggaatttgccacagaggaggccttggctgcctttgcccaggagaccctgcggacactgtgcctggcctacagggaggtggctgaggacatttacgaggactggcagcagcgccaccaggaggccagcctcctgctgcagaaccgggcacaggccctgcaacaggtgtacaacgagatggagcaggacctcaggctgctgggagccacagccatcgaggacagactccaggacggtgtccctgaaaccatcaaatgtctcaagaagagcaacatcaaaatatgggtgctcaccggggacaagcaggaaacggctgtgaacatcggcttcgcctgcgagctgctgtcagagaatatgctcattctggaggagaaggagattagccgcatcctggagacctactgggaaaacagtaacaaccttctaaccagggagtccctgtcgcaggtcaagctggccttggtcattaacggagacttcctggacaaactgctggtgtccctgcggaaggagccgcgcgccctggcgcagaacgtgaacatggacgaggcgtggcaggagctcggccagtccaggagggatttcctctacgccaggcgcctgtccctgctgtgccggaggttcgggctcccgctggctgcaccgccagcccaggactccagagcccgccgtagctccgaggtgctgcaggagcgcgccttcgtggacctggcgtccaagtgccaggcggtcatctgctgccgcgtgacgcccaagcagaaggccctgatcgtggccctggtcaagaagtaccaccaggtggtgaccctggccatcggggacggtgccaacgacatcaacatgatcaagaccgcggacgtgggcgtggggctggcgggccaggagggcatgcaggcagttcagaacagcgacttcgtgctcggccagttctgcttcctgcagcgcctcctgctggtgcacggccgctggtcctacgtgcggatctgcaagttcctgcgctacttcttctacaagagcatggccagcatgatggtgcaggtctggtttgcctgctacaacggcttcaccggccagcccctgtatgaaggatggttcctggctcttttcaacctcctgtacagcaccctgccagttctctacattgggctctttgagcaggacgtgagcgcagagcagagcctggagaagccggagctgtacgtggtggggcagaaggacgagctcttcaactactgggtcttcgtccaagccatcgcccatggtgtgaccacctctctggtcaacttcttcatgacactgtggatcagccgcgacacggcgggacccgccagcttcagcgaccaccagtcctttgcggtcgtggtggccctgtcttgcctgctgtccatcaccatggaggtcattcttatcatcaagtactggaccgccctgtgcgtggcgaccatcctcctcagccttggtttctacgccatcatgactaccaccacccagagcttctggctcttcagagtatcccccacgaccttcccgtttctgtatgccgacctcagcgtgatgtcctctccctccatcctgctggtggtcctgctgagtgtgtccataaacaccttccctgtcctggccctccgagtcatcttcccagccctcaaggagctacgtgccaaggaggagaaggtggaggagggccccagcgaggagattttcaccatggagcccttgcctcatgtacaccgggagtctcgtgcccgccgttccagctatgctttctcccaccgtgagggatatgcaaacctcatcactcagggcacaattctgcggaggggaccaggggtcagcagtgacatagcatctgaatccctagacccatctgatgaagaggcagcttcgagcccaaaagagtcacagtga

SEQ ID NO: 2710 - DNA, 5118 bp, Homo sapiens
  source 1..5118: mol_type = unassigned DNA
aggaccgttggcaccgggctaacggttccaccacgtccgccgccctggacgcccgcggcctgcccccccctgcctctcctgcgccgatacacttcgagtggattctggccatttgagcattctctccaactctccaatccccagtctgcccccacgggggtctcccccacctctcccccgtcccacagcctaaacccctcttcgccctgaacctcccttttcctcatgcggtgaatgggcactggccccgctcagactcccaggagcaccagagctggccctgagccaagccctgccccaccaggacctggggacacgggtgactcagacgtgactcaggaaggctcaggtcctgctggcatccgcggaggtgagacggtgatcagagctgggatgggagactccccaggcagaggggcacctgagaggaggcacaaggcccagcctggccgggctaggaagtatgaatggagaccagaaggccccaccagcatgggcagcctcggccagagagaagatctccaagatgaggacaggaactcagcattcacctggaaggtccaggccaacaaccgtgcctacaacgggcagttcaaggagaaggtgatcctgtgctggcaaaggaagaaatacaagaccaatgtcatccgcacggccaagtacaacttctactcgttcctgccgctgaacctgtacgagcagttccaccgcgtgtccaacctgttcttcctcatcatcatcatcctgcagagcattcccgacatctccacgctgccctggttctcgctcagtacccctatggtctgcctcctcttcatccgtgccacccgggacctggtggacgacatggggagacacaagagtgacagagccatcaacaacagaccctgccagattctgatggggaagagcttcaagcagaagaaatggcaggatctgtgcgtgggggatgtggtctgtctccgcaaggacaacatcgtcccagccgacatgctcttgctggccagcacggagcccagcagcctgtgctatgtggagacggtggacattgacggggagaccaacttgaagttcagacaggccctgatggtcacccacaaagaactggccactataaagaagatggcgtcctttcaaggcacagtgacgtgtgaggcgcctaacagtcggatgcaccacttcgtggggtgcctggaatggaatgacaagaaatactccctggacattggcaacctcctcctccgaggctgcaggattcgcaacacagacacctgctatggactggtcatttatgctggttttgacacaaaaattatgaagaactgtggcaagatccatttgaagagaaccaagctggacctcctgatgaacaagctggtggttgtgatcttcatctccgtggtgcttgtctgcctggtgttggccttcggcttcggtttctcagtcaaagaattcaaagaccaccactactacctctcgggggtgcatgggagcagcgtggccgcagagtccttcttcgtcttctggagcttcctcatcctgctcagcgtcaccatcccgatgtccatgttcatcctgtccgagttcatctacctggggaacagcgtcttcatcgactgggacgtgcagatgtactacaagccgcaggacgtgcctgccaaggcccgcagcaccagcctcaacgaccacctgggccaggtggaatacatcttctcggacaagacgggcacgctcacgcagaacatcttgaccttcaacaagtgctgcatcagcggccgcgtctatgggccggattcagaggccacgacccgacctaaggagaacccctacctctggaacaagttcgccgacgggaagctgctcttccacaatgcggccctgctgcacctcgtgcggaccaacggggacgaggccgtgcgggagttctggcgcctgctggccatctgccacacggtgatggtgcgggagagcccccgtgagcgcccagaccagctgttgtaccaggcggcctcccccgacgagggggcgctggtcaccgcagcccggaacttcggctacgtgttcctgtcccgcacccaggacaccgtcacgatcatggagctgggggaggaacgggtctaccaggtcctggccataatggacttcaacagcacgcgcaaacggatgtcggtgctggttcgaaagccagagggcgccatctgcctgtacaccaagggcgccgacacggtcatcttcgaacgcttgcacaggaggggggcaatggaatttgccacagaggaggccttggctgcctttgcccaggagaccctgcggacactgtgcctggcctacagggaggtggctgaggacatttacgaggactggcagcagcgccaccaggaggccagcctcctgctgcagaaccgggcacaggccctgcaacaggtgtacaacgagatggagcaggacctcaggctgctgggagccacagccatcgaggacagactccaggacggtgtccctgaaaccatcaaatgtctcaagaagagcaacatcaaaatatgggtgctcaccggggacaagcaggaaacggctgtgaacatcggcttcgcctgcgagctgctgtcagagaatatgctcattctggaggagaaggagattagccgcatcctggagacctactgggaaaacagtaacaaccttctaaccagggagtccctgtcgcaggtcaagctggccttggtcattaacggagacttcctggacaaactgctggtgtccctgcggaaggagccgcgcgccctggcgcagaacgtgaacatggacgaggcgtggcaggagctcggccagtccaggagggatttcctctacgccaggcgcctgtccctgctgtgccggaggttcgggctcccgctggctgcaccgccagcccaggactccagagcccgccgtagctccgaggtgctgcaggagcgcgccttcgtggacctggcgtccaagtgccaggcggtcatctgctgccgcgtgacgcccaagcagaaggccctgatcgtggccctggtcaagaagtaccaccaggtggtgaccctggccatcggggacggtgccaacgacatcaacatgatcaagaccgcggacgtgggcgtggggctggcgggccaggagggcatgcaggcagttcagaacagcgacttcgtgctcggccagttctgcttcctgcagcgcctcctgctggtgcacggccgctggtcctacgtgcggatctgcaagttcctgcgctacttcttctacaagagcatggccagcatgatggtgcaggtctggtttgcctgctacaacggcttcaccggccagcccctgtatgaaggatggttcctggctcttttcaacctcctgtacagcaccctgccagttctctacattgggctctttgagcaggacgtgagcgcagagcagagcctggagaagccggagctgtacgtggtggggcagaaggacgagctcttcaactactgggtcttcgtccaagccatcgcccatggtgtgaccacctctctggtcaacttcttcatgacactgtggatcagccgcgacacggcgggacccgccagcttcagcgaccaccagtcctttgcggtcgtggtggccctgtcttgcctgctgtccatcaccatggaggtcattcttatcatcaagtactggaccgccctgtgcgtggcgaccatcctcctcagccttggtttctacgccatcatgactaccaccacccagagcttctggctcttcagagtatcccccacgaccttcccgtttctgtatgccgacctcagcgtgatgtcctctccctccatcctgctggtggtcctgctgagtgtgtccataaacaccttccctgtcctggccctccgagtcatcttcccagccctcaaggagctacgtgccaaggaggagaaggtggaggagggccccagcgaggagattttcaccatggagcccttgcctcatgtacaccgggagtctcgtgcccgccgttccagctatgctttctcccaccgtgagggatatgcaaacctcatcactcagggcacaattctgcggaggggaccaggggtcagcagtgacatagcatctgaatccctagacccatctgatgaagaggcagcttcgagcccaaaagagtcacagtgacacctcaggaagatgtccttcctggggaagaagaagcaccagccacaggggcaggtgtcctcccaggaagtacagctcccccctacacctagctcatcattttctatggatagacaatccgctcttcatccagaaaaccaacctgccctccccaaatatgtgctcaccagcagcaacaggctatctgagtctttccaagagcaattgccaagggcacaggagaggtcattgtcacccaagcagaggccaccttctcctgagaagttgctgttgaccaaggagaggtcacattcttttcaggagaaatcactgttgcacagagaaagccagctgtcgtcatttgagagccagccacagcctctggggagccagtcatttctttcaggccagctgacgttggagagccagccagactcctcggaggagaagtcagcatttttgaagccctccacaccgttccggaagagctggcaaaaggagcctcacacccccaaggaggggacggtgccacttccagacaagacccacaaatctcaggtggagactctgccaccaagtctggaagaatcgtccacgtccacgagcgagcagcctatggaggtggagctgtggcccgcggagaagcagtcatcatcatccatggagtggctgctggtgcccggggaggagcagctatccttgcccccagaggagcagtcattgccctctgcggaggggaccagggttcagcagtgacgtagcatctgaatccctagacccatctgatgaagaggcatcttcgagcccaaaggagtcacgctggcatatcaggaagatgtccttcctgggaagaagaagctccagccagttctgctgcaagtcaaccagcatgcagggggccttcctctaaagacaaggactccacatgcttttctttttctaataaaccagggtccatctgaccccagcgct

SEQ ID NO: 2711 - DNA, 3456 bp, Homo sapiens
  source 1..3456: mol_type = unassigned DNA
ggggtggccggctgctcaagtgggacgggggtcagagctttgtggagggaagaaaaacctggagggggcaggagagtaaaaagaagaaacccaggcagacaggcagttggacacactgaggaagaccccccacgagtgggaaccccctggaaggaacacaccggccccggcccccaggaagggagcacaatggaggccgctcatgctaaaaccacggaggaatgtttggcctattttggggtgagtgagaccacgggcctcaccccggaccaagttaagcggaatctggagaaatacggcctcaatgagctccctgctgaggaagggaagaccctgtgggagctggtgatagagcagtttgaagacctcctggtgcggattctcctcctggccgcatgcatttccttcgtgctggcctggtttgaggaaggtgaagagaccatcactgcctttgttgaaccctttgtcatcctcttgatcctcattgccaatgccatcgtgggggtttggcaggagcggaacgcagagaacgccatcgaggccctgaaggagtatgagccagagatggggaaggtctaccgggctgaccgcaagtcagtgcaaaggatcaaggctcgggacatcgtccctggggacatcgtggaggtggctgtgggggacaaagtccctgcagacatccgaatcctcgccatcaaatccaccacgctgcgggttgaccagtccatcctgacaggcgagtctgtatctgtcatcaaacacacggagcccgttcctgacccccgagctgtcaaccaggacaagaagaacatgcttttctcgggcaccaacattgcagccggcaaggccttgggcatcgtggccaccactggtgtgggcaccgagattgggaagatccgagaccaaatggctgccacagaacaggacaagacccccttgcagcagaagctggatgagtttggggagcagctctccaaggtcatctccctcatctgtgtggctgtctggcttatcaacattggccacttcaacgaccccgtccatgggggctcctggttccgcggggccatctactactttaagattgccgtggccttggctgtggctgccatccccgaaggtcttcctgcagtcatcaccacctgcctggccctgggtacccgtcggatggcaaagaagaatgccattgtaagaagcttgccctccgtagagaccctgggctgcacctctgtcatctgttccgacaagacaggcaccctcaccaccaaccagatgtctgtctgcaagatgtttatcattgacaaggtggatggggacatctgcctcctgaatgagttctccatcaccggctccacttacgctccagagggagaggtcttgaagaatgataagccagtccggccagggcagtatgacgggctggtggagctggccaccatctgtgccctctgcaatgactcctccttggacttcaacgaggccaaaggtgtctatgagaaggtcggcgaggccaccgagacagcactcaccaccctggtggagaagatgaatgtgttcaacacggatgtgagaagcctctcgaaggtggagagagccaacgcctgcaactcggtgatccgccagctaatgaagaaggaattcaccctggagttctcccgagacagaaagtccatgtctgtctattgctccccagccaaatcttcccgggctgctgtgggcaacaagatgtttgtcaagggtgcccctgagggcgtcatcgaccgctgtaactatgtgcgagttggcaccacccgggtgccactgacggggccggtgaaggaaaagatcatggcggtgatcaaggagtggggcactggccgggacaccctgcgctgcttggccctggccacccgggacacccccccgaagcgagaggaaatggtcctggatgactctgccaggttcctggagtatgagacggacctgacattcgtgggtgtagtgggcatgctggaccctccgcgcaaggaggtcacgggctccatccagctgtgccgtgacgccgggatccgggtgatcatgatcactggggacaacaagggcacagccattgccatctgccggcgaattggcatctttggggagaacgaggaggtggccgatcgcgcctacacgggccgagagttcgacgacctgcccctggctgaacagcgggaagcctgccgacgtgcctgctgcttcgcccgtgtggagccctcgcacaagtccaagattgtggagtacctgcagtcctacgatgagatcacagccatgacaggtgatggcgtcaatgacgcccctgccctgaagaaggctgagattggcattgccatgggatctggcactgccgtggccaagactgcctctgagatggtgctggctgacgacaacttctccaccatcgtagctgctgtggaggagggccgcgccatctacaacaacatgaagcagttcatccgctacctcatttcctccaacgtgggcgaggtggtctgtatcttcctgaccgctgccctggggctgcctgaggccctgatcccggtgcagctgctatgggtgaacttggtgaccgacgggctcccagccacagccctgggcttcaacccaccagacctggacatcatggaccgccccccccggagccccaaggagcccctcatcagtggctggctcttcttccgctacatggcaatcgggggctatgtgggtgcagccaccgtgggagcagctgcctggtggttcctgtacgctgaggatgggcctcatgtcaactacagccagctgactcacttcatgcagtgcaccgaggacaacacccactttgagggcatagactgtgaggtcttcgaggcccccgagcccatgaccatggccctgtccgtgctggtgaccatcgagatgtgcaatgcactgaacagcctgtccgagaaccagtccctgctgcggatgccaccctgggtgaacatctggctgctgggctccatctgcctctccatgtccctgcacttcctcatcctctatgttgaccccctgccgatgatcttcaagctccgggccctggacctcacccagtggctcatggtcctcaagatctcactgccagtcattgggctcgacgaaatcctcaagttcgttgctcggaactacctagaggatccagaagatgaaagaaggaagtgagcatccttttgctctgtcctccccaccccgatagtgacacatcttcaggcagagctgtggcacagacccccgtcctgtcccccacacccgtgtcatgtgtctgtttataaacatgtccccttccctttccttccccctcggccacccgcctccctctcaaccttgtaaattccccttcccaaccccgaggggcttgcagggacaaggcgaccgactgcgctgagctgcttatttattgaaaataaacgacggaaaagtctg

SEQ ID NO: 2712 - DNA, 2608 bp, Homo sapiens
  source 1..2608: mol_type = unassigned DNA
ggccggctgctcaagtgggacgggggtcagagctttgtggagggaagaaaaacctggagggggcaggagagtaaaaagaagaaacccaggcagacaggcagttggacacactgaggaagaccccccacgagtgggaaccccctggaaggaacacaccggccccggcccccaggaagggagcacaatggaggccgctcatgctaaaaccacggaggaatgtttggcctattttggggtgagtgagaccacgggcctcaccccggaccaagttaagcggaatctggagaaatacggcctcaatgagctccctgctgaggaagggaagaccctgtgggagctggtgatagagcagtttgaagacctcctggtgcggattctcctcctggccgcatgcatttccttcgtgctggcctggtttgaggaaggtgaagagaccatcactgcctttgttgaaccctttgtcatcctcttgatcctcattgccaatgccatcgtgggggtttggcaggagcggaacgcagagaacgccatcgaggccctgaaggagtatgagccagagatggggaaggtctaccgggctgaccgcaagtcagtgcaaaggatcaaggctcgggacatcgtccctggggacatcgtggaggtggctgtgggggacaaagtccctgcagacatccgaatcctcgccatcaaatccaccacgctgcgggttgaccagtccatcctgacaggcgagtctgtatctgtcatcaaacacacggagcccgttcctgacccccgagctgtcaaccaggacaagaagaacatgcttttctcgggcaccaacattgcagccggcaaggccttgggcatcgtggccaccactggtgtgggcaccgagattgggaagatccgagaccaaatggctgccacagaacaggacaagacccccttgcagcagaagctggatgagtttggggagcagctctccaaggtcatctccctcatctgtgtggctgtctggcttatcaacattggccacttcaacgaccccgtccatgggggctcctggttccgcggggccatctactactttaagattgccgtggccttggctgtggctgccatccccgaaggtcttcctgcagtcatcaccacctgcctggccctgggtacccgtcggatggcaaagaagaatgccattgtaagaagcttgccctccgtagagaccctgggctgcacctctgtcatctgttccgacaagacaggcaccctcaccaccaaccagatgtctgtctgcaagatgtttatcattgacaaggtggatggggacatctgcctcctgaatgagttctccatcaccggctccacttacgctccagagggagaggtcttgaagaatgataagccagtccggccagggcagtatgacgggctggtggagctggccaccatctgtgccctctgcaatgactcctccttggacttcaacgaggccaaaggtgtctatgagaaggtcggcgaggccaccgagacagcactcaccaccctggtggagaagatgaatgtgttcaacacggatgtgagaagcctctcgaaggtggagagagccaacgcctgcaactcggtgatccgccagctaatgaagaaggaattcaccctggagttctcccgagacagaaagtccatgtctgtctattgctccccagccaaatcttcccgggctgctgtgggcaacaagatgtttgtcaagggtgcccctgagggcgtcatcgaccgctgtaactatgtgcgagttggcaccacccgggtgccactgacggggccggtgaaggaaaagatcatggcggtgatcaaggagtggggcactggccgggacaccctgcgctgcttggccctggccacccgggacacccccccgaagcgagaggaaatggtcctggatgactctgccaggttcctggagtatgagacggacctgacattcgtgggtgtagtgggcatgctggaccctccgcgcaaggaggtcacgggctccatccagctgtgccgtgacgccgggatccgggtgatcatgatcactggggacaacaagggcacagccattgccatctgccggcgaattggcatctttggggagaacgaggaggtggccgatcgcgcctacacgggccgagagttcgacgacctgcccctggctgaacagcgggaagcctgccgacgtgcctgctgcttcgcccgtgtggagccctcgcacaagtccaagattgtggagtacctgcagtcctacgatgagatcacagccatgacaggtgatggcgtcaatgacgcccctgccctgaagaaggctgagattggcattgccatgggatctggcactgccgtggccaagactgcctctgagatggtgctggctgacgacaacttctccaccatcgtagctgctgtggaggagggccgcgccatctacaacaacatgaagcagttcatccgctacctcatttcctccaacgtgggcgaggtggtctgtatcttcctgaccgctgccctggggctgcctgaggccctgatcccggtgcagctgctatgggtgaacttggtgaccgactgcgctgagctgcttatttattga

SEQ ID NO: 2713 - DNA, 3493 bp, Homo sapiens
  source 1..3493: mol_type = unassigned DNA
ggccggctgctcaagtgggacgggggtcagagctttgtggagggaagaaaaacctggagggggcaggagagtaaaaagaagaaacccaggcagacaggcagttggacacactgaggaagaccccccacgagtgggaaccccctggaaggaacacaccggccccggcccccaggaagggagcacaatggaggccgctcatgctaaaaccacggaggaatgtttggcctattttggggtgagtgagaccacgggcctcaccccggaccaagttaagcggaatctggagaaatacggcctcaatgagctccctgctgaggaagggaagaccctgtgggagctggtgatagagcagtttgaagacctcctggtgcggattctcctcctggccgcatgcatttccttcgtgctggcctggtttgaggaaggtgaagagaccatcactgcctttgttgaaccctttgtcatcctcttgatcctcattgccaatgccatcgtgggggtttggcaggagcggaacgcagagaacgccatcgaggccctgaaggagtatgagccagagatggggaaggtctaccgggctgaccgcaagtcagtgcaaaggatcaaggctcgggacatcgtccctggggacatcgtggaggtggctgtgggggacaaagtccctgcagacatccgaatcctcgccatcaaatccaccacgctgcgggttgaccagtccatcctgacaggcgagtctgtatctgtcatcaaacacacggagcccgttcctgacccccgagctgtcaaccaggacaagaagaacatgcttttctcgggcaccaacattgcagccggcaaggccttgggcatcgtggccaccactggtgtgggcaccgagattgggaagatccgagaccaaatggctgccacagaacaggacaagacccccttgcagcagaagctggatgagtttggggagcagctctccaaggtcatctccctcatctgtgtggctgtctggcttatcaacattggccacttcaacgaccccgtccatgggggctcctggttccgcggggccatctactactttaagattgccgtggccttggctgtggctgccatccccgaaggtcttcctgcagtcatcaccacctgcctggccctgggtacccgtcggatggcaaagaagaatgccattgtaagaagcttgccctccgtagagaccctgggctgcacctctgtcatctgttccgacaagacaggcaccctcaccaccaaccagatgtctgtctgcaagatgtttatcattgacaaggtggatggggacatctgcctcctgaatgagttctccatcaccggctccacttacgctccagagggagaggtcttgaagaatgataagccagtccggccagggcagtatgacgggctggtggagctggccaccatctgtgccctctgcaatgactcctccttggacttcaacgaggccaaaggtgtctatgagaaggtcggcgaggccaccgagacagcactcaccaccctggtggagaagatgaatgtgttcaacacggatgtgagaagcctctcgaaggtggagagagccaacgcctgcaactcggtgatccgccagctaatgaagaaggaattcaccctggagttctcccgagacagaaagtccatgtctgtctattgctccccagccaaatcttcccgggctgctgtgggcaacaagatgtttgtcaagggtgcccctgagggcgtcatcgaccgctgtaactatgtgcgagttggcaccacccgggtgccactgacggggccggtgaaggaaaagatcatggcggtgatcaaggagtggggcactggccgggacaccctgcgctgcttggccctggccacccgggacacccccccgaagcgagaggaaatggtcctggatgactctgccaggttcctggagtatgagacggacctgacattcgtgggtgtagtgggcatgctggaccctccgcgcaaggaggtcacgggctccatccagctgtgccgtgacgccgggatccgggtgatcatgatcactggggacaacaagggcacagccattgccatctgccggcgaattggcatctttggggagaacgaggaggtggccgatcgcgcctacacgggccgagagttcgacgacctgcccctggctgaacagcgggaagcctgccgacgtgcctgctgcttcgcccgtgtggagccctcgcacaagtccaagattgtggagtacctgcagtcctacgatgagatcacagccatgacaggtgatggcgtcaatgacgcccctgccctgaagaaggctgagattggcattgccatgggatctggcactgccgtggccaagactgcctctgagatggtgctggctgacgacaacttctccaccatcgtagctgctgtggaggagggccgcgccatctacaacaacatgaagcagttcatccgctacctcatttcctccaacgtgggcgaggtggtctgtatcttcctgaccgctgccctggggctgcctgaggccctgatcccggtgcagctgctatgggtgaacttggtgaccgacgggctcccagccacagccctgggcttcaacccaccagacctggacatcatggaccgccccccccggagccccaaggagcccctcatcagtggctggctcttcttccgctacatggcaatcgggggctatgtgggtgcagccaccgtgggagcagctgcctggtggttcctgtacgctgaggatgggcctcatgtcaactacagccagctgactcacttcatgcagtgcaccgaggacaacacccactttgagggcatagactgtgaggtcttcgaggcccccgagcccatgaccatggccctgtccgtgctggtgaccatcgagatgtgcaatgcactgaacagcctgtccgagaaccagtccctgctgcggatgccaccctgggtgaacatctggctgctgggctccatctgcctctccatgtccctgcacttcctcatcctctatgttgaccccctgccgatgatcttcaagctccgggccctggacctcacccagtggctcatggtcctcaagatctcactgccagtcattgggctcgacgaaatcctcaagttcgttgctcggaactacctagagggataactgttccccctcctccatctctgagcccgtgtcacagatccagaagatgaaagaaggaagtgagcatccttttgctctgtcctccccaccccgatagtgacacatcttcaggcagagctgtggcacagacccccgtcctgtcccccacacccgtgtcatgtgtctgtttataaacatgtccccttccctttccttccccctcggccacccgcctccctctcaaccttgtaaattccccttcccaaccccgaggggcttgcagggacaaggcgaccgactgcgctgagctgcttatttattgaaaataaacgacggaaaagtctg

SEQ ID NO: 2714 - DNA, 3130 bp, Homo sapiens
  source 1..3130: mol_type = unassigned DNA
agcgcggcggtgtgatgatgactccaaggagcccggcgcccggtgctggcctggtttgaggaaggtgaagagaccatcactgcctttgttgaaccctttgtcatcctcttgatcctcattgccaatgccatcgtgggggtttggcaggagcggaacgcagagaacgccatcgaggccctgaaggagtatgagccagagatggggaaggtctaccgggctgaccgcaagtcagtgcaaaggatcaaggctcgggacatcgtccctggggacatcgtggaggtggctgtgggggacaaagtccctgcagacatccgaatcctcgccatcaaatccaccacgctgcgggttgaccagtccatcctgacaggcgagtctgtatctgtcatcaaacacacggagcccgttcctgacccccgagctgtcaaccaggacaagaagaacatgcttttctcgggcaccaacattgcagccggcaaggccttgggcatcgtggccaccactggtgtgggcaccgagattgggaagatccgagaccaaatggctgccacagaacaggacaagacccccttgcagcagaagctggatgagtttggggagcagctctccaaggtcatctccctcatctgtgtggctgtctggcttatcaacattggccacttcaacgaccccgtccatgggggctcctggttccgcggggccatctactactttaagattgccgtggccttggctgtggctgccatccccgaaggtcttcctgcagtcatcaccacctgcctggccctgggtacccgtcggatggcaaagaagaatgccattgtaagaagcttgccctccgtagagaccctgggctgcacctctgtcatctgttccgacaagacaggcaccctcaccaccaaccagatgtctgtctgcaagatgtttatcattgacaaggtggatggggacatctgcctcctgaatgagttctccatcaccggctccacttacgctccagagggagaggtcttgaagaatgataagccagtccggccagggcagtatgacgggctggtggagctggccaccatctgtgccctctgcaatgactcctccttggacttcaacgaggccaaaggtgtctatgagaaggtcggcgaggccaccgagacagcactcaccaccctggtggagaagatgaatgtgttcaacacggatgtgagaagcctctcgaaggtggagagagccaacgcctgcaactcggtgatccgccagctaatgaagaaggaattcaccctggagttctcccgagacagaaagtccatgtctgtctattgctccccagccaaatcttcccgggctgctgtgggcaacaagatgtttgtcaagggtgcccctgagggcgtcatcgaccgctgtaactatgtgcgagttggcaccacccgggtgccactgacggggccggtgaaggaaaagatcatggcggtgatcaaggagtggggcactggccgggacaccctgcgctgcttggccctggccacccgggacacccccccgaagcgagaggaaatggtcctggatgactctgccaggttcctggagtatgagacggacctgacattcgtgggtgtagtgggcatgctggaccctccgcgcaaggaggtcacgggctccatccagctgtgccgtgacgccgggatccgggtgatcatgatcactggggacaacaagggcacagccattgccatctgccggcgaattggcatctttggggagaacgaggaggtggccgatcgcgcctacacgggccgagagttcgacgacctgcccctggctgaacagcgggaagcctgccgacgtgcctgctgcttcgcccgtgtggagccctcgcacaagtccaagattgtggagtacctgcagtcctacgatgagatcacagccatgacaggtgatggcgtcaatgacgcccctgccctgaagaaggctgagattggcattgccatgggatctggcactgccgtggccaagactgcctctgagatggtgctggctgacgacaacttctccaccatcgtagctgctgtggaggagggccgcgccatctacaacaacatgaagcagttcatccgctacctcatttcctccaacgtgggcgaggtggtctgtatcttcctgaccgctgccctggggctgcctgaggccctgatcccggtgcagctgctatgggtgaacttggtgaccgacgggctcccagccacagccctgggcttcaacccaccagacctggacatcatggaccgccccccccggagccccaaggagcccctcatcagtggctggctcttcttccgctacatggcaatcgggggctatgtgggtgcagccaccgtgggagcagctgcctggtggttcctgtacgctgaggatgggcctcatgtcaactacagccagctgactcacttcatgcagtgcaccgaggacaacacccactttgagggcatagactgtgaggtcttcgaggcccccgagcccatgaccatggccctgtccgtgctggtgaccatcgagatgtgcaatgcactgaacagcctgtccgagaaccagtccctgctgcggatgccaccctgggtgaacatctggctgctgggctccatctgcctctccatgtccctgcacttcctcatcctctatgttgaccccctgccgatgatcttcaagctccgggccctggacctcacccagtggctcatggtcctcaagatctcactgccagtcattgggctcgacgaaatcctcaagttcgttgctcggaactacctagagggataactgttccccctcctccatctctgagcccgtgtcacagatccagaagatgaaagaaggaagtgagcatccttttgctctgtcctccccaccccgatagtgacacatcttcaggcagagctgtggcacagacccccgtcctgtcccccacacccgtgtcatgtgtctgtttataaacatgtccccttccctttccttccccctcggccacccgcctccctctcaaccttgtaaattccccttcccaaccccgaggggcttgcagggacaaggcgaccgactgcgctgagctgcttatttattgaaaataaacgacggaaaagtc

SEQ ID NO: 2715 - DNA, 4453 bp, Homo sapiens
  source 1..4453: mol_type = unassigned DNA
gcgcgggaggagggagccgggaggagggggcggggccgcgccgcccgcgccgcgctgggcgctctcggccaatgagcggcgtccacatgccgcggcggcggcgaaaggggaggcagcggccgataaatgctattagagcagccgccgcggagccgtccccgacgccacctccttttccttcgccgcagtttcctccgccgctgtcgggcgtgcggcgctgagggacccgggcgagcgcgccgcgcaccgccccgccggctcgcctccctcgccgcgttccgccctcagtggtctgccgggcgccccctcctccggcccgggcggggcctctgatcgcctcaagagagcggggagggggctcgggggccgcggcctgccctcccggcgggcggctgagggcgagggaggccctcccttctggcgaggggagggagggtgggtcaggagcccccaacccgccctgcggagctcggggccgcgcgaggggcggttgtctgggggagggggcgcggggtgattcagcgcccggcgaggcggaagcggccgcaagaggaggaggggagagcccgtccgcgcctgggctcccggggtggcacgagcccgcggccggagtgcgaggcggaggcgaggaggccgcggggacgggaggcgaggccggccgggcccccgaagccatggagaacgcgcacaccaagacggtggaggaggtgctgggccacttcggcgtcaacgagagtacggggctgagcctggaacaggtcaagaagcttaaggagagatggggctccaacgagttaccggctgaagaaggaaaaaccttgctggaacttgtgattgagcagtttgaagacttgctagttaggattttattactggcagcatgtatatcttttgttttggcttggtttgaagaaggtgaagaaacaattacagcctttgtagaaccttttgtaattttactcatattagtagccaatgcaattgtgggtgtatggcaggaaagaaatgctgaaaatgccatcgaagcccttaaggaatatgagcctgaaatgggcaaagtgtatcgacaggacagaaagagtgtgcagcggattaaagctaaagacatagttcctggtgatattgtagaaattgctgttggtgacaaagttcctgctgatataaggttaacttccatcaaatctaccacactaagagttgaccagtcaattctcacaggtgaatctgtctctgtcatcaagcacactgatcccgtccctgacccacgagctgtcaaccaagataaaaagaacatgctgttttctggtacaaacattgctgctgggaaagctatgggagtggtggtagcaactggagttaacaccgaaattggcaagatccgggatgaaatggtggcaacagaacaggagagaacaccccttcagcaaaaactagatgaatttggggaacagctttccaaagtcatctcccttatttgcattgcagtctggatcataaatattgggcacttcaatgacccggttcatggagggtcctggatcagaggtgctatttactactttaaaattgcagtggccctggctgtagcagccattcctgaaggtctgcctgcagtcatcaccacctgcctggctcttggaactcgcagaatggcaaagaaaaatgccattgttcgaagcctcccgtctgtggaaacccttggttgtacttctgttatctgctcagacaagactggtacacttacaacaaaccagatgtcagtctgcaggatgttcattctggacagagtggaaggtgatacttgttcccttaatgagtttaccataactggatcaacttatgcacctattggagaagtgcataaagatgataaaccagtgaattgtcaccagtatgatggtctggtagaattagcaacaatttgtgctctttgtaatgactctgctttggattacaatgaggcaaagggtgtgtatgaaaaagttggagaagctacagagactgctctcacttgcctagtagagaagatgaatgtatttgataccgaattgaagggtctttctaaaatagaacgtgcaaatgcctgcaactcagtcattaaacagctgatgaaaaaggaattcactctagagttttcacgtgacagaaagtcaatgtcggtttactgtacaccaaataaaccaagcaggacatcaatgagcaagatgtttgtgaagggtgctcctgaaggtgtcattgacaggtgcacccacattcgagttggaagtactaaggttcctatgacctctggagtcaaacagaagatcatgtctgtcattcgagagtggggtagtggcagcgacacactgcgatgcctggccctggccactcatgacaacccactgagaagagaagaaatgcaccttgaggactctgccaactttattaaatatgagaccaatctgaccttcgttggctgcgtgggcatgctggatcctccgagaatcgaggtggcctcctccgtgaagctgtgccggcaagcaggcatccgggtcatcatgatcactggggacaacaagggcactgctgtggccatctgtcgccgcatcggcatcttcgggcaggatgaggacgtgacgtcaaaagctttcacaggccgggagtttgatgaactcaacccctccgcccagcgagacgcctgcctgaacgcccgctgttttgctcgagttgaaccctcccacaagtctaaaatcgtagaatttcttcagtcttttgatgagattacagctatgactggcgatggcgtgaacgatgctcctgctctgaagaaagccgagattggcattgctatgggctctggcactgcggtggctaaaaccgcctctgagatggtcctggcggatgacaacttctccaccattgtggctgccgttgaggaggggcgggcaatctacaacaacatgaaacagttcatccgctacctcatctcgtccaacgtcggggaagttgtctgtattttcctgacagcagcccttggatttcccgaggctttgattcctgttcagctgctctgggtcaatctggtgacagatggcctgcctgccactgcactggggttcaaccctcctgatctggacatcatgaataaacctccccggaacccaaaggaaccattgatcagcgggtggctctttttccgttacttggctattggctgttacgtcggcgctgctaccgtgggtgctgctgcatggtggttcattgctgctgacggtggtccaagagtgtccttctaccagctgagtcatttcctacagtgtaaagaggacaacccggactttgaaggcgtggattgtgcaatctttgaatccccatacccgatgacaatggcgctctctgttctagtaactatagaaatgtgtaacgccctcaacagcttgtccgaaaaccagtccttgctgaggatgcccccctgggagaacatctggctcgtgggctccatctgcctgtccatgtcactccacttcctgatcctctatgtcgaacccttgccactcatcttccagatcacaccgctgaacgtgacccagtggctgatggtgctgaaaatctccttgcccgtgattctcatggatgagacgctcaagtttgtggcccgcaactacctggaacctgcaatactggagtaaccgcttcctaaaccattttgcagaaatgtaagggtgttcggttgcgtgcatgtgcgtttttagcaacacatctaccaaccctgtgcatgactgatgttggggaaaaagaaaagtaaaaaacttcccaactcactttgtgttatgtggaggaaatgtgtattaccaatggggttgttagcttttaaatcaaaatactgattacagatgtacaatttagcttaatcagaaagcctctccagagaagtttggtttctttgctgcaagaggaatgaggctctgtaaccttatctaagaacttggaagccgtcagccaagtcgccacatttctctgcaaaatgtcatagcttatataaatgtacagtattcaattgtaatgcatgccttcggttgtaagtagccagatccctctccagtgacattggaacatgctactttttaattggccctgtacagtttgcttatttataaattcattaaaaacactacaggtgttgaatggttaaaatgtaggcctccagttcattttcagttattttctgagtgtgcagacagctatttcgcactgtattaaatgtaacttatttaatgaaatcagaagcagtagacagatgttggtgcaatacaaatattgtgatgcatttatcttaataaaatgctaaatgtcaatttatcactgcgcatgtttgactttagactgtaaatagagatcagtttgtttctttctgtgctggtaacaatgagcgtcgcacagacatggtttcaggtaaataaatctattctatgat

SEQ ID NO: 2716 - DNA, 8229 bp, Homo sapiens
  source 1..8229: mol_type = unassigned DNA
ggcagcggccgataaatgctattagagcagccgccgcggagccgtccccgacgccacctccttttccttcgccgcagtttcctccgccgctgtcgggcgtgcggcgctgagggacccgggcgagcgcgccgcgcaccgccccgccggctcgcctccctcgccgcgttccgccctcagtggtctgccgggcgccccctcctccggcccgggcggggcctctgatcgcctcaagagagcggggagggggctcgggggccgcggcctgccctcccggcgggcggctgagggcgagggaggccctcccttctggcgaggggagggagggtgggtcaggagcccccaacccgccctgcggagctcggggccgcgcgaggggcggttgtctgggggagggggcgcggggtgattcagcgcccggcgaggcggaagcggccgcaagaggaggaggggagagcccgtccgcgcctgggctcccggggtggcacgagcccgcggccggagtgcgaggcggaggcgaggaggccgcggggacgggaggcgaggccggccgggcccccgaagccatggagaacgcgcacaccaagacggtggaggaggtgctgggccacttcggcgtcaacgagagtacggggctgagcctggaacaggtcaagaagcttaaggagagatggggctccaacgagttaccggctgaagaaggaaaaaccttgctggaacttgtgattgagcagtttgaagacttgctagttaggattttattactggcagcatgtatatcttttgttttggcttggtttgaagaaggtgaagaaacaattacagcctttgtagaaccttttgtaattttactcatattagtagccaatgcaattgtgggtgtatggcaggaaagaaatgctgaaaatgccatcgaagcccttaaggaatatgagcctgaaatgggcaaagtgtatcgacaggacagaaagagtgtgcagcggattaaagctaaagacatagttcctggtgatattgtagaaattgctggtgaatctgtctctgtcatcaagcacactgatcccgtccctgacccacgagctgtcaaccaagataaaaagaacatgctgttttctggtacaaacattgctgctgggaaagctatgggagtggtggtagcaactggagttaacaccgaaattggcaagatccgggatgaaatggtggcaacagaacaggagagaacaccccttcagcaaaaactagatgaatttggggaacagctttccaaagtcatctcccttatttgcattgcagtctggatcataaatattgggcacttcaatgacccggttcatggagggtcctggatcagaggtgctatttactactttaaaattgcagtggccctggctgtagcagccattcctgaaggtctgcctgcagtcatcaccacctgcctggctcttggaactcgcagaatggcaaagaaaaatgccattgttcgaagcctcccgtctgtggaaacccttggttgtacttctgttatctgctcagacaagactggtacacttacaacaaaccagatgtcagtctgcaggatgttcattctggacagagtggaaggtgatacttgttcccttaatgagtttaccataactggatcaacttatgcacctattggagaagtgcataaagatgataaaccagtgaattgtcaccagtatgatggtctggtagaattagcaacaatttgtgctctttgtaatgactctgctttggattacaatgaggcaaagggtgtgtatgaaaaagttggagaagctacagagactgctctcacttgcctagtagagaagatgaatgtatttgataccgaattgaagggtctttctaaaatagaacgtgcaaatgcctgcaactcagtcattaaacagctgatgaaaaaggaattcactctagagttttcacgtgacagaaagtcaatgtcggtttactgtacaccaaataaaccaagcaggacatcaatgagcaagatgtttgtgaagggtgctcctgaaggtgtcattgacaggtgcacccacattcgagttggaagtactaaggttcctatgacctctggagtcaaacagaagatcatgtctgtcattcgagagtggggtagtggcagcgacacactgcgatgcctggccctggccactcatgacaacccactgagaagagaagaaatgcaccttgaggactctgccaactttattaaatatgagaccaatctgaccttcgttggctgcgtgggcatgctggatcctccgagaatcgaggtggcctcctccgtgaagctgtgccggcaagcaggcatccgggtcatcatgatcactggggacaacaagggcactgctgtggccatctgtcgccgcatcggcatcttcgggcaggatgaggacgtgacgtcaaaagctttcacaggccgggagtttgatgaactcaacccctccgcccagcgagacgcctgcctgaacgcccgctgttttgctcgagttgaaccctcccacaagtctaaaatcgtagaatttcttcagtcttttgatgagattacagctatgactggcgatggcgtgaacgatgctcctgctctgaagaaagccgagattggcattgctatgggctctggcactgcggtggctaaaaccgcctctgagatggtcctggcggatgacaacttctccaccattgtggctgccgttgaggaggggcgggcaatctacaacaacatgaaacagttcatccgctacctcatctcgtccaacgtcggggaagttgtctgtattttcctgacagcagcccttggatttcccgaggctttgattcctgttcagctgctctgggtcaatctggtgacagatggcctgcctgccactgcactggggttcaaccctcctgatctggacatcatgaataaacctccccggaacccaaaggaaccattgatcagcgggtggctctttttccgttacttggctattggctgttacgtcggcgctgctaccgtgggtgctgctgcatggtggttcattgctgctgacggtggtccaagagtgtccttctaccagctgagtcatttcctacagtgtaaagaggacaacccggactttgaaggcgtggattgtgcaatctttgaatccccatacccgatgacaatggcgctctctgttctagtaactatagaaatgtgtaacgccctcaacagcttgtccgaaaaccagtccttgctgaggatgcccccctgggagaacatctggctcgtgggctccatctgcctgtccatgtcactccacttcctgatcctctatgtcgaacccttgccactcatcttccagatcacaccgctgaacgtgacccagtggctgatggtgctgaaaatctccttgcccgtgattctcatggatgagacgctcaagtttgtggcccgcaactacctggaacctggtaaagagtgtgtgcagcctgccaccaaatcctgctcgttctcggcatgcaccgatgggatttcctggccgtttgtgctgctcataatgcccctggtgatctgggtctatagcacagacactaactttagcgatatgttctggtcttgactgacagttttccataaagaagatgtttaacttaatcaattaatttttttattgtttaaagcaactgtctatttctgctgaattttcacatgaacatactggctggtgatggaggtttcatactctagattttgttttgctttttctgactccagtggggcaagattttccttttttatacacataattaaagtgtccattgacatgtacagagaactaacactattttatgcaaatatttttttgtagatgaaaaagcatgtacagtgttctgtttaatactcatccttgtataaaaaaaatagttgagccagcagacattgtcagcaaattaattggcagcagattttaggaaatgaatgtgtgtggttttttttctaaaactaaatagcatgtattgtgtcttttgcatgatgatccggatttaatttgatatcacagtctaatttttattcataagccaatttttctgcactgagcagagtcttgctacctcagtcagtattgttttggtttgctacttccctcacccactttggcctccgttcaccccaccccaccccacctctccccaccttacccccgccccgcttggcttcttctttaggattgtgatggttcgttctgtttacatcagttttaacgagaggtatgcctgtactcgcttgtgcagaaaacattgttccagattcaatcgactgggtttatgtcccttcacatagtttttaaggttatttatttaaatgtctaatgtattttattgtaacagacattgttttgccaacattgcctatttcagtggcacgtcatctagttttaaaaaaataaaacattttaaatggacagagaaaaataactgtcttgtctttaactcgtaagtggcttacctgggactaacagacatgtccaactttctctccagttcttagctcagaactttagttgtactctgcttgaggggaagaaggctcctgctctgctgtgtaggtagtcataggaattgtattcttaatgtacaggcactaattgtcatctgtgatgtacattttatgcaagtttctgctggcctggtatagagaacataagggcaagtgtgtatgtgtgtgtatgtgtgtgttttgtaaaatctgtaaatagcacatgaccaaatgaacatattgtatagaactatttttatttgaatgtggcactaaccaccaccaccgttactacgatcaatgtttgcgcatgttcgagatgagtctcaccaacagtgtgtaagtcattaacagtcctaactgtggtgttttcctccaatgccttccaacatccatcaactaacgtgagtattttcttcctgggatttggatgctttagcctaaaggtgactgccaccaagtgagataactgtatgtcactaacttataagccgcctccatggcagatgctgctgtgctccctgatgccctgtgagcaccggggttgcctgtggcgcctgccatgtgactcgggcgcagcatcagctggctggaggtgtggctttcatagacctccacaggctgcctaggacaagatgaccaggagggcccaagccagacaaaagccggagtggggagagaggcatttcagccagaccaacaggctgaaggagctgtgcagactattgctaaaatgagggttcgcagctgccaggagtcatcccagaacattgctacttatttattaaaaagctaaaaactagtgaaagcaagtaactgaaccagtgaactctgggtatcgataggttcgtcttaaataggccacttccccactcccccacccccccttgcttggtcttgtccttggtggctaagacttagctctgcaggggatgttaaagcacagttagtaggacgtggctctgcacagcccaaaaaccagcttactccttagccagggtgtgaggcctcgactatattcttcaaaatgtacttaggctctggttactgggatggccagtagatgtaatgcagatggttggagtttggggagggttaggaggcatcaagcaggacaaggtgctgctgagttcagagggcccacgttcaagggatggaggtggaacctggagaccgactcttaaaagcacagtccgtggttgggtgtggtggctcatgcctgtaagtaagtctcagccctttggaggccacagcagaaggattgcttgagcccaggtactcaaaccagcctgggcaacagagtgaggccctgtcaaaaaaaaatcagccttactgtgaagcctccaaggctgctcgcaggcagctgtggctctcgggaagggaggctgctttgcccagcagggaacatttggggcagggggtaaattttgccagtttgagcatcatgaggtgtaacaagaaatgggttgaatgggccaaatgcaaggagtgcatctctgggctgcaaactgacttgagtgctgcactattgctattccgtgcaaacaaaactcagcttttcctgactcagttccttgacttagtggcctttacaaaaaaagttgagtagtgtgtggcctgctgtcgcacagcccctagttagcttcatggtttctcagcttcagacccctccagcccacagaggagcccatggagggacccacttcccttggtccagacagctgggagtgggttaggcccactgctgttttgagcagggccacttgctccatttcactgaaggctttgctgggtgaaaacacttcagcatctcctcctcaggtcaacccataaagaccaggtccagcaccgtggtcttggcacatccctggcctcaggccctcacctaacagtgaggcagcagctgcccagccccgcaatgtgcctgctgtcaggcagctcttgcctgaaacttacttccacattctttcctgatgggcaggtggctgaaggcccagccatcagtgtcgcttgttgccaccccgtgcctcccttggcctctctgagctttgcccagaagaccaacaatcatacataccctaactgggacaccactctgcagaatgcagatgatccattctggaggaagctgtcccttgagctcagtgagctcccaggcaagcagggcatctggccgacttccctcacaacagctgctcccacatcccctcggactggagcttcagccctgactgaggtgggcagacctaagacctgagaccacaagattagctcagtgtctaccaagcatctagccactgtccagggccagagcataccacgtctgcagtgcctgtgagcagagccagcagttgccctgtgactgtaaccaccaaattgtccaaacacccgctgcagttagcaagaagggtaggcttcaccctcctttactgaggagaatgatgcggaggagtttcctctccagggctaggcaaggcaggcgagcagccagaagccgggtgcccacagggcagggacaggaaggctgtgctgctactggctgctcacttctccatcaacctcaccctctgcaccactaaccaagaccttgtcctcttgcctgtctcgctgctttcacagctgcaacgattgtgtctgcctcatggggttttcctccagagcctttattctgtagccagacgacacgaggagtctgtgtcactgagccagtgcttctagatgctaccctgtgtgggcggcacctcagggacagtaaatcagaaatgctggtcttgaaaccttgaaaagatcaagctgaatgttccttttcatctgtcgctgttgatcttcatctatttaaataggtattctaacgtttcctctctgtatttcatgaagctgatttcctctctctttccttttcagcaatactggagtaaccgcttcctaaaccattttgcagaaatgtaagggtgttcggttgcgtgcatgtgcgtttttagcaacacatctaccaaccctgtgcatgactgatgttggggaaaaagaaaagtaaaaaacttcccaactcactttgtgttatgtggaggaaatgtgtattaccaatggggttgttagcttttaaatcaaaatactgattacagatgtacaatttagcttaatcagaaagcctctccagagaagtttggtttctttgctgcaagaggaatgaggctctgtaaccttatctaagaacttggaagccgtcagccaagtcgccacatttctctgcaaaatgtcatagcttatataaatgtacagtattcaattgtaatgcatgccttcggttgtaagtagccagatccctctccagtgacattggaacatgctactttttaattggccctgtacagtttgcttatttataaattcattaaaaacactacaggtgttgaatggttaaaatgtaggcctccagttcattttcagttattttctgagtgtgcagacagctatttcgcactgtattaaatgtaacttatttaatgaaatcagaagcagtagacagatgttggtgcaatacaaatattgtgatgcatttatcttaataaaatgctaaatgtcaatttatcactgcgcatgtttgactttagactgtaaatagagatcagtttgtttctttctgtgctggtaacaatgagcgtcgcacagacatggtttcaggtaaataaatctattctatg

SEQ ID NO: 2717 - DNA, 4094 bp, Homo sapiens
  source 1..4094: mol_type = unassigned DNA
cccgtccgcgcctgggctcccggggtggcacgagcccgcggccggagtgcgaggcggaggcgaggaggccgcggggacgggaggcgaggccggccgggcccccgaagccatggagaacgcgcacaccaagacggtggaggaggtgctgggccacttcggcgtcaacgagagtacggggctgagcctggaacaggtcaagaagcttaaggagagatggggctccaacgagttaccggctgaagaaggaaaaaccttgctggaacttgtgattgagcagtttgaagacttgctagttaggattttattactggcagcatgtatatcttttgttttggcttggtttgaagaaggtgaagaaacaattacagcctttgtagaaccttttgtaattttactcatattagtagccaatgcaattgtgggtgtatggcaggaaagaaatgctgaaaatgccatcgaagcccttaaggaatatgagcctgaaatgggcaaagtgtatcgacaggacagaaagagtgtgcagcggattaaagctaaagacatagttcctggtgatattgtagaaattgctgttggtgacaaagttcctgctgatataaggttaacttccatcaaatctaccacactaagagttgaccagtcaattctcacaggtgaatctgtctctgtcatcaagcacactgatcccgtccctgacccacgagctgtcaaccaagataaaaagaacatgctgttttctggtacaaacattgctgctgggaaagctatgggagtggtggtagcaactggagttaacaccgaaattggcaagatccgggatgaaatggtggcaacagaacaggagagaacaccccttcagcaaaaactagatgaatttggggaacagctttccaaagtcatctcccttatttgcattgcagtctggatcataaatattgggcacttcaatgacccggttcatggagggtcctggatcagaggtgctatttactactttaaaattgcagtggccctggctgtagcagccattcctgaaggtctgcctgcagtcatcaccacctgcctggctcttggaactcgcagaatggcaaagaaaaatgccattgttcgaagcctcccgtctgtggaaacccttggttgtacttctgttatctgctcagacaagactggtacacttacaacaaaccagatgtcagtctgcaggatgttcattctggacagagtggaaggtgatacttgttcccttaatgagtttaccataactggatcaacttatgcacctattggagaagtgcataaagatgataaaccagtgaattgtcaccagtatgatggtctggtagaattagcaacaatttgtgctctttgtaatgactctgctttggattacaatgaggcaaagggtgtgtatgaaaaagttggagaagctacagagactgctctcacttgcctagtagagaagatgaatgtatttgataccgaattgaagggtctttctaaaatagaacgtgcaaatgcctgcaactcagtcattaaacagctgatgaaaaaggaattcactctagagttttcacgtgacagaaagtcaatgtcggtttactgtacaccaaataaaccaagcaggacatcaatgagcaagatgtttgtgaagggtgctcctgaaggtgtcattgacaggtgcacccacattcgagttggaagtactaaggttcctatgacctctggagtcaaacagaagatcatgtctgtcattcgagagtggggtagtggcagcgacacactgcgatgcctggccctggccactcatgacaacccactgagaagagaagaaatgcaccttgaggactctgccaactttattaaatatgagaccaatctgaccttcgttggctgcgtgggcatgctggatcctccgagaatcgaggtggcctcctccgtgaagctgtgccggcaagcaggcatccgggtcatcatgatcactggggacaacaagggcactgctgtggccatctgtcgccgcatcggcatcttcgggcaggatgaggacgtgacgtcaaaagctttcacaggccgggagtttgatgaactcaacccctccgcccagcgagacgcctgcctgaacgcccgctgttttgctcgagttgaaccctcccacaagtctaaaatcgtagaatttcttcagtcttttgatgagattacagctatgactggcgatggcgtgaacgatgctcctgctctgaagaaagccgagattggcattgctatgggctctggcactgcggtggctaaaaccgcctctgagatggtcctggcggatgacaacttctccaccattgtggctgccgttgaggaggggcgggcaatctacaacaacatgaaacagttcatccgctacctcatctcgtccaacgtcggggaagttgtctgtattttcctgacagcagcccttggatttcccgaggctttgattcctgttcagctgctctgggtcaatctggtgacagatggcctgcctgccactgcactggggttcaaccctcctgatctggacatcatgaataaacctccccggaacccaaaggaaccattgatcagcgggtggctctttttccgttacttggctattggctgttacgtcggcgctgctaccgtgggtgctgctgcatggtggttcattgctgctgacggtggtccaagagtgtccttctaccagctgagtcatttcctacagtgtaaagaggacaacccggactttgaaggcgtggattgtgcaatctttgaatccccatacccgatgacaatggcgctctctgttctagtaactatagaaatgtgtaacgccctcaacagcttgtccgaaaaccagtccttgctgaggatgcccccctgggagaacatctggctcgtgggctccatctgcctgtccatgtcactccacttcctgatcctctatgtcgaacccttgccactcatcttccagatcacaccgctgaacgtgacccagtggctgatggtgctgaaaatctccttgcccgtgattctcatggatgagacgctcaagtttgtggcccgcaactacctggaacctggtaaagagtgtgtgcagcctgccaccaaatcctgctcgttctcggcatgcaccgatgggatttcctggccgtttgtgctgctcataatgcccctggtgatctgggtctatagcacagacactaactttagcgatatgttctggtcttgactgacagttttccataaagaagatgtttaacttaatcaattaatttttttattgtttaaagcaactgtctatttctgctgaattttcacatgaacatactggctggtgatggaggtttcatactctagattttgttttgctttttctgactccagtggggcaagattttccttttttatacacataattaaagtgtccattgacatgtacagagaactaacactattttatgcaaatatttttttgtagatgaaaaagcatgtacagtgttctgtttaatactcatccttgtataaaaaaaatagttgagccagcagacattgtcagcaaattaattggcagcagattttaggaaatgaatgtgtgtggttttttttctaaaactaaatagcatgtattgtgtcttttgcatgatgatccggatttaatttgatatcacagtctaatttttattcataagccaatttttctgcactgagcagagtcttgctacctcagtcagtattgttttggtttgctacttccctcacccactttggcctccgttcaccccaccccaccccacctctccccaccttacccccgccccgcttggcttcttctttaggattgtgatggttcgttctgtttacatcagttttaacgagaggtatgcctgtactcgcttgtgcagaaaacattgttccagattcaatcgactgggtttatgtcccttcacatagtttttaaggttatttatttaaatgtctaatgtattttattgtaacagacattgttttgccaacattgcctatttcagtggcacgtcatctagttttaaaaaaataaaacattttaaatggacagagaaaaataa

SEQ ID NO: 2718 - DNA, 2951 bp, Homo sapiens
  source 1..2951: mol_type = unassigned DNA
aacaattacagcctttgtagaaccttttgtaattttactcatattagtagccaatgcaattgtgggtgtatggcaggaaagaaatgctgaaaatgccatcgaagcccttaaggaatatgagcctgaaatgggcaaagtgtatcgacaggacagaaagagtgtgcagcggattaaagctaaagacatagttcctggtgatattgtagaaattgctggtgaatctgtctctgtcatcaagcacactgatcccgtccctgacccacgagctgtcaaccaagataaaaagaacatgctgttttctggtacaaacattgctgctgggaaagctatgggagtggtggtagcaactggagttaacaccgaaattggcaagatccgggatgaaatggtggcaacagaacaggagagaacaccccttcagcaaaaactagatgaatttggggaacagctttccaaagtcatctcccttatttgcattgcagtctggatcataaatattgggcacttcaatgacccggttcatggagggtcctggatcagaggtgctatttactactttaaaattgcagtggccctggctgtagcagccattcctgaaggtctgcctgcagtcatcaccacctgcctggctcttggaactcgcagaatggcaaagaaaaatgccattgttcgaagcctcccgtctgtggaaacccttggttgtacttctgttatctgctcagacaagactggtacacttacaacaaaccagatgtcagtctgcaggatgttcattctggacagagtggaaggtgatacttgttcccttaatgagtttaccataactggatcaacttatgcacctattggagaagtgcataaagatgataaaccagtgaattgtcaccagtatgatggtctggtagaattagcaacaatttgtgctctttgtaatgactctgctttggattacaatgaggcaaagggtgtgtatgaaaaagttggagaagctacagagactgctctcacttgcctagtagagaagatgaatgtatttgataccgaattgaagggtctttctaaaatagaacgtgcaaatgcctgcaactcagtcattaaacagctgatgaaaaaggaattcactctagagttttcacgtgacagaaagtcaatgtcggtttactgtacaccaaataaaccaagcaggacatcaatgagcaagatgtttgtgaagggtgctcctgaaggtgtcattgacaggtgcacccacattcgagttggaagtactaaggttcctatgacctctggagtcaaacagaagatcatgtctgtcattcgagagtggggtagtggcagcgacacactgcgatgcctggccctggccactcatgacaacccactgagaagagaagaaatgcaccttgaggactctgccaactttattaaatatgagaccaatctgaccttcgttggctgcgtgggcatgctggatcctccgagaatcgaggtggcctcctccgtgaagctgtgccggcaagcaggcatccgggtcatcatgatcactggggacaacaagggcactgctgtggccatctgtcgccgcatcggcatcttcgggcaggatgaggacgtgacgtcaaaagctttcacaggccgggagtttgatgaactcaacccctccgcccagcgagacgcctgcctgaacgcccgctgttttgctcgagttgaaccctcccacaagtctaaaatcgtagaatttcttcagtcttttgatgagattacagctatgactggcgatggcgtgaacgatgctcctgctctgaagaaagccgagattggcattgctatgggctctggcactgcggtggctaaaaccgcctctgagatggtcctggcggatgacaacttctccaccattgtggctgccgttgaggaggggcgggcaatctacaacaacatgaaacagttcatccgctacctcatctcgtccaacgtcggggaagttgtctgtattttcctgacagcagcccttggatttcccgaggctttgattcctgttcagctgctctgggtcaatctggtgacagatggcctgcctgccactgcactggggttcaaccctcctgatctggacatcatgaataaacctccccggaacccaaaggaaccattgatcagcgggtggctctttttccgttacttggctattggctgttacgtcggcgctgctaccgtgggtgctgctgcatggtggttcattgctgctgacggtggtccaagagtgtccttctaccagctgagtcatttcctacagtgtaaagaggacaacccggactttgaaggcgtggattgtgcaatctttgaatccccatacccgatgacaatggcgctctctgttctagtaactatagaaatgtgtaacgccctcaacagcttgtccgaaaaccagtccttgctgaggatgcccccctgggagaacatctggctcgtgggctccatctgcctgtccatgtcactccacttcctgatcctctatgtcgaacccttgccactcatcttccagatcacaccgctgaacgtgacccagtggctgatggtgctgaaaatctccttgcccgtgattctcatggatgagacgctcaagtttgtggcccgcaactacctggaacctggtaaagagtgtgtgcagcctgccaccaaatcctgctcgttctcggcatgcaccgatgggatttcctggccgtttgtgctgctcataatgcccctggtgatctgggtctatagcacagacactaactttagcgatatgttctggtcttgactgacagttttccataaagaagatgtttaacttaatcaattaatttttttattgtttaaagcaactgtctatttctgctgaattttcacatgaacatactggctggtgatggaggtttcatactctagattttgttttgctttttctgact

SEQ ID NO: 2719 - DNA, 6777 bp, Homo sapiens
  source 1..6777: mol_type = unassigned DNA
ggccaaaggtcaagatacttctctgggaaatgttgctgctgatgctgctttacaaagtcatacaatgagtgtttggtttaagaaagattttcatacttaaaagattttcatcttggaaatacatcaagtgaaaattaaattcttttgggaaacattttccttctgatatattatacttgtaatgggcgacatggcaaacaactcagttgcttacagtggtgtgaaaaactctttgaaggaagctaatcatgatggagactttggaattacgctcgcagagctgcgggctctcatggagctcaggtccacagatgcattacgaaaaatacaggaaagctatggagatgtctatggaatttgcaccaaattgaaaacatctcccaatgaaggtttaagtggaaaccctgcagatttagaaagaagagaagcagtgtttggaaagaattttatacctcctaaaaagccaaaaacctttcttcaattagtatgggaagcattacaagatgtcactttaattatattagaaattgcagccatagtatcattgggcctttctttttatcagcctccagaaggggataatgcactttgtggagaagtttctgttggggaggaagaaggtgaaggtgaaactggttggattgaaggagctgcaatcctcttgtctgtagtgtgtgtggtgttagtaacagctttcaatgactggagtaaggaaaaacagtttagaggtttgcagagccgaattgaacaagaacagaagttcactgtcatcaggggtggtcaggtcattcagatacctgtagctgacattactgttggagatattgctcaagtgaaatatggtgatcttcttccagctgacggcatacttattcaaggcaacgatcttaaaattgatgaaagctcattgactggtgaatcagatcatgttaaaaagtctttagataaggatcccttacttctatcaggtactcatgtaatggaaggctctggaagaatggtagttacagctgtaggtgtaaattctcaaactggaattatctttaccttacttggagctggaggtgaagaggaagagaagaaagatgagaagaaaaaggaaaagaaaaataagaaacaagatggagctattgagaatcgcaacaaagcaaaagcccaggatggtgcagccatggaaatgcagccattgaagagtgaagaaggtggagatggtgatgaaaaagataaaaagaaagcaaatttgccaaaaaaggaaaaatctgttttacaagggaaacttacaaaactggctgttcagattggcaaagcaggtctgttgatgtctgccatcacagttatcattctagtattatattttgtcattgacaccttctgggttcagaaaagaccatggcttgctgagtgcacaccaatttatatacaatactttgtgaagttcttcattattggagttacagttttagtggtcgcagtgccagaaggtcttccacttgcagtcacgatctcactggcttattcagtcaaaaaaatgatgaaagataataacttagtaaggcatctggatgcttgtgaaaccatgggaaatgctacagctatttgttcagataaaacaggaactttgacaatgaacagaatgacagtcgttcaagcttacataaatgaaaaacattataaaaaggttcctgaaccagaagctattccaccaaatattttgtcctatcttgtaacaggaatttctgtgaattgtgcttatacatcaaaaatattgccaccagagaaagagggtggattacctcgtcacgttggtaataaaactgaatgtgccttgttgggacttcttttggatttaaaacgggattatcaggatgttagaaatgaaataccagaagaagcactgtacaaagtctacaccttcaattctgttaggaagtccatgagtactgtcctgaaaaattcagatggaagttatcgaatattcagcaagggtgcatctgagataattctgaaaaagtgtttcaaaatcttgagtgctaatggtgaggcaaaagtattcagaccaagggaccgtgatgatattgtaaaaactgtgattgaaccgatggcatcagaaggcttgagaaccatatgtcttgcattcagagattttccagcaggagaaccagaaccagagtgggataatgaaaatgatattgtcaccggccttacatgcattgctgttgtggggattgaagatcctgtgagacctgaggtgccagatgcaattaaaaagtgtcagagggctggaattactgtgcggatggtcactggtgataatattaatactgctcgggccattgctaccaaatgtggtattttacatcctggggaagattttctgtgcctagaaggtaaagattttaacagaagaatacgaaatgaaaaaggagagattgagcaagagaggatagacaagatttggccaaaacttcgagtacttgcaagatcatctcctactgataagcatacactggttaaaggtataattgacagcactgtctcagaccaacgccaggttgtagctgtaactggtgatggtacaaatgatggcccagcactaaagaaagcagatgttggatttgcaatgggtattgctggaactgatgtagctaaagaagcatccgatattattctcacagatgacaactttacaagcattgttaaagcagttatgtggggacgaaatgtctatgacagcatctcaaaattccttcagttccaacttactgttaatgtagtagcagtgattgttgcttttacgggcgcctgcattactcaagactcaccgcttaaggctgtgcagatgctgtgggtaaacctcataatggatacactcgcttccctggctctggcaacggaaccacccactgagtctctcttgcttcggaaaccttatggtagaaataagcctctcatctcacgtacaatgatgaagaatattttgggtcatgcattctatcaacttgtagtagtctttacactcttatttgctggagaaaagttttttgacattgatagtggaagaaatgctcctttgcatgctcctccttcagaacattatactattgtttttaatacctttgtgctgatgcaacttttcaacgaaataaatgcccggaaaattcatggtgaaagaaatgtattcgaaggaatctttaacaatgccatcttctgcacaattgttttaggcacttttgtggtacagataataattgtgcagtttggtggaaaacctttcagttgttcagaactttcaatagaacagtggctatggtcaatattcctaggaatgggaacattactctggggccagcttatttcaacaattccaactagccgtttaaaattcctcaaagaagctggtcatggaacacaaaaggaagaaatacctgaggaggaattagcagaggatgttgaagagattgatcacgctgaaagggagttgcggcgtggccaaatcttgtggtttagaggtctgaacagaatccaaacacagattcgagtggtgaatgcatttcgtagttctttatatgaagggttagaaaaaccggaatcaagaagttcgattcacaactttatgacacatcctgagtttaggatagaagattcagagcctcatatcccccttattgatgacactgatgccgaagatgatgctcctacaaaacgtaactccagtcctccaccctctcccaacaaaaataacaatgctgttgacagtggaattcaccttacaatagaaatgaacaagtctgctacctcttcatccccaggaagcccactacatagtttggaaacatcactctgattgtaagctgaatgttaacacactagctgcattgtaaagaaacaaattgaaactgggtcttttcacatattgtgatggacaagctagtattcttgtctttggacttcaacagaagacacacttgtacgaatgtagatttatttttttaaaaaaaaaaaagcaaagctttctgccagactgagggtgctttttggggggtgggagaaatgaactgacagataaacagtaactcagcgtaagtgacctgtggatcatcagtagtacccaagcatggtcctgaacagtgtattagcagagctttagtttatctcagtcctggatgggagagagagggaggagtaaaactgggcaagacaaagagccctggatcgttgaattgatagtttaatttctgctgttggctgttaataatttggattatttatgtttataaatgatacagatctgtttacaaggtttgtagatactttttttgttcctgttcatagatgggaagcttccttataactgatgcagagaaaaattagtccttcaaatactgctgtattttcaggaaaaaaaaaaaaaggggtgtttctattgaaactgtactaaatttttgcctacaatttaccttgttaaatattgtagataaattgctaatactaatagccaaatagataacactaatgctttgtttaaaaaaacgaaaaaaacaaaacaaaacaaaaaaacatgagcagtggtgttctaatgaagttatgacatctgtcctaattagtttcttaaatacatttactacttaatggttttgaagcaactgtttaatttttaaaatttttgaaaacttgctaataaccttttgttcagaatttagtagattgtttaatgcaggacatcaactacataatgaaagatgcttgaaatgcttttgttatttcaggcaaatcaaattaaatcagactatcaaactacaagagaaccttagtcttttttgtttttgtctaaacatgttagtttagtgatgtcttggtgaactgtgagtgaactgtattgatttttctaatctttagagaccttcacacagcatgagggctgttggcattttgaaaaaggttaataagtagaagcatacatgttttccttttgtttttgaaacttgtttgtaaacataaataaatatgcccttttattaaataaattcatggcaatgtttttttaaaagacatttcagcttctttactcagttctgcatatacagtgcatcagtctgttctctttgaccacaattggaatacatttcaagatggtaacagccccatgaagtaccgctttaattccttgctggtaatctaatagaatcagattaagaaaattaacacaattttaccatttgacatactcttcattgaatttagtttgtctaaaatagtctcacaggtaaaaaacataacaacaatgaccaccattgtctttgatacatttattttaattcttaagtggccaaataacagattaggtaaaatgagattacatgaaaaggttctaaaatgatatatttagatgcaataattaaccatatgctagaatgcccacctctaagccaattggattctttagctctctttttctttccttcatctaccttcttctcttttttgcctctgtctttaccctttagaaactggcatgtgttagggcccagatttcaccagatacacaatcctcaggctgacataaagtttacgaggactgctactataactgagagtgctgaccaagcaaagaaacatttagttgatggtgcttgatatttttggtgggtgggggaaatctttttctcaccatcaaatctttgcagtaatcctctgcaggtcttagaaacacattggctctgtcagcatttgtaattgtacatttattcatcaggtatttatagtgaatcatactgtaaaaaagaggtagcatgatatgctggaaagcatattagactaggagtcaagacctggtttctagtcttggttttgccattaatgtgctgcatgatcttgggaaaatcatttaccctaaataagggtggtggactatcttgaagaaccctttcaactctaaaaattgaccctatcaactggagagcccacaaggcatagggaatagagaaaagggaaatgttttcagttttcttttttattttggttatgcttaaatatgaatgtaattaccaaaagatttagaagtgcatgtgctttggaggatttgtattgagcttttacagtattcatttttcaactcaaggcaatggctttctacaccaactctaatccataaacgggtcttatgacatctatgaagtagtagcaagacatgcttagtgtgtatttctctctttgagacactgtaatttctaccagaaatttccagagcattatgtaggtagaaaaaaatgcaagcaagctgttaaagatcttggatcccattatatagtatgtatagctgaaatctgtaattcaatcactttttctcttttatcctctaaccaaaaaattgtttaattttgcatcccaaatgtttttaatctttgtatattttttaaaaatccttttctcctcatcattgccttttttgtggttgtaaatagacttacttgcactttgaagatgagttactccttgtcatcttacaaatatgtgatatggtaattttcataacagatgtcagttttgaaccaagaattggtgatttgtttataagaaaaaaactggcttcatttctgtgaaattgctctttgaaaatttctttttacacgtgtaagccaactgagataccgtgatggtgttgatttctttcaatgatgcttaccatctattttagccactgagccttttattatttgtctatttgtaaagtttatttgtcttaactcatttaataaatatactgtttatctgtttctg

SEQ ID NO: 2720 - DNA, 6669 bp, Homo sapiens
  source 1..6669: mol_type = unassigned DNA
ggccaaaggtcaagatacttctctgggaaatgttgctgctgatgctgctttacaaagtcatacaatgagtgtttggtttaagaaagattttcatacttaaaagattttcatcttggaaatacatcaagtgaaaattaaattcttttgggaaacattttccttctgatatattatacttgtaatgggcgacatggcaaacaactcagttgcttacagtggtgtgaaaaactctttgaaggaagctaatcatgatggagactttggaattacgctcgcagagctgcgggctctcatggagctcaggtccacagatgcattacgaaaaatacaggaaagctatggagatgtctatggaatttgcaccaaattgaaaacatctcccaatgaaggtttaagtggaaaccctgcagatttagaaagaagagaagcagtgtttggaaagaattttatacctcctaaaaagccaaaaacctttcttcaattagtatgggaagcattacaagatgtcactttaattatattagaaattgcagccatagtatcattgggcctttctttttatcagcctccagaaggggataatgcactttgtggagaagtttctgttggggaggaagaaggtgaaggtgaaactggttggattgaaggagctgcaatcctcttgtctgtagtgtgtgtggtgttagtaacagctttcaatgactggagtaaggaaaaacagtttagaggtttgcagagccgaattgaacaagaacagaagttcactgtcatcaggggtggtcaggtcattcagatacctgtagctgacattactgttggagatattgctcaagtgaaatatggtgatcttcttccagctgacggcatacttattcaaggcaacgatcttaaaattgatgaaagctcattgactggtgaatcagatcatgttaaaaagtctttagataaggatcccttacttctatcaggtactcatgtaatggaaggctctggaagaatggtagttacagctgtaggtgtaaattctcaaactggaattatctttaccttacttggagctggaggtgaagaggaagagaagaaagatgagaagaaaaaggaaaagaaaaataagaaacaagatggagctattgagaatcgcaacaaagcaaaagcccaggatggtgcagccatggaaatgcagccattgaagagtgaagaaggtggagatggtgatgaaaaagataaaaagaaagcaaatttgccaaaaaaggaaaaatctgttttacaagggaaacttacaaaactggctgttcagattggcaaagcaggtctgttgatgtctgccatcacagttatcattctagtattatattttgtcattgacaccttctgggttcagaaaagaccatggcttgctgagtgcacaccaatttatatacaatactttgtgaagttcttcattattggagttacagttttagtggtcgcagtgccagaaggtcttccacttgcagtcacgatctcactggcttattcagtcaaaaaaatgatgaaagataataacttagtaaggcatctggatgcttgtgaaaccatgggaaatgctacagctatttgttcagataaaacaggaactttgacaatgaacagaatgacagtcgttcaagcttacataaatgaaaaacattataaaaaggttcctgaaccagaagctattccaccaaatattttgtcctatcttgtaacaggaatttctgtgaattgtgcttatacatcaaaaatattgccaccagagaaagagggtggattacctcgtcacgttggtaataaaactgaatgtgccttgttgggacttcttttggatttaaaacgggattatcaggatgttagaaatgaaataccagaagaagcactgtacaaagtctacaccttcaattctgttaggaagtccatgagtactgtcctgaaaaattcagatggaagttatcgaatattcagcaagggtgcatctgagataattctgaaaaagtgtttcaaaatcttgagtgctaatggtgaggcaaaagtattcagaccaagggaccgtgatgatattgtaaaaactgtgattgaaccgatggcatcagaaggcttgagaaccatatgtcttgcattcagagattttccagcaggagaaccagaaccagagtgggataatgaaaatgatattgtcaccggccttacatgcattgctgttgtggggattgaagatcctgtgagacctgaggtgccagatgcaattaaaaagtgtcagagggctggaattactgtgcggatggtcactggtgataatattaatactgctcgggccattgctaccaaatgtggtattttacatcctggggaagattttctgtgcctagaaggtaaagattttaacagaagaatacgaaatgaaaaaggagagattgagcaagagaggatagacaagatttggccaaaacttcgagtacttgcaagatcatctcctactgataagcatacactggttaaaggtataattgacagcactgtctcagaccaacgccaggttgtagctgtaactggtgatggtacaaatgatggcccagcactaaagaaagcagatgttggatttgcaatgggtattgctggaactgatgtagctaaagaagcatccgatattattctcacagatgacaactttacaagcattgttaaagcagttatgtggggacgaaatgtctatgacagcatctcaaaattccttcagttccaacttactgttaatgtagtagcagtgattgttgcttttacgggcgcctgcattactcaagactcaccgcttaaggctgtgcagatgctgtgggtaaacctcataatggatacactcgcttccctggctctggcaacggaaccacccactgagtctctcttgcttcggaaaccttatggtagaaataagcctctcatctcacgtacaatgatgaagaatattttgggtcatgcattctatcaacttgtagtagtctttacactcttatttgctggagaaaagttttttgacattgatagtggaagaaatgctcctttgcatgctcctccttcagaacattatactattgtttttaatacctttgtgctgatgcaacttttcaacgaaataaatgcccggaaaattcatggtgaaagaaatgtattcgaaggaatctttaacaatgccatcttctgcacaattgttttaggcacttttgtggtacagcttatttcaacaattccaactagccgtttaaaattcctcaaagaagctggtcatggaacacaaaaggaagaaatacctgaggaggaattagcagaggatgttgaagagattgatcacgctgaaagggagttgcggcgtggccaaatcttgtggtttagaggtctgaacagaatccaaacacagattcgagtggtgaatgcatttcgtagttctttatatgaagggttagaaaaaccggaatcaagaagttcgattcacaactttatgacacatcctgagtttaggatagaagattcagagcctcatatcccccttattgatgacactgatgccgaagatgatgctcctacaaaacgtaactccagtcctccaccctctcccaacaaaaataacaatgctgttgacagtggaattcaccttacaatagaaatgaacaagtctgctacctcttcatccccaggaagcccactacatagtttggaaacatcactctgattgtaagctgaatgttaacacactagctgcattgtaaagaaacaaattgaaactgggtcttttcacatattgtgatggacaagctagtattcttgtctttggacttcaacagaagacacacttgtacgaatgtagatttatttttttaaaaaaaaaaaagcaaagctttctgccagactgagggtgctttttggggggtgggagaaatgaactgacagataaacagtaactcagcgtaagtgacctgtggatcatcagtagtacccaagcatggtcctgaacagtgtattagcagagctttagtttatctcagtcctggatgggagagagagggaggagtaaaactgggcaagacaaagagccctggatcgttgaattgatagtttaatttctgctgttggctgttaataatttggattatttatgtttataaatgatacagatctgtttacaaggtttgtagatactttttttgttcctgttcatagatgggaagcttccttataactgatgcagagaaaaattagtccttcaaatactgctgtattttcaggaaaaaaaaaaaaaggggtgtttctattgaaactgtactaaatttttgcctacaatttaccttgttaaatattgtagataaattgctaatactaatagccaaatagataacactaatgctttgtttaaaaaaacgaaaaaaacaaaacaaaacaaaaaaacatgagcagtggtgttctaatgaagttatgacatctgtcctaattagtttcttaaatacatttactacttaatggttttgaagcaactgtttaatttttaaaatttttgaaaacttgctaataaccttttgttcagaatttagtagattgtttaatgcaggacatcaactacataatgaaagatgcttgaaatgcttttgttatttcaggcaaatcaaattaaatcagactatcaaactacaagagaaccttagtcttttttgtttttgtctaaacatgttagtttagtgatgtcttggtgaactgtgagtgaactgtattgatttttctaatctttagagaccttcacacagcatgagggctgttggcattttgaaaaaggttaataagtagaagcatacatgttttccttttgtttttgaaacttgtttgtaaacataaataaatatgcccttttattaaataaattcatggcaatgtttttttaaaagacatttcagcttctttactcagttctgcatatacagtgcatcagtctgttctctttgaccacaattggaatacatttcaagatggtaacagccccatgaagtaccgctttaattccttgctggtaatctaatagaatcagattaagaaaattaacacaattttaccatttgacatactcttcattgaatttagtttgtctaaaatagtctcacaggtaaaaaacataacaacaatgaccaccattgtctttgatacatttattttaattcttaagtggccaaataacagattaggtaaaatgagattacatgaaaaggttctaaaatgatatatttagatgcaataattaaccatatgctagaatgcccacctctaagccaattggattctttagctctctttttctttccttcatctaccttcttctcttttttgcctctgtctttaccctttagaaactggcatgtgttagggcccagatttcaccagatacacaatcctcaggctgacataaagtttacgaggactgctactataactgagagtgctgaccaagcaaagaaacatttagttgatggtgcttgatatttttggtgggtgggggaaatctttttctcaccatcaaatctttgcagtaatcctctgcaggtcttagaaacacattggctctgtcagcatttgtaattgtacatttattcatcaggtatttatagtgaatcatactgtaaaaaagaggtagcatgatatgctggaaagcatattagactaggagtcaagacctggtttctagtcttggttttgccattaatgtgctgcatgatcttgggaaaatcatttaccctaaataagggtggtggactatcttgaagaaccctttcaactctaaaaattgaccctatcaactggagagcccacaaggcatagggaatagagaaaagggaaatgttttcagttttcttttttattttggttatgcttaaatatgaatgtaattaccaaaagatttagaagtgcatgtgctttggaggatttgtattgagcttttacagtattcatttttcaactcaaggcaatggctttctacaccaactctaatccataaacgggtcttatgacatctatgaagtagtagcaagacatgcttagtgtgtatttctctctttgagacactgtaatttctaccagaaatttccagagcattatgtaggtagaaaaaaatgcaagcaagctgttaaagatcttggatcccattatatagtatgtatagctgaaatctgtaattcaatcactttttctcttttatcctctaaccaaaaaattgtttaattttgcatcccaaatgtttttaatctttgtatattttttaaaaatccttttctcctcatcattgccttttttgtggttgtaaatagacttacttgcactttgaagatgagttactccttgtcatcttacaaatatgtgatatggtaattttcataacagatgtcagttttgaaccaagaattggtgatttgtttataagaaaaaaactggcttcatttctgtgaaattgctctttgaaaatttctttttacacgtgtaagccaactgagataccgtgatggtgttgatttctttcaatgatgcttaccatctattttagccactgagccttttattatttgtctatttgtaaagtttatttgtcttaactcatttaataaatatactgtttatctgtttctg

SEQ ID NO: 2721 - DNA, 6970 bp, Homo sapiens
  source 1..6970: mol_type = unassigned DNA
acagatgtgtatatctcatgattgatatggagaaactagtcatgggccaaaggtcaagatacttctctgggaaatgttgctgctgatgctgctttacaaagtcatacaatgagtgtttggtttaagaaagattttcatacttaaaagattttcatcttggaaatacatcaagtgaaaattaaattcttttgggaaacattttccttctgatatattatacttgtaatgggcgacatggcaaacaactcagttgcttacagtggtgtgaaaaactctttgaaggaagctaatcatgatggagactttggaattacgctcgcagagctgcgggctctcatggagctcaggtccacagatgcattacgaaaaatacaggaaagctatggagatgtctatggaatttgcaccaaattgaaaacatctcccaatgaaggtttaagtggaaaccctgcagatttagaaagaagagaagcagtgtttggaaagaattttatacctcctaaaaagccaaaaacctttcttcaattagtatgggaagcattacaagatgtcactttaattatattagaaattgcagccatagtatcattgggcctttctttttatcagcctccagaaggggataatgcactttgtggagaagtttctgttggggaggaagaaggtgaaggtgaaactggttggattgaaggagctgcaatcctcttgtctgtagtgtgtgtggtgttagtaacagctttcaatgactggagtaaggaaaaacagtttagaggtttgcagagccgaattgaacaagaacagaagttcactgtcatcaggggtggtcaggtcattcagatacctgtagctgacattactgttggagatattgctcaagtgaaatatggtgatcttcttccagctgacggcatacttattcaaggcaacgatcttaaaattgatgaaagctcattgactggtgaatcagatcatgttaaaaagtctttagataaggatcccttacttctatcaggtactcatgtaatggaaggctctggaagaatggtagttacagctgtaggtgtaaattctcaaactggaattatctttaccttacttggagctggaggtgaagaggaagagaagaaagatgagaagaaaaaggaaaagaaaaataagaaacaagatggagctattgagaatcgcaacaaagcaaaagcccaggatggtgcagccatggaaatgcagccattgaagagtgaagaaggtggagatggtgatgaaaaagataaaaagaaagcaaatttgccaaaaaaggaaaaatctgttttacaagggaaacttacaaaactggctgttcagattggcaaagcaggtctgttgatgtctgccatcacagttatcattctagtattatattttgtcattgacaccttctgggttcagaaaagaccatggcttgctgagtgcacaccaatttatatacaatactttgtgaagttcttcattattggagttacagttttagtggtcgcagtgccagaaggtcttccacttgcagtcacgatctcactggcttattcagtcaaaaaaatgatgaaagataataacttagtaaggcatctggatgcttgtgaaaccatgggaaatgctacagctatttgttcagataaaacaggaactttgacaatgaacagaatgacagtcgttcaagcttacataaatgaaaaacattataaaaaggttcctgaaccagaagctattccaccaaatattttgtcctatcttgtaacaggaatttctgtgaattgtgcttatacatcaaaaatattgccaccagagaaagagggtggattacctcgtcacgttggtaataaaactgaatgtgccttgttgggacttcttttggatttaaaacgggattatcaggatgttagaaatgaaataccagaagaagcactgtacaaagtctacaccttcaattctgttaggaagtccatgagtactgtcctgaaaaattcagatggaagttatcgaatattcagcaagggtgcatctgagataattctgaaaaagtgtttcaaaatcttgagtgctaatggtgaggcaaaagtattcagaccaagggaccgtgatgatattgtaaaaactgtgattgaaccgatggcatcagaaggcttgagaaccatatgtcttgcattcagagattttccagcaggagaaccagaaccagagtgggataatgaaaatgatattgtcaccggccttacatgcattgctgttgtggggattgaagatcctgtgagacctgaggtgccagatgcaattaaaaagtgtcagagggctggaattactgtgcggatggtcactggtgataatattaatactgctcgggccattgctaccaaatgtggtattttacatcctggggaagattttctgtgcctagaaggtaaagattttaacagaagaatacgaaatgaaaaaggagagattgagcaagagaggatagacaagatttggccaaaacttcgagtacttgcaagatcatctcctactgataagcatacactggttaaaggtataattgacagcactgtctcagaccaacgccaggttgtagctgtaactggtgatggtacaaatgatggcccagcactaaagaaagcagatgttggatttgcaatgggtattgctggaactgatgtagctaaagaagcatccgatattattctcacagatgacaactttacaagcattgttaaagcagttatgtggggacgaaatgtctatgacagcatctcaaaattccttcagttccaacttactgttaatgtagtagcagtgattgttgcttttacgggcgcctgcattactcaagactcaccgcttaaggctgtgcagatgctgtgggtaaacctcataatggatacactcgcttccctggctctggcaacggaaccacccactgagtctctcttgcttcggaaaccttatggtagaaataagcctctcatctcacgtacaatgatgaagaatattttgggtcatgcattctatcaacttgtagtagtctttacactcttatttgctggagaaaagttttttgacattgatagtggaagaaatgctcctttgcatgctcctccttcagaacattatactattgtttttaatacctttgtgctgatgcaacttttcaacgaaataaatgcccggaaaattcatggtgaaagaaatgtattcgaaggaatctttaacaatgccatcttctgcacaattgttttaggcacttttgtggtacagataataattgtgcagtttggtggaaaacctttcagttgttcagaactttcaatagaacagtggctatggtcaatattcctaggaatgggaacattactctggggccagcttatttcaacaattccaactagccgtttaaaattcctcaaagaagctggtcatggaacacaaaaggaagaaatacctgaggaggaattagcagaggatgttgaagagattgatcacgctgaaagggagttgcggcgtggccaaatcttgtggtttagaggtctgaacagaatccaaacacagatggatgtagtgaatgctttccagagtggaagttccattcagggggctctaaggcggcaaccctccatcgccagccagcatcatgatgtaacaaatatttctacccctacacatgtagtgttttcctcttctactgcttctactactgtggggtattcgagtggtgaatgcatttcgtagttctttatatgaagggttagaaaaaccggaatcaagaagttcgattcacaactttatgacacatcctgagtttaggatagaagattcagagcctcatatcccccttattgatgacactgatgccgaagatgatgctcctacaaaacgtaactccagtcctccaccctctcccaacaaaaataacaatgctgttgacagtggaattcaccttacaatagaaatgaacaagtctgctacctcttcatccccaggaagcccactacatagtttggaaacatcactctgattgtaagctgaatgttaacacactagctgcattgtaaagaaacaaattgaaactgggtcttttcacatattgtgatggacaagctagtattcttgtctttggacttcaacagaagacacacttgtacgaatgtagatttatttttttaaaaaaaaaaaagcaaagctttctgccagactgagggtgctttttggggggtgggagaaatgaactgacagataaacagtaactcagcgtaagtgacctgtggatcatcagtagtacccaagcatggtcctgaacagtgtattagcagagctttagtttatctcagtcctggatgggagagagagggaggagtaaaactgggcaagacaaagagccctggatcgttgaattgatagtttaatttctgctgttggctgttaataatttggattatttatgtttataaatgatacagatctgtttacaaggtttgtagatactttttttgttcctgttcatagatgggaagcttccttataactgatgcagagaaaaattagtccttcaaatactgctgtattttcaggaaaaaaaaaaaaaggggtgtttctattgaaactgtactaaatttttgcctacaatttaccttgttaaatattgtagataaattgctaatactaatagccaaatagataacactaatgctttgtttaaaaaaacgaaaaaaacaaaacaaaacaaaaaaacatgagcagtggtgttctaatgaagttatgacatctgtcctaattagtttcttaaatacatttactacttaatggttttgaagcaactgtttaatttttaaaatttttgaaaacttgctaataaccttttgttcagaatttagtagattgtttaatgcaggacatcaactacataatgaaagatgcttgaaatgcttttgttatttcaggcaaatcaaattaaatcagactatcaaactacaagagaaccttagtcttttttgtttttgtctaaacatgttagtttagtgatgtcttggtgaactgtgagtgaactgtattgatttttctaatctttagagaccttcacacagcatgagggctgttggcattttgaaaaaggttaataagtagaagcatacatgttttccttttgtttttgaaacttgtttgtaaacataaataaatatgcccttttattaaataaattcatggcaatgtttttttaaaagacatttcagcttctttactcagttctgcatatacagtgcatcagtctgttctctttgaccacaattggaatacatttcaagatggtaacagccccatgaagtaccgctttaattccttgctggtaatctaatagaatcagattaagaaaattaacacaattttaccatttgacatactcttcattgaatttagtttgtctaaaatagtctcacaggtaaaaaacataacaacaatgaccaccattgtctttgatacatttattttaattcttaagtggccaaataacagattaggtaaaatgagattacatgaaaaggttctaaaatgatatatttagatgcaataattaaccatatgctagaatgcccacctctaagccaattggattctttagctctctttttctttccttcatctaccttcttctcttttttgcctctgtctttaccctttagaaactggcatgtgttagggcccagatttcaccagatacacaatcctcaggctgacataaagtttacgaggactgctactataactgagagtgctgaccaagcaaagaaacatttagttgatggtgcttgatatttttggtgggtgggggaaatctttttctcaccatcaaatctttgcagtaatcctctgcaggtcttagaaacacattggctctgtcagcatttgtaattgtacatttattcatcaggtatttatagtgaatcatactgtaaaaaagaggtagcatgatatgctggaaagcatattagactaggagtcaagacctggtttctagtcttggttttgccattaatgtgctgcatgatcttgggaaaatcatttaccctaaataagggtggtggactatcttgaagaaccctttcaactctaaaaattgaccctatcaactggagagcccacaaggcatagggaatagagaaaagggaaatgttttcagttttcttttttattttggttatgcttaaatatgaatgtaattaccaaaagatttagaagtgcatgtgctttggaggatttgtattgagcttttacagtattcatttttcaactcaaggcaatggctttctacaccaactctaatccataaacgggtcttatgacatctatgaagtagtagcaagacatgcttagtgtgtatttctctctttgagacactgtaatttctaccagaaatttccagagcattatgtaggtagaaaaaaatgcaagcaagctgttaaagatcttggatcccattatatagtatgtatagctgaaatctgtaattcaatcactttttctcttttatcctctaaccaaaaaattgtttaattttgcatcccaaatgtttttaatctttgtatattttttaaaaatccttttctcctcatcattgccttttttgtggttgtaaatagacttacttgcactttgaagatgagttactccttgtcatcttacaaatatgtgatatggtaattttcataacagatgtcagttttgaaccaagaattggtgatttgtttataagaaaaaaactggcttcatttctgtgaaattgctctttgaaaatttctttttacacgtgtaagccaactgagataccgtgatggtgttgatttctttcaatgatgcttaccatctattttagccactgagccttttattatttgtctatttgtaaagtttatttgtcttaactcatttaataaatatactgtttatctgt

SEQ ID NO: 2722 - DNA, 3127 bp, Homo sapiens
  source 1..3127: mol_type = unassigned DNA
tttcctaaatgttgaggctgttaaaaacaatattactgaagtttgaaatttggtggtagcaaggagatctatcagtatttttaaaaacaaactatgtttttggttataggtactcatgtaatggaaggctctggaagaatggtagttacagctgtaggtgtaaattctcaaactggaattatctttaccttacttggagctggaggtgaagaggaagagaagaaagatgagaagaaaaaggaaaagaaaaataagaaacaagatggagctattgagaatcgcaacaaagcaaaagcccaggatggtgcagccatggaaatgcagccattgaagagtgaagaaggtggagatggtgatgaaaaagataaaaagaaagcaaatttgccaaaaaaggaaaaatctgttttacaagggaaacttacaaaactggctgttcagattggcaaagcaggtctgttgatgtctgccatcacagttatcattctagtattatattttgtcattgacaccttctgggttcagaaaagaccatggcttgctgagtgcacaccaatttatatacaatactttgtgaagttcttcattattggagttacagttttagtggtcgcagtgccagaaggtcttccacttgcagtcacgatctcactggcttattcagtcaaaaaaatgatgaaagataataacttagtaaggcatctggatgcttgtgaaaccatgggaaatgctacagctatttgttcagataaaacaggaactttgacaatgaacagaatgacagtcgttcaagcttacataaatgaaaaacattataaaaaggttcctgaaccagaagctattccaccaaatattttgtcctatcttgtaacaggaatttctgtgaattgtgcttatacatcaaaaatattgccaccagagaaagagggtggattacctcgtcacgttggtaataaaactgaatgtgccttgttgggacttcttttggatttaaaacgggattatcaggatgttagaaatgaaataccagaagaagcactgtacaaagtctacaccttcaattctgttaggaagtccatgagtactgtcctgaaaaattcagatggaagttatcgaatattcagcaagggtgcatctgagataattctgaaaaagtgtttcaaaatcttgagtgctaatggtgaggcaaaagtattcagaccaagggaccgtgatgatattgtaaaaactgtgattgaaccgatggcatcagaaggcttgagaaccatatgtcttgcattcagagattttccagcaggagaaccagaaccagagtgggataatgaaaatgatattgtcaccggccttacatgcattgctgttgtggggattgaagatcctgtgagacctgaggtgccagatgcaattaaaaagtgtcagagggctggaattactgtgcggatggtcactggtgataatattaatactgctcgggccattgctaccaaatgtggtattttacatcctggggaagattttctgtgcctagaaggtaaagattttaacagaagaatacgaaatgaaaaaggagagattgagcaagagaggatagacaagatttggccaaaacttcgagtacttgcaagatcatctcctactgataagcatacactggttaaaggtataattgacagcactgtctcagaccaacgccaggttgtagctgtaactggtgatggtacaaatgatggcccagcactaaagaaagcagatgttggatttgcaatgggtattgctggaactgatgtagctaaagaagcatccgatattattctcacagatgacaactttacaagcattgttaaagcagttatgtggggacgaaatgtctatgacagcatctcaaaattccttcagttccaacttactgttaatgtagtagcagtgattgttgcttttacgggcgcctgcattactcaagactcaccgcttaaggctgtgcagatgctgtgggtaaacctcataatggatacactcgcttccctggctctggcaacggaaccacccactgagtctctcttgcttcggaaaccttatggtagaaataagcctctcatctcacgtacaatgatgaagaatattttgggtcatgcattctatcaacttgtagtagtctttacactcttatttgctggagaaaagttttttgacattgatagtggaagaaatgctcctttgcatgctcctccttcagaacattatactattgtttttaatacctttgtgctgatgcaacttttcaacgaaataaatgcccggaaaattcatggtgaaagaaatgtattcgaaggaatctttaacaatgccatcttctgcacaattgttttaggcacttttgtggtacagataataattgtgcagtttggtggaaaacctttcagttgttcagaactttcaatagaacagtggctatggtcaatattcctaggaatgggaacattactctggggccagcttatttcaacaattccaactagccgtttaaaattcctcaaagaagctggtcatggaacacaaaaggaagaaatacctgaggaggaattagcagaggatgttgaagagattgatcacgctgaaagggagttgcggcgtggccaaatcttgtggtttagaggtctgaacagaatccaaacacagattcgagtggtgaatgcatttcgtagttctttatatgaagggttagaaaaaccggaatcaagaagttcgattcacaactttatgacacatcctgagtttaggatagaagattcagagcctcatatcccccttattgatgacactgatgccgaagatgatgctcctacaaaacgtaactccagtcctccaccctctcccaacaaaaataacaatgctgttgacagtggaattcaccttacaatagaaatgaacaagtctgctacctcttcatccccaggaagcccactacatagtttggaaacatcactctgattgtaagctgaatgttaacacactagctgcattgtaaagaaacaaattgaaactgggtcttttcacatattgtgatggacaagctagtattcttgtctttggacttcaacagaagacacacttgtacgaatgtagatttatt

SEQ ID NO: 2723 - DNA, 7032 bp, Homo sapiens
  source 1..7032: mol_type = unassigned DNA
agcgtgagtagggagccccggctggtggacgccgagcctctcggctccttggccgccccatccccgaggtgcagctgcacctccgcgtggcgccccgagccctgcgagccggctgcggacgcgctgaggacggagcccccatcctctgcgtttcccgctgccccttaacgccccgcgaccctcccgcagcctgcctttccttccccctcggaaaatggttcccactgccgggcgagatgtgtatatctcatgattgatatggagaaactagtcatgggccaaaggtcaagatacttctctgggaaatgttgctgctgatgctgctttacaaagtcatacaatgagtgtttggtttaagaaagattttcatacttaaaagattttcatcttggaaatacatcaagtgaaaattaaattcttttgggaaacattttccttctgatatattatacttgtaatgggcgacatggcaaacaactcagttgcttacagtggtgtgaaaaactctttgaaggaagctaatcatgatggagactttggaattacgctcgcagagctgcgggctctcatggagctcaggtccacagatgcattacgaaaaatacaggaaagctatggagatgtctatggaatttgcaccaaattgaaaacatctcccaatgaaggtttaagtggaaaccctgcagatttagaaagaagagaagcagtgtttggaaagaattttatacctcctaaaaagccaaaaacctttcttcaattagtatgggaagcattacaagatgtcactttaattatattagaaattgcagccatagtatcattgggcctttctttttatcagcctccagaaggggataatgcactttgtggagaagtttctgttggggaggaagaaggtgaaggtgaaactggttggattgaaggagctgcaatcctcttgtctgtagtgtgtgtggtgttagtaacagctttcaatgactggagtaaggaaaaacagtttagaggtttgcagagccgaattgaacaagaacagaagttcactgtcatcaggggtggtcaggtcattcagatacctgtagctgacattactgttggagatattgctcaagtgaaatatggtgatcttcttccagctgacggcatacttattcaaggcaacgatcttaaaattgatgaaagctcattgactggtgaatcagatcatgttaaaaagtctttagataaggatcccttacttctatcaggtactcatgtaatggaaggctctggaagaatggtagttacagctgtaggtgtaaattctcaaactggaattatctttaccttacttggagctggaggtgaagaggaagagaagaaagatgagaagaaaaaggaaaagaaaaataagaaacaagatggagctattgagaatcgcaacaaagcaaaagcccaggatggtgcagccatggaaatgcagccattgaagagtgaagaaggtggagatggtgatgaaaaagataaaaagaaagcaaatttgccaaaaaaggaaaaatctgttttacaagggaaacttacaaaactggctgttcagattggcaaagcaggtctgttgatgtctgccatcacagttatcattctagtattatattttgtcattgacaccttctgggttcagaaaagaccatggcttgctgagtgcacaccaatttatatacaatactttgtgaagttcttcattattggagttacagttttagtggtcgcagtgccagaaggtcttccacttgcagtcacgatctcactggcttattcagtcaaaaaaatgatgaaagataataacttagtaaggcatctggatgcttgtgaaaccatgggaaatgctacagctatttgttcagataaaacaggaactttgacaatgaacagaatgacagtcgttcaagcttacataaatgaaaaacattataaaaaggttcctgaaccagaagctattccaccaaatattttgtcctatcttgtaacaggaatttctgtgaattgtgcttatacatcaaaaatattgccaccagagaaagagggtggattacctcgtcacgttggtaataaaactgaatgtgccttgttgggacttcttttggatttaaaacgggattatcaggatgttagaaatgaaataccagaagaagcactgtacaaagtctacaccttcaattctgttaggaagtccatgagtactgtcctgaaaaattcagatggaagttatcgaatattcagcaagggtgcatctgagataattctgaaaaagtgtttcaaaatcttgagtgctaatggtgaggcaaaagtattcagaccaagggaccgtgatgatattgtaaaaactgtgattgaaccgatggcatcagaaggcttgagaaccatatgtcttgcattcagagattttccagcaggagaaccagaaccagagtgggataatgaaaatgatattgtcaccggccttacatgcattgctgttgtggggattgaagatcctgtgagacctgaggtgccagatgcaattaaaaagtgtcagagggctggaattactgtgcggatggtcactggtgataatattaatactgctcgggccattgctaccaaatgtggtattttacatcctggggaagattttctgtgcctagaaggtaaagattttaacagaagaatacgaaatgaaaaaggagagattgagcaagagaggatagacaagatttggccaaaacttcgagtacttgcaagatcatctcctactgataagcatacactggttaaaggtataattgacagcactgtctcagaccaacgccaggttgtagctgtaactggtgatggtacaaatgatggcccagcactaaagaaagcagatgttggatttgcaatgggtattgctggaactgatgtagctaaagaagcatccgatattattctcacagatgacaactttacaagcattgttaaagcagttatgtggggacgaaatgtctatgacagcatctcaaaattccttcagttccaacttactgttaatgtagtagcagtgattgttgcttttacgggcgcctgcattactcaagactcaccgcttaaggctgtgcagatgctgtgggtaaacctcataatggatacactcgcttccctggctctggcaacggaaccacccactgagtctctcttgcttcggaaaccttatggtagaaataagcctctcatctcacgtacaatgatgaagaatattttgggtcatgcattctatcaacttgtagtagtctttacactcttatttgctggagaaaagttttttgacattgatagtggaagaaatgctcctttgcatgctcctccttcagaacattatactattgtttttaatacctttgtgctgatgcaacttttcaacgaaataaatgcccggaaaattcatggtgaaagaaatgtattcgaaggaatctttaacaatgccatcttctgcacaattgttttaggcacttttgtggtacagataataattgtgcagtttggtggaaaacctttcagttgttcagaactttcaatagaacagtggctatggtcaatattcctaggaatgggaacattactctggggccagcttatttcaacaattccaactagccgtttaaaattcctcaaagaagctggtcatggaacacaaaaggaagaaatacctgaggaggaattagcagaggatgttgaagagattgatcacgctgaaagggagttgcggcgtggccaaatcttgtggtttagaggtctgaacagaatccaaacacagattcgagtggtgaatgcatttcgtagttctttatatgaagggttagaaaaaccggaatcaagaagttcgattcacaactttatgacacatcctgagtttaggatagaagattcagagcctcatatcccccttattgatgacactgatgccgaagatgatgctcctacaaaacgtaactccagtcctccaccctctcccaacaaaaataacaatgctgttgacagtggaattcaccttacaatagaaatgaacaagtctgctacctcttcatccccaggaagcccactacatagtttggaaacatcactctgattgtaagctgaatgttaacacactagctgcattgtaaagaaacaaattgaaactgggtcttttcacatattgtgatggacaagctagtattcttgtctttggacttcaacagaagacacacttgtacgaatgtagatttatttttttaaaaaaaaaaaagcaaagctttctgccagactgagggtgctttttggggggtgggagaaatgaactgacagataaacagtaactcagcgtaagtgacctgtggatcatcagtagtacccaagcatggtcctgaacagtgtattagcagagctttagtttatctcagtcctggatgggagagagagggaggagtaaaactgggcaagacaaagagccctggatcgttgaattgatagtttaatttctgctgttggctgttaataatttggattatttatgtttataaatgatacagatctgtttacaaggtttgtagatactttttttgttcctgttcatagatgggaagcttccttataactgatgcagagaaaaattagtccttcaaatactgctgtattttcaggaaaaaaaaaaaaaggggtgtttctattgaaactgtactaaatttttgcctacaatttaccttgttaaatattgtagataaattgctaatactaatagccaaatagataacactaatgctttgtttaaaaaaacgaaaaaaacaaaacaaaacaaaaaaacatgagcagtggtgttctaatgaagttatgacatctgtcctaattagtttcttaaatacatttactacttaatggttttgaagcaactgtttaatttttaaaatttttgaaaacttgctaataaccttttgttcagaatttagtagattgtttaatgcaggacatcaactacataatgaaagatgcttgaaatgcttttgttatttcaggcaaatcaaattaaatcagactatcaaactacaagagaaccttagtcttttttgtttttgtctaaacatgttagtttagtgatgtcttggtgaactgtgagtgaactgtattgatttttctaatctttagagaccttcacacagcatgagggctgttggcattttgaaaaaggttaataagtagaagcatacatgttttccttttgtttttgaaacttgtttgtaaacataaataaatatgcccttttattaaataaattcatggcaatgtttttttaaaagacatttcagcttctttactcagttctgcatatacagtgcatcagtctgttctctttgaccacaattggaatacatttcaagatggtaacagccccatgaagtaccgctttaattccttgctggtaatctaatagaatcagattaagaaaattaacacaattttaccatttgacatactcttcattgaatttagtttgtctaaaatagtctcacaggtaaaaaacataacaacaatgaccaccattgtctttgatacatttattttaattcttaagtggccaaataacagattaggtaaaatgagattacatgaaaaggttctaaaatgatatatttagatgcaataattaaccatatgctagaatgcccacctctaagccaattggattctttagctctctttttctttccttcatctaccttcttctcttttttgcctctgtctttaccctttagaaactggcatgtgttagggcccagatttcaccagatacacaatcctcaggctgacataaagtttacgaggactgctactataactgagagtgctgaccaagcaaagaaacatttagttgatggtgcttgatatttttggtgggtgggggaaatctttttctcaccatcaaatctttgcagtaatcctctgcaggtcttagaaacacattggctctgtcagcatttgtaattgtacatttattcatcaggtatttatagtgaatcatactgtaaaaaagaggtagcatgatatgctggaaagcatattagactaggagtcaagacctggtttctagtcttggttttgccattaatgtgctgcatgatcttgggaaaatcatttaccctaaataagggtggtggactatcttgaagaaccctttcaactctaaaaattgaccctatcaactggagagcccacaaggcatagggaatagagaaaagggaaatgttttcagttttcttttttattttggttatgcttaaatatgaatgtaattaccaaaagatttagaagtgcatgtgctttggaggatttgtattgagcttttacagtattcatttttcaactcaaggcaatggctttctacaccaactctaatccataaacgggtcttatgacatctatgaagtagtagcaagacatgcttagtgtgtatttctctctttgagacactgtaatttctaccagaaatttccagagcattatgtaggtagaaaaaaatgcaagcaagctgttaaagatcttggatcccattatatagtatgtatagctgaaatctgtaattcaatcactttttctcttttatcctctaaccaaaaaattgtttaattttgcatcccaaatgtttttaatctttgtatattttttaaaaatccttttctcctcatcattgccttttttgtggttgtaaatagacttacttgcactttgaagatgagttactccttgtcatcttacaaatatgtgatatggtaattttcataacagatgtcagttttgaaccaagaattggtgatttgtttataagaaaaaaactggcttcatttctgtgaaattgctctttgaaaatttctttttacacgtgtaagccaactgagataccgtgatggtgttgatttctttcaatgatgcttaccatctattttagccactgagccttttattatttgtctatttgtaaagtttatttgtcttaactcatttaataaa

SEQ ID NO: 2724 - DNA, 607 bp, Homo sapiens
  source 1..607: mol_type = unassigned DNA
gtggcagcgggagcagctgcgccgccagcgtggagcgggaggcgtgtgggtgtggagaaaagggagcgccagaccggaacggatgtgtatatctcatgattgatatggagaaactagtcatgggccaaaggtcaagatacttctctgggaaatgttgctgctgatgctgctttacaaagtcatacaatgagtgtttggtttaagaaagattttcatacttaaaagattttcatcttggaaatacatcaagtgaaaattaaattcttttgggaaacattttccttctgatatattatacttgtaatgggcgacatggcaaacaactcagttgcttacagtggtgtgaaaaactctttgaaggaagctaatcatgatggagactttggaattacgctcgcagagctgcgggctctcatggagctcaggtccacagatgcattacgaaaaatacaggaaagctatggagatgtctatggaatttgcaccaaattgaaaacatctcccaatgaaggtgagttttattatgcttgtttttggttctttgtgcaaagagttctatatatttggcttataaatgagcatgcttatattatcttggcgattgtat

SEQ ID NO: 2725 - DNA, 4036 bp, Homo sapiens
  source 1..4036: mol_type = unassigned DNA
agtctgcagaggggcccgggcacgctggctgggctcagccgcggcaccagctgccgcaccgcgattacggggctgcccgccgggaaaccgtgcaggattggtggtgattttcatagccaagagccaccacccctgaccatgtagatgccagttccagggagcagcatgggccccactgaatggagactcctgggtctacagccctgagcccctccggcccctggacctcgtcccacaccggaggacacctcttggagctcaccaccactgtcaccagcccgcctcggccacccccaccccccgggacccggagtcggccgcctggtgccacagctgaccagtgagggtgtgctgaggacagccacaagcagccatcacccggcagcctcttgtccagcgctgacccttgggcccagcccgagcaaggaccgcagcaaacatgggtgacatgaccaacagcgacttttactccaaaaaccaaagaaatgagtcgagccatgggggcgagttcgggtgcacaatggaggagctccgctccctcatggagctgcggggcactgaggctgtggtcaagatcaaggagacttatggggacaccgaagccatctgccggcgcctcaaaacctcacctgttgaaggtttgccgggcaccgctccagacctggaaaagagaaagcaaatttttgggcaaaactttatacctccaaagaagccaaaaaccttcctgcagctcgtgtgggaggcgctgcaggacgtgacgctcatcatcctggagattgccgccatcatctccctggggctgtccttctaccacccgcccggcgagggcaacgaaggatgtgcgacggcccagggtggggcagaggatgaaggagaggcagaggcaggttggatcgagggggccgccattctcctctcagttatctgtgtggtcctggtcacggccttcaatgactggagcaaagagaaacagttccggggcctgcagagccgcatcgagcaggaacagaaatttaccgtggtccgggctggccaggtggtccagatccctgtggctgagatcgtggttggggacatagcccaggtcaaatatggtgacctcctccctgccgacggcctcttcatccagggcaatgacctcaagattgatgaaagctccctaactggagagtctgaccaggtgcgcaagtccgtggacaaggaccccatgctgctgtcaggaacccacgtgatggagggctcaggacggatgttggtgactgctgtgggtgtgaactctcagactggcatcatctttaccctcctgggggctggtggtgaagaggaagagaagaaagacaaaaaaggtgtgaagaagggggatggccttcagctaccagcagcagacggtgcggcagcttcaaatgctgcagatagtgcgaatgccagcctagtcaatggtaaaatgcaggatggcaatgtggacgccagccagagcaaagccaaacaacaggacggggcagccgccatggagatgcagcccctcaagagtgccgagggcggcgacgctgacgacaggaagaaggccagcatgcacaagaaggagaagtccgtgctgcagggcaagctcaccaagctggctgtgcagatcgggaaggcgggcttggtgatgtcagccatcacggtgatcatcctggtgctctacttcactgtggacaccttcgtggtcaacaagaagccgtggctgcctgagtgcacgcccgtctacgtgcagtactttgtcaagttcttcatcattggcgtgacggtgctggtggtcgccgtgcccgaggggctccctctggccgtcaccatctcgttggcctattcggtgaagaaaatgatgaaggacaacaacctggtacgccacctggatgcctgtgagaccatgggcaatgccacagccatctgctcagacaagacaggcacgctgaccaccaatcgcatgacagtggtacaggcctatgtcggcgacgtccactataaagagatccccgaccccagctccatcaacaccaagaccatggagctgctgatcaatgccatcgccatcaacagcgcctacaccaccaagattctgcccccagagaaggagggcgccctgcctcggcaggtgggcaacaagacggagtgcggcctgctgggcttcgtgctggacctgaagcaggactacgagcccgtgcgcagccagatgccagaggagaagttgtacaaagtgtacaccttcaactccgtgcgcaagtccatgagcactgtcatcaagctgcccgacgagagcttccgcatgtacagcaagggggcttctgagatcgtgctcaagaagtgctgcaaaatcctcaatggggcgggagagcctcgtgtcttccggccccgcgaccgggacgagatggtaaagaaggtgattgagcccatggcttgcgatgggctccgcactatctgcgtggcctaccgcgacttccccagcagcccggagccggactgggacaatgagaatgacatcctcaacgaactcacctgcatctgcgtggtgggcatcgaggacccggtgcggccagaggtcccagaagccatccgcaagtgccagcgggcaggcatcacggtccgcatggtcactggcgacaatatcaacacggctcgggccatcgccatcaagtgtggcatcatccatcctggggaggactttctgtgcctcgagggcaaggagttcaacaggaggatccgcaacgagaagggggagattgagcaggagcgaattgacaagatctggccaaagctgcgggtgctggctcgctcctccccaacggacaagcataccctggttaaaggcatcatcgacagcacacacactgagcagcggcaggtggtggccgtgacgggggacgggaccaacgacgggcctgcactcaagaaggccgacgtgggcttcgccatgggcatcgcaggcactgacgtggccaaggaggcctcagacatcatcctgacagacgacaatttcagcagcatcgtcaaggcagtgatgtggggccgcaacgtctatgacagcatctccaaattcttgcagttccagctcaccgtcaacgtggtggccgtgattgtggccttcacaggcgcctgcatcacgcaggactcccctctgaaggccgtgcagatgctctgggtgaacctcatcatggacacgtttgcctcgctggcactggccactgagccgcccacggagaccctgctgctgaggaagccgtacggccgcaacaagccgctcatctccaggaccatgatgaagaacatcctgggccatgctgtctaccagcttgccctcatcttcaccctgctctttgttggcgagaagatgttccagatcgacagcgggaggaacgcgcccctgcattcgccaccctcagaacattacaccatcatcttcaacaccttcgtcatgatgcagctcttcaacgagatcaacgcccgcaagatccacggcgagcgcaatgtctttgacggcatcttccggaaccccatcttctgcaccatcgtgctgggcacctttgccatccagatagtgatcgtgcagtttggagggaagccattcagctgctctccactgcagctggaccagtggatgtggtgcatattcattgggttaggagagctcgtttggggccaggtcatcgccaccatcccgaccagcagactcaagttcctcaaggaggcaggcaggctcacacagaaggaggagatcccggaggaggagctcaacgaggacgtggaggagatcgaccacgcggagcgggagctgcggcggggccagatcctgtggttccgaggcctgaatcggatccagacacagattgaagtagtcaatactttcaagagcggggcctcctttcagggggccctgcggagacagtcctcggtcaccagccagagccaggatgtagccaatctctctagccctagtcgcgtgtcgttgtccaatgctctttcctctccgaccagccttcctcctgctgcagccgggcgtgag

SEQ ID NO: 2726 - DNA, 8920 bp, Homo sapiens
  source 1..8920: mol_type = unassigned DNA
agtctgcagaggggcccgggcacgctggctgggctcagccgcggcaccagctgccgcaccgcgattacggggctgcccgccgggaaaccgtgcaggattggtggtgattttcatagccaagagccaccacccctgaccatgtagatgccagttccagggagcagcatgggccccactgaatggagactcctgggtctacagccctgagcccctccggcccctggacctcgtcccacaccggaggacacctcttggagctcaccaccactgtcaccagcccgcctcggccacccccaccccccgggacccggagtcggccgcctggtgccacagctgaccagtgagggtgtgctgaggacagccacaagcagccatcacccggcagcctcttgtccagcgctgacccttgggcccagcccgagcaaggaccgcagcaaacatgggtgacatgaccaacagcgacttttactccaaaaaccaaagaaatgagtcgagccatgggggcgagttcgggtgcacaatggaggagctccgctccctcatggagctgcggggcactgaggctgtggtcaagatcaaggagacttatggggacaccgaagccatctgccggcgcctcaaaacctcacctgttgaaggtttgccgggcaccgctccagacctggaaaagagaaagcaaatttttgggcaaaactttatacctccaaagaagccaaaaaccttcctgcagctcgtgtgggaggcgctgcaggacgtgacgctcatcatcctggagattgccgccatcatctccctggggctgtccttctaccacccgcccggcgagggcaacgaaggatgtgcgacggcccagggtggggcagaggatgaaggagaggcagaggcaggttggatcgagggggccgccattctcctctcagttatctgtgtggtcctggtcacggccttcaatgactggagcaaagagaaacagttccggggcctgcagagccgcatcgagcaggaacagaaatttaccgtggtccgggctggccaggtggtccagatccctgtggctgagatcgtggttggggacatagcccaggtcaaatatggtgacctcctccctgccgacggcctcttcatccagggcaatgacctcaagattgatgaaagctccctaactggagagtctgaccaggtgcgcaagtccgtggacaaggaccccatgctgctgtcaggaacccacgtgatggagggctcaggacggatgttggtgactgctgtgggtgtgaactctcagactggcatcatctttaccctcctgggggctggtggtgaagaggaagagaagaaagacaaaaaaggtgtgaagaagggggatggccttcagctaccagcagcagacggtgcggcagcttcaaatgctgcagatagtgcgaatgccagcctagtcaatgccaaacaacaggacggggcagccgccatggagatgcagcccctcaagagtgccgagggcggcgacgctgacgacaggaagaaggccagcatgcacaagaaggagaagtccgtgctgcagggcaagctcaccaagctggctgtgcagatcgggaaggcgggcttggtgatgtcagccatcacggtgatcatcctggtgctctacttcactgtggacaccttcgtggtcaacaagaagccgtggctgcctgagtgcacgcccgtctacgtgcagtactttgtcaagttcttcatcattggcgtgacggtgctggtggtcgccgtgcccgaggggctccctctggccgtcaccatctcgttggcctattcggtgaagaaaatgatgaaggacaacaacctggtacgccacctggatgcctgtgagaccatgggcaatgccacagccatctgctcagacaagacaggcacgctgaccaccaatcgcatgacagtggtacaggcctatgtcggcgacgtccactataaagagatccccgaccccagctccatcaacaccaagaccatggagctgctgatcaatgccatcgccatcaacagcgcctacaccaccaagattctgcccccagagaaggagggcgccctgcctcggcaggtgggcaacaagacggagtgcggcctgctgggcttcgtgctggacctgaagcaggactacgagcccgtgcgcagccagatgccagaggagaagttgtacaaagtgtacaccttcaactccgtgcgcaagtccatgagcactgtcatcaagctgcccgacgagagcttccgcatgtacagcaagggggcttctgagatcgtgctcaagaagtgctgcaaaatcctcaatggggcgggagagcctcgtgtcttccggccccgcgaccgggacgagatggtaaagaaggtgattgagcccatggcttgcgatgggctccgcactatctgcgtggcctaccgcgacttccccagcagcccggagccggactgggacaatgagaatgacatcctcaacgaactcacctgcatctgcgtggtgggcatcgaggacccggtgcggccagaggtcccagaagccatccgcaagtgccagcgggcaggcatcacggtccgcatggtcactggcgacaatatcaacacggctcgggccatcgccatcaagtgtggcatcatccatcctggggaggactttctgtgcctcgagggcaaggagttcaacaggaggatccgcaacgagaagggggagattgagcaggagcgaattgacaagatctggccaaagctgcgggtgctggctcgctcctccccaacggacaagcataccctggttaaaggcatcatcgacagcacacacactgagcagcggcaggtggtggccgtgacgggggacgggaccaacgacgggcctgcactcaagaaggccgacgtgggcttcgccatgggcatcgcaggcactgacgtggccaaggaggcctcagacatcatcctgacagacgacaatttcagcagcatcgtcaaggcagtgatgtggggccgcaacgtctatgacagcatctccaaattcttgcagttccagctcaccgtcaacgtggtggccgtgattgtggccttcacaggcgcctgcatcacgcaggactcccctctgaaggccgtgcagatgctctgggtgaacctcatcatggacacgtttgcctcgctggcactggccactgagccgcccacggagaccctgctgctgaggaagccgtacggccgcaacaagccgctcatctccaggaccatgatgaagaacatcctgggccatgctgtctaccagcttgccctcatcttcaccctgctctttgttggcgagaagatgttccagatcgacagcgggaggaacgcgcccctgcattcgccaccctcagaacattacaccatcatcttcaacaccttcgtcatgatgcagctcttcaacgagatcaacgcccgcaagatccacggcgagcgcaatgtctttgacggcatcttccggaaccccatcttctgcaccatcgtgctgggcacctttgccatccagatagtgatcgtgcagtttggagggaagccattcagctgctctccactgcagctggaccagtggatgtggtgcatattcattgggttaggagagctcgtttggggccaggtcatcgccaccatcccgaccagcagactcaagttcctcaaggaggcaggcaggctcacacagaaggaggagatcccggaggaggagctcaacgaggacgtggaggagatcgaccacgcggagcgggagctgcggcggggccagatcctgtggttccgaggcctgaatcggatccagacacagatccgcgtcgtgaaggcgttccgtagctctctctatgaaggtttagaaaagcctgaatctcgaacctccatccataacttcatggctcatcctgaattccggatcgaagattcccagccccacatccccctcattgatgacaccgacctggaagaagatgccgcgctcaagcagaactcgagcccgccgtcatccctcaacaagaacaacagcgccatcgacagtgggatcaacctgacgaccgacacaagcaaatcagctacctcttcaagtccagggagccccatccacagcctggagacgtcgctttagctgaggaccctctcgcctgcccgcccgccctcatggaccccgctgccacccgctttccgggcacccatccatccaggcacccaactcacccaagcagcaacgagcaacaatcggaaaccaaatactggagagaaaaccaacgtttccacccacagaccctttctctggctgcgatgctgtttgaactctttttcacttcaaggcaaggggcgggatctccactgggggcttacgggagtgagcggttttcccaaaacaagcccttcctggctcccacccagacatggaccagccatgcacccgcccagccaccacgtcccccgcatgaatgtactgtacactttcaatcctccccttgtttggtttttgggggttggggaggggtttttgtttgtttgtttgttttcttaggcgggaactgcaaacagactcttttctgagactatttatccaatccactggtctgtgagtttttgaaatgcttgcacagcatggtctcagttgtatagattaatttaataactttttgaaattgcagagcttaactcgcctagtagatttgcaccaatggaaccgaagaacttcatagacactcacaaggttatatccatttctttgtatctatatcaacgtatacttttccgagactgtatacgtccatatagataggtagatatatatatatatatataaatatatatacatggatatataaagtttctttgccggcatgttgccttgtttccgcttaaattgctctattttaacttatttatgtcctaaaagaagaatgtaatttgtttacaaacctgtagataacgtctttggctatttgtatggtttaagaacactggtggctgagatgctataaaaacagctcggcccaacagacacttcccctgggttgcatcctggatgttttatgatagccatgctctgatttttgcctgctatttccgttcaataatgtcactaccgtgagaggctcaggcagaagccaaatgctaccgagttgccatcctgaggggtttaacaacatgctccgtagacgaagggagaggaggagagaaggcttcctgggtttgcaacactaacggccatccggcccaaggatgccaggatctgcaaagcactgctcgaagacttttctctcaatgaaactcgcttgagtttactaagagcatttcaaaaataggttctctttggcactgtctgtacagagattgaggtagtgttgaaatattataaatggtattgtgttgatttttttttttatttagtaacttacaggtttgtttccttattaatggcagcatctgagctgttggcatattggatgaggatcagtatggcttgctgcttttatttttatttttgaagaagaatagcctttttctctgcactatttagatccgaatgaaccttatgatgtgtatattgagatgtactcagtgtgattttaaaccaaattgtcttcctgtagtcacaatatatactgtagccttttaacagcaagtcttgctttcccaaacagaaagccattctgaaaccctacagtatcacaggtgagaaaaggtggttattttttccccaagacaacagcactagtaatcccacttaataagagcttatttaattggatgtcagcctcttaactgctaagcactttgtgggtctcagcgtttttcataaaagaacttttgtatttaatacaaagtttgctttgagacttttcagcatatgatcttttttccataaacttgtacagtgcaaaagacattttgaataccatgatcgatgatgtcccatgcttcgaggaaaaccaaacactttccgcctctcttgcaaaatccattcctcatgctgaccctcctcacgatggctgtgtcagcccagccccttcccttctccaggcccagagaactcttccacaaacaagatgagagccactcgggaaaagagccatagtcaactgggagggcctacatctggatggcggtggaaaaacttgagggtttggggttcaaagtcagcccatcccacctggcaaaatcctcctggaaggaggaccttcaagagcgcatcacctgaatgtcgtgaagaagtatctctgaatgtatccaggagaggaactgcataaccaaaggggtgaccagccctcagatgtgcttattggattccagtacaaacgccaccaaagccagcccactgctctcctacaaggaaggaaagatctgcacgtgtaaaacatggggcagccttggaacatggtgttttttggagtttcctttctcacagttttccatctccccacttctttgatcagtcatgtgtccgtgacctcgttccatgacatcaggatagctgtgtttgcacaccatgctccatgttcattcggagccaggaggggttctcagtggagcctggcttagggaacagggagcgatggaagaatgccaacattagcgttggtcttctcttgtcaggaatgaaggatgcttgcacacatgcaccccctcactctcacacttgcacacatacacacacacacacacgaaatggttggtttgtcaaaactcactgtagtacataaagcttgcactctgcgtcctatatctagcagcatggggtacgtttggcagttcactccattagggggtaaataatttatgaccattcatctgtttttatgaatttttttatctagacaataatgtaaataaagaactcaccatctctgttcatttaatactatgcaatggttatgctttcaatcgctggctcttctgactcgtgcagtgtggttctgaaatgtttgtggtttaaaaaaaaaagcaaaaaacaacatcaaacagaacatagtaaatatatctgtaatgtatacttttttctactttgggactgcatcatccacatagcttcttttctgtcctctagacaagggctccaggagtaagtggcagatttggttctgagagctaagctcaccaacttgtctccccctcaacagatgagggaagggcagggagcccgttcagtgactcctggcgctgcagaatcactcatctttggaggtgagcagagagagctctgaggagtttccttcttgcaactcaggcggagctttctttaactcaggagcagcctccattgctcccgccaacccctcaccatggccccttgtccccttgtcccaaccatagcatagagatgacaagagagaggcagtcctatttctgagactggaccaattaaaatgactgcactggctcaaaggactctgaacctgtcttgtcctgggtcctccagttgttggaagccactcttttccccaaccatgctgaaatgccacctttaccacacactgatgtcttacatagacttagatctatttctggaacttctcttctcttcgcttacttgggtgtctcatctggcaccagccatacaattttaactattgtcaatttctaatgtcttattatgtggtgggatgagtcccttcactcttcttttacaaaatttcctagttattctctcacatctattcttccacataaactttaaattgtgcccagtcctccaccccctgtcccattcccacccccaaattctgggctctgtcattccctgtgccatcatcttccccccattgtaattactgtccactcagggctgtgaaatagactatgttctgtaaagagggacaaaaagggcatcctgatcttgagagaagcctgctgttcctcccatcatttcacctgccccctaagcccaggagttgtcatgagaggtcaccaggcccccactcaatctcagcttgggaaccaaagtcacccaccttggttgtgttggggtggacccgccatctgtccctggtccagacgagaaagaggagtctctcctaggcctggagctgggaaagaatgtgtggcccagttgtctgcacttctaattctcatcatggagaaacctttattcctatctccctttcctgaactggttttttgttgtttttgtttcattttgttttggggggatagtttcttgctctttaatttggagtctccagtacctttgggatgcaggcagttcttgcctgggccttctcggaaccctcactcccctagcccactcttgcgctacctgcaggaggctgccaacctggtgcattctgacaagcctcccacccaaatctctctcctgccattgtgtccaaaatcccaccattagaggctcttgtagggaagagcgtttcttgaaggcttttaggccttccagagccaggagggaagtcagacaatagcaggaagtccccaggccttttcaaagttccaaaccaagctctcctgattttaatgtagagatcataccaacccaggtgggggaggagggtccccagccccaggcagcagccatcaccccctccactgaaaacaatattggaggctgctttgggactgcccttctcagccccctaagtctgttttgtaatgcctgtggtgctctccctcctggacctttcctctcgggggtcaccacactttgctaactcttgtgtgcacatattttataatagagtagcgagggaatggtgccgcctccagcttccgtaagctgcccgggctctggggggctctgggacaatcggggctgggaagtgactgtgctcttattgtacactctttatttctctgtatctttggcttgtgctctttgtaattaatgggatttgtctgccttttcaacactatactgagcaataacaataaatgcacacgtggaaatgca

SEQ ID NO: 2727 - DNA, 8593 bp, Homo sapiens
  source 1..8593: mol_type = unassigned DNA
agccatcacccggcagcctcttgtccagcgctgacccttgggcccagcccgagcaaggaccgcagcaaacatgggtgacatgaccaacagcgacttttactccaaaaaccaaagaaatgagtcgagccatgggggcgagttcgggtgcacaatggaggagctccgctccctcatggagctgcggggcactgaggctgtggtcaagatcaaggagacttatggggacaccgaagccatctgccggcgcctcaaaacctcacctgttgaaggtttgccgggcaccgctccagacctggaaaagagaaagcaaatttttgggcaaaactttatacctccaaagaagccaaaaaccttcctgcagctcgtgtgggaggcgctgcaggacgtgacgctcatcatcctggagattgccgccatcatctccctggggctgtccttctaccacccgcccggcgagggcaacgaaggatgtgcgacggcccagggtggggcagaggatgaaggagaggcagaggcaggttggatcgagggggccgccattctcctctcagttatctgtgtggtcctggtcacggccttcaatgactggagcaaagagaaacagttccggggcctgcagagccgcatcgagcaggaacagaaatttaccgtggtccgggctggccaggtggtccagatccctgtggctgagatcgtggttggggacatagcccaggtcaaatatggtgacctcctccctgccgacggcctcttcatccagggcaatgacctcaagattgatgaaagctccctaactggagagtctgaccaggtgcgcaagtccgtggacaaggaccccatgctgctgtcaggaacccacgtgatggagggctcaggacggatgttggtgactgctgtgggtgtgaactctcagactggcatcatctttaccctcctgggggctggtggtgaagaggaagagaagaaagacaaaaaaggtgtgaagaagggggatggccttcagctaccagcagcagacggtgcggcagcttcaaatgctgcagatagtgcgaatgccagcctagtcaatggtaaaatgcaggatggcaatgtggacgccagccagagcaaagccaaacaacaggacggggcagccgccatggagatgcagcccctcaagagtgccgagggcggcgacgctgacgacaggaagaaggccagcatgcacaagaaggagaagtccgtgctgcagggcaagctcaccaagctggctgtgcagatcgggaaggcgggcttggtgatgtcagccatcacggtgatcatcctggtgctctacttcactgtggacaccttcgtggtcaacaagaagccgtggctgcctgagtgcacgcccgtctacgtgcagtactttgtcaagttcttcatcattggcgtgacggtgctggtggtcgccgtgcccgaggggctccctctggccgtcaccatctcgttggcctattcggtgaagaaaatgatgaaggacaacaacctggtacgccacctggatgcctgtgagaccatgggcaatgccacagccatctgctcagacaagacaggcacgctgaccaccaatcgcatgacagtggtacaggcctatgtcggcgacgtccactataaagagatccccgaccccagctccatcaacaccaagaccatggagctgctgatcaatgccatcgccatcaacagcgcctacaccaccaagattctgcccccagagaaggagggcgccctgcctcggcaggtgggcaacaagacggagtgcggcctgctgggcttcgtgctggacctgaagcaggactacgagcccgtgcgcagccagatgccagaggagaagttgtacaaagtgtacaccttcaactccgtgcgcaagtccatgagcactgtcatcaagctgcccgacgagagcttccgcatgtacagcaagggggcttctgagatcgtgctcaagaagtgctgcaaaatcctcaatggggcgggagagcctcgtgtcttccggccccgcgaccgggacgagatggtaaagaaggtgattgagcccatggcttgcgatgggctccgcactatctgcgtggcctaccgcgacttccccagcagcccggagccggactgggacaatgagaatgacatcctcaacgaactcacctgcatctgcgtggtgggcatcgaggacccggtgcggccagaggtcccagaagccatccgcaagtgccagcgggcaggcatcacggtccgcatggtcactggcgacaatatcaacacggctcgggccatcgccatcaagtgtggcatcatccatcctggggaggactttctgtgcctcgagggcaaggagttcaacaggaggatccgcaacgagaagggggagattgagcaggagcgaattgacaagatctggccaaagctgcgggtgctggctcgctcctccccaacggacaagcataccctggttaaaggcatcatcgacagcacacacactgagcagcggcaggtggtggccgtgacgggggacgggaccaacgacgggcctgcactcaagaaggccgacgtgggcttcgccatgggcatcgcaggcactgacgtggccaaggaggcctcagacatcatcctgacagacgacaatttcagcagcatcgtcaaggcagtgatgtggggccgcaacgtctatgacagcatctccaaattcttgcagttccagctcaccgtcaacgtggtggccgtgattgtggccttcacaggcgcctgcatcacgcaggactcccctctgaaggccgtgcagatgctctgggtgaacctcatcatggacacgtttgcctcgctggcactggccactgagccgcccacggagaccctgctgctgaggaagccgtacggccgcaacaagccgctcatctccaggaccatgatgaagaacatcctgggccatgctgtctaccagcttgccctcatcttcaccctgctctttgttggcgagaagatgttccagatcgacagcgggaggaacgcgcccctgcattcgccaccctcagaacattacaccatcatcttcaacaccttcgtcatgatgcagctcttcaacgagatcaacgcccgcaagatccacggcgagcgcaatgtctttgacggcatcttccggaaccccatcttctgcaccatcgtgctgggcacctttgccatccagatagtgatcgtgcagtttggagggaagccattcagctgctctccactgcagctggaccagtggatgtggtgcatattcattgggttaggagagctcgtttggggccaggtcatcgccaccatcccgaccagcagactcaagttcctcaaggaggcaggcaggctcacacagaaggaggagatcccggaggaggagctcaacgaggacgtggaggagatcgaccacgcggagcgggagctgcggcggggccagatcctgtggttccgaggcctgaatcggatccagacacagatccgcgtcgtgaaggcgttccgtagctctctctatgaaggtttagaaaagcctgaatctcgaacctccatccataacttcatggctcatcctgaattccggatcgaagattcccagccccacatccccctcattgatgacaccgacctggaagaagatgccgcgctcaagcagaactcgagcccgccgtcatccctcaacaagaacaacagcgccatcgacagtgggatcaacctgacgaccgacacaagcaaatcagctacctcttcaagtccagggagccccatccacagcctggagacgtcgctttagctgaggaccctctcgcctgcccgcccgccctcatggaccccgctgccacccgctttccgggcacccatccatccaggcacccaactcacccaagcagcaacgagcaacaatcggaaaccaaatactggagagaaaaccaacgtttccacccacagaccctttctctggctgcgatgctgtttgaactctttttcacttcaaggcaaggggcgggatctccactgggggcttacgggagtgagcggttttcccaaaacaagcccttcctggctcccacccagacatggaccagccatgcacccgcccagccaccacgtcccccgcatgaatgtactgtacactttcaatcctccccttgtttggtttttgggggttggggaggggtttttgtttgtttgtttgttttcttaggcgggaactgcaaacagactcttttctgagactatttatccaatccactggtctgtgagtttttgaaatgcttgcacagcatggtctcagttgtatagattaatttaataactttttgaaattgcagagcttaactcgcctagtagatttgcaccaatggaaccgaagaacttcatagacactcacaaggttatatccatttctttgtatctatatcaacgtatacttttccgagactgtatacgtccatatagataggtagatatatatatatatatataaatatatatacatggatatataaagtttctttgccggcatgttgccttgtttccgcttaaattgctctattttaacttatttatgtcctaaaagaagaatgtaatttgtttacaaacctgtagataacgtctttggctatttgtatggtttaagaacactggtggctgagatgctataaaaacagctcggcccaacagacacttcccctgggttgcatcctggatgttttatgatagccatgctctgatttttgcctgctatttccgttcaataatgtcactaccgtgagaggctcaggcagaagccaaatgctaccgagttgccatcctgaggggtttaacaacatgctccgtagacgaagggagaggaggagagaaggcttcctgggtttgcaacactaacggccatccggcccaaggatgccaggatctgcaaagcactgctcgaagacttttctctcaatgaaactcgcttgagtttactaagagcatttcaaaaataggttctctttggcactgtctgtacagagattgaggtagtgttgaaatattataaatggtattgtgttgatttttttttttatttagtaacttacaggtttgtttccttattaatggcagcatctgagctgttggcatattggatgaggatcagtatggcttgctgcttttatttttatttttgaagaagaatagcctttttctctgcactatttagatccgaatgaaccttatgatgtgtatattgagatgtactcagtgtgattttaaaccaaattgtcttcctgtagtcacaatatatactgtagccttttaacagcaagtcttgctttcccaaacagaaagccattctgaaaccctacagtatcacaggtgagaaaaggtggttattttttccccaagacaacagcactagtaatcccacttaataagagcttatttaattggatgtcagcctcttaactgctaagcactttgtgggtctcagcgtttttcataaaagaacttttgtatttaatacaaagtttgctttgagacttttcagcatatgatcttttttccataaacttgtacagtgcaaaagacattttgaataccatgatcgatgatgtcccatgcttcgaggaaaaccaaacactttccgcctctcttgcaaaatccattcctcatgctgaccctcctcacgatggctgtgtcagcccagccccttcccttctccaggcccagagaactcttccacaaacaagatgagagccactcgggaaaagagccatagtcaactgggagggcctacatctggatggcggtggaaaaacttgagggtttggggttcaaagtcagcccatcccacctggcaaaatcctcctggaaggaggaccttcaagagcgcatcacctgaatgtcgtgaagaagtatctctgaatgtatccaggagaggaactgcataaccaaaggggtgaccagccctcagatgtgcttattggattccagtacaaacgccaccaaagccagcccactgctctcctacaaggaaggaaagatctgcacgtgtaaaacatggggcagccttggaacatggtgttttttggagtttcctttctcacagttttccatctccccacttctttgatcagtcatgtgtccgtgacctcgttccatgacatcaggatagctgtgtttgcacaccatgctccatgttcattcggagccaggaggggttctcagtggagcctggcttagggaacagggagcgatggaagaatgccaacattagcgttggtcttctcttgtcaggaatgaaggatgcttgcacacatgcaccccctcactctcacacttgcacacatacacacacacacacacgaaatggttggtttgtcaaaactcactgtagtacataaagcttgcactctgcgtcctatatctagcagcatggggtacgtttggcagttcactccattagggggtaaataatttatgaccattcatctgtttttatgaatttttttatctagacaataatgtaaataaagaactcaccatctctgttcatttaatactatgcaatggttatgctttcaatcgctggctcttctgactcgtgcagtgtggttctgaaatgtttgtggtttaaaaaaaaaagcaaaaaacaacatcaaacagaacatagtaaatatatctgtaatgtatacttttttctactttgggactgcatcatccacatagcttcttttctgtcctctagacaagggctccaggagtaagtggcagatttggttctgagagctaagctcaccaacttgtctccccctcaacagatgagggaagggcagggagcccgttcagtgactcctggcgctgcagaatcactcatctttggaggtgagcagagagagctctgaggagtttccttcttgcaactcaggcggagctttctttaactcaggagcagcctccattgctcccgccaacccctcaccatggccccttgtccccttgtcccaaccatagcatagagatgacaagagagaggcagtcctatttctgagactggaccaattaaaatgactgcactggctcaaaggactctgaacctgtcttgtcctgggtcctccagttgttggaagccactcttttccccaaccatgctgaaatgccacctttaccacacactgatgtcttacatagacttagatctatttctggaacttctcttctcttcgcttacttgggtgtctcatctggcaccagccatacaattttaactattgtcaatttctaatgtcttattatgtggtgggatgagtcccttcactcttcttttacaaaatttcctagttattctctcacatctattcttccacataaactttaaattgtgcccagtcctccaccccctgtcccattcccacccccaaattctgggctctgtcattccctgtgccatcatcttccccccattgtaattactgtccactcagggctgtgaaatagactatgttctgtaaagagggacaaaaagggcatcctgatcttgagagaagcctgctgttcctcccatcatttcacctgccccctaagcccaggagttgtcatgagaggtcaccaggcccccactcaatctcagcttgggaaccaaagtcacccaccttggttgtgttggggtggacccgccatctgtccctggtccagacgagaaagaggagtctctcctaggcctggagctgggaaagaatgtgtggcccagttgtctgcacttctaattctcatcatggagaaacctttattcctatctccctttcctgaactggttttttgttgtttttgtttcattttgttttggggggatagtttcttgctctttaatttggagtctccagtacctttgggatgcaggcagttcttgcctgggccttctcggaaccctcactcccctagcccactcttgcgctacctgcaggaggctgccaacctggtgcattctgacaagcctcccacccaaatctctctcctgccattgtgtccaaaatcccaccattagaggctcttgtagggaagagcgtttcttgaaggcttttaggccttccagagccaggagggaagtcagacaatagcaggaagtccccaggccttttcaaagttccaaaccaagctctcctgattttaatgtagagatcataccaacccaggtgggggaggagggtccccagccccaggcagcagccatcaccccctccactgaaaacaatattggaggctgctttgggactgcccttctcagccccctaagtctgttttgtaatgcctgtggtgctctccctcctggacctttcctctcgggggtcaccacactttgctaactcttgtgtgcacatattttataatagagtagcgagggaatggtgccgcctccagcttccgtaagctgcccgggctctggggggctctgggacaatcggggctgggaagtgactgtgctcttattgtacactctttatttctctgtatctttggcttgtgctctttgtaattaatgggatttgtctgccttttcaacactatactgagcaataacaataaatgcacacgtggaaatgca

SEQ ID NO: 2728 - DNA, 8962 bp, Homo sapiens
  source 1..8962: mol_type = unassigned DNA
agtctgcagaggggcccgggcacgctggctgggctcagccgcggcaccagctgccgcaccgcgattacggggctgcccgccgggaaaccgtgcaggattggtggtgattttcatagccaagagccaccacccctgaccatgtagatgccagttccagggagcagcatgggccccactgaatggagactcctgggtctacagccctgagcccctccggcccctggacctcgtcccacaccggaggacacctcttggagctcaccaccactgtcaccagcccgcctcggccacccccaccccccgggacccggagtcggccgcctggtgccacagctgaccagtgagggtgtgctgaggacagccacaagcagccatcacccggcagcctcttgtccagcgctgacccttgggcccagcccgagcaaggaccgcagcaaacatgggtgacatgaccaacagcgacttttactccaaaaaccaaagaaatgagtcgagccatgggggcgagttcgggtgcacaatggaggagctccgctccctcatggagctgcggggcactgaggctgtggtcaagatcaaggagacttatggggacaccgaagccatctgccggcgcctcaaaacctcacctgttgaaggtttgccgggcaccgctccagacctggaaaagagaaagcaaatttttgggcaaaactttatacctccaaagaagccaaaaaccttcctgcagctcgtgtgggaggcgctgcaggacgtgacgctcatcatcctggagattgccgccatcatctccctggggctgtccttctaccacccgcccggcgagggcaacgaaggatgtgcgacggcccagggtggggcagaggatgaaggagaggcagaggcaggttggatcgagggggccgccattctcctctcagttatctgtgtggtcctggtcacggccttcaatgactggagcaaagagaaacagttccggggcctgcagagccgcatcgagcaggaacagaaatttaccgtggtccgggctggccaggtggtccagatccctgtggctgagatcgtggttggggacatagcccaggtcaaatatggtgacctcctccctgccgacggcctcttcatccagggcaatgacctcaagattgatgaaagctccctaactggagagtctgaccaggtgcgcaagtccgtggacaaggaccccatgctgctgtcaggaacccacgtgatggagggctcaggacggatgttggtgactgctgtgggtgtgaactctcagactggcatcatctttaccctcctgggggctggtggtgaagaggaagagaagaaagacaaaaaaggtgtgaagaagggggatggccttcagctaccagcagcagacggtgcggcagcttcaaatgctgcagatagtgcgaatgccagcctagtcaatggtaaaatgcaggatggcaatgtggacgccagccagagcaaagccaaacaacaggacggggcagccgccatggagatgcagcccctcaagagtgccgagggcggcgacgctgacgacaggaagaaggccagcatgcacaagaaggagaagtccgtgctgcagggcaagctcaccaagctggctgtgcagatcgggaaggcgggcttggtgatgtcagccatcacggtgatcatcctggtgctctacttcactgtggacaccttcgtggtcaacaagaagccgtggctgcctgagtgcacgcccgtctacgtgcagtactttgtcaagttcttcatcattggcgtgacggtgctggtggtcgccgtgcccgaggggctccctctggccgtcaccatctcgttggcctattcggtgaagaaaatgatgaaggacaacaacctggtacgccacctggatgcctgtgagaccatgggcaatgccacagccatctgctcagacaagacaggcacgctgaccaccaatcgcatgacagtggtacaggcctatgtcggcgacgtccactataaagagatccccgaccccagctccatcaacaccaagaccatggagctgctgatcaatgccatcgccatcaacagcgcctacaccaccaagattctgcccccagagaaggagggcgccctgcctcggcaggtgggcaacaagacggagtgcggcctgctgggcttcgtgctggacctgaagcaggactacgagcccgtgcgcagccagatgccagaggagaagttgtacaaagtgtacaccttcaactccgtgcgcaagtccatgagcactgtcatcaagctgcccgacgagagcttccgcatgtacagcaagggggcttctgagatcgtgctcaagaagtgctgcaaaatcctcaatggggcgggagagcctcgtgtcttccggccccgcgaccgggacgagatggtaaagaaggtgattgagcccatggcttgcgatgggctccgcactatctgcgtggcctaccgcgacttccccagcagcccggagccggactgggacaatgagaatgacatcctcaacgaactcacctgcatctgcgtggtgggcatcgaggacccggtgcggccagaggtcccagaagccatccgcaagtgccagcgggcaggcatcacggtccgcatggtcactggcgacaatatcaacacggctcgggccatcgccatcaagtgtggcatcatccatcctggggaggactttctgtgcctcgagggcaaggagttcaacaggaggatccgcaacgagaagggggagattgagcaggagcgaattgacaagatctggccaaagctgcgggtgctggctcgctcctccccaacggacaagcataccctggttaaaggcatcatcgacagcacacacactgagcagcggcaggtggtggccgtgacgggggacgggaccaacgacgggcctgcactcaagaaggccgacgtgggcttcgccatgggcatcgcaggcactgacgtggccaaggaggcctcagacatcatcctgacagacgacaatttcagcagcatcgtcaaggcagtgatgtggggccgcaacgtctatgacagcatctccaaattcttgcagttccagctcaccgtcaacgtggtggccgtgattgtggccttcacaggcgcctgcatcacgcaggactcccctctgaaggccgtgcagatgctctgggtgaacctcatcatggacacgtttgcctcgctggcactggccactgagccgcccacggagaccctgctgctgaggaagccgtacggccgcaacaagccgctcatctccaggaccatgatgaagaacatcctgggccatgctgtctaccagcttgccctcatcttcaccctgctctttgttggcgagaagatgttccagatcgacagcgggaggaacgcgcccctgcattcgccaccctcagaacattacaccatcatcttcaacaccttcgtcatgatgcagctcttcaacgagatcaacgcccgcaagatccacggcgagcgcaatgtctttgacggcatcttccggaaccccatcttctgcaccatcgtgctgggcacctttgccatccagatagtgatcgtgcagtttggagggaagccattcagctgctctccactgcagctggaccagtggatgtggtgcatattcattgggttaggagagctcgtttggggccaggtcatcgccaccatcccgaccagcagactcaagttcctcaaggaggcaggcaggctcacacagaaggaggagatcccggaggaggagctcaacgaggacgtggaggagatcgaccacgcggagcgggagctgcggcggggccagatcctgtggttccgaggcctgaatcggatccagacacagatccgcgtcgtgaaggcgttccgtagctctctctatgaaggtttagaaaagcctgaatctcgaacctccatccataacttcatggctcatcctgaattccggatcgaagattcccagccccacatccccctcattgatgacaccgacctggaagaagatgccgcgctcaagcagaactcgagcccgccgtcatccctcaacaagaacaacagcgccatcgacagtgggatcaacctgacgaccgacacaagcaaatcagctacctcttcaagtccagggagccccatccacagcctggagacgtcgctttagctgaggaccctctcgcctgcccgcccgccctcatggaccccgctgccacccgctttccgggcacccatccatccaggcacccaactcacccaagcagcaacgagcaacaatcggaaaccaaatactggagagaaaaccaacgtttccacccacagaccctttctctggctgcgatgctgtttgaactctttttcacttcaaggcaaggggcgggatctccactgggggcttacgggagtgagcggttttcccaaaacaagcccttcctggctcccacccagacatggaccagccatgcacccgcccagccaccacgtcccccgcatgaatgtactgtacactttcaatcctccccttgtttggtttttgggggttggggaggggtttttgtttgtttgtttgttttcttaggcgggaactgcaaacagactcttttctgagactatttatccaatccactggtctgtgagtttttgaaatgcttgcacagcatggtctcagttgtatagattaatttaataactttttgaaattgcagagcttaactcgcctagtagatttgcaccaatggaaccgaagaacttcatagacactcacaaggttatatccatttctttgtatctatatcaacgtatacttttccgagactgtatacgtccatatagataggtagatatatatatatatatataaatatatatacatggatatataaagtttctttgccggcatgttgccttgtttccgcttaaattgctctattttaacttatttatgtcctaaaagaagaatgtaatttgtttacaaacctgtagataacgtctttggctatttgtatggtttaagaacactggtggctgagatgctataaaaacagctcggcccaacagacacttcccctgggttgcatcctggatgttttatgatagccatgctctgatttttgcctgctatttccgttcaataatgtcactaccgtgagaggctcaggcagaagccaaatgctaccgagttgccatcctgaggggtttaacaacatgctccgtagacgaagggagaggaggagagaaggcttcctgggtttgcaacactaacggccatccggcccaaggatgccaggatctgcaaagcactgctcgaagacttttctctcaatgaaactcgcttgagtttactaagagcatttcaaaaataggttctctttggcactgtctgtacagagattgaggtagtgttgaaatattataaatggtattgtgttgatttttttttttatttagtaacttacaggtttgtttccttattaatggcagcatctgagctgttggcatattggatgaggatcagtatggcttgctgcttttatttttatttttgaagaagaatagcctttttctctgcactatttagatccgaatgaaccttatgatgtgtatattgagatgtactcagtgtgattttaaaccaaattgtcttcctgtagtcacaatatatactgtagccttttaacagcaagtcttgctttcccaaacagaaagccattctgaaaccctacagtatcacaggtgagaaaaggtggttattttttccccaagacaacagcactagtaatcccacttaataagagcttatttaattggatgtcagcctcttaactgctaagcactttgtgggtctcagcgtttttcataaaagaacttttgtatttaatacaaagtttgctttgagacttttcagcatatgatcttttttccataaacttgtacagtgcaaaagacattttgaataccatgatcgatgatgtcccatgcttcgaggaaaaccaaacactttccgcctctcttgcaaaatccattcctcatgctgaccctcctcacgatggctgtgtcagcccagccccttcccttctccaggcccagagaactcttccacaaacaagatgagagccactcgggaaaagagccatagtcaactgggagggcctacatctggatggcggtggaaaaacttgagggtttggggttcaaagtcagcccatcccacctggcaaaatcctcctggaaggaggaccttcaagagcgcatcacctgaatgtcgtgaagaagtatctctgaatgtatccaggagaggaactgcataaccaaaggggtgaccagccctcagatgtgcttattggattccagtacaaacgccaccaaagccagcccactgctctcctacaaggaaggaaagatctgcacgtgtaaaacatggggcagccttggaacatggtgttttttggagtttcctttctcacagttttccatctccccacttctttgatcagtcatgtgtccgtgacctcgttccatgacatcaggatagctgtgtttgcacaccatgctccatgttcattcggagccaggaggggttctcagtggagcctggcttagggaacagggagcgatggaagaatgccaacattagcgttggtcttctcttgtcaggaatgaaggatgcttgcacacatgcaccccctcactctcacacttgcacacatacacacacacacacacgaaatggttggtttgtcaaaactcactgtagtacataaagcttgcactctgcgtcctatatctagcagcatggggtacgtttggcagttcactccattagggggtaaataatttatgaccattcatctgtttttatgaatttttttatctagacaataatgtaaataaagaactcaccatctctgttcatttaatactatgcaatggttatgctttcaatcgctggctcttctgactcgtgcagtgtggttctgaaatgtttgtggtttaaaaaaaaaagcaaaaaacaacatcaaacagaacatagtaaatatatctgtaatgtatacttttttctactttgggactgcatcatccacatagcttcttttctgtcctctagacaagggctccaggagtaagtggcagatttggttctgagagctaagctcaccaacttgtctccccctcaacagatgagggaagggcagggagcccgttcagtgactcctggcgctgcagaatcactcatctttggaggtgagcagagagagctctgaggagtttccttcttgcaactcaggcggagctttctttaactcaggagcagcctccattgctcccgccaacccctcaccatggccccttgtccccttgtcccaaccatagcatagagatgacaagagagaggcagtcctatttctgagactggaccaattaaaatgactgcactggctcaaaggactctgaacctgtcttgtcctgggtcctccagttgttggaagccactcttttccccaaccatgctgaaatgccacctttaccacacactgatgtcttacatagacttagatctatttctggaacttctcttctcttcgcttacttgggtgtctcatctggcaccagccatacaattttaactattgtcaatttctaatgtcttattatgtggtgggatgagtcccttcactcttcttttacaaaatttcctagttattctctcacatctattcttccacataaactttaaattgtgcccagtcctccaccccctgtcccattcccacccccaaattctgggctctgtcattccctgtgccatcatcttccccccattgtaattactgtccactcagggctgtgaaatagactatgttctgtaaagagggacaaaaagggcatcctgatcttgagagaagcctgctgttcctcccatcatttcacctgccccctaagcccaggagttgtcatgagaggtcaccaggcccccactcaatctcagcttgggaaccaaagtcacccaccttggttgtgttggggtggacccgccatctgtccctggtccagacgagaaagaggagtctctcctaggcctggagctgggaaagaatgtgtggcccagttgtctgcacttctaattctcatcatggagaaacctttattcctatctccctttcctgaactggttttttgttgtttttgtttcattttgttttggggggatagtttcttgctctttaatttggagtctccagtacctttgggatgcaggcagttcttgcctgggccttctcggaaccctcactcccctagcccactcttgcgctacctgcaggaggctgccaacctggtgcattctgacaagcctcccacccaaatctctctcctgccattgtgtccaaaatcccaccattagaggctcttgtagggaagagcgtttcttgaaggcttttaggccttccagagccaggagggaagtcagacaatagcaggaagtccccaggccttttcaaagttccaaaccaagctctcctgattttaatgtagagatcataccaacccaggtgggggaggagggtccccagccccaggcagcagccatcaccccctccactgaaaacaatattggaggctgctttgggactgcccttctcagccccctaagtctgttttgtaatgcctgtggtgctctccctcctggacctttcctctcgggggtcaccacactttgctaactcttgtgtgcacatattttataatagagtagcgagggaatggtgccgcctccagcttccgtaagctgcccgggctctggggggctctgggacaatcggggctgggaagtgactgtgctcttattgtacactctttatttctctgtatctttggcttgtgctctttgtaattaatgggatttgtctgccttttcaacactatactgagcaataacaataaatgcacacgtggaaatgca

SEQ ID NO: 2729 - DNA, 8900 bp, Homo sapiens
  source 1..8900: mol_type = unassigned DNA
ggcgagatgctctcctagaaccggcgccggcgcctccgccccccgccccccacccgctcgggcaggatggtacagtctgcagaggggcccgggcacgctggctgggctcagccgcggcaccagctgccgcaccgcgattacggggctgcccgccgggaaaccgtgcaggattggtggtgattttcatagccaagagccaccacccctgaccatgtagatgccagttccagggagcagcatgggccccactgaatggagactcctgggtctacagccctgagcccctccggcccctggacctcgtcccacaccggaggacacctcttggagctcaccaccactgtcaccagcccgcctcggccacccccaccccccgggacccggagtcggccgcctggtgccacagctgaccagtgagggtgtgctgaggacagccacaagcagccatcacccggcagcctcttgtccagcgctgacccttgggcccagcccgagcaaggaccgcagcaaacatgggtgacatgaccaacagcgacttttactccaaaaaccaaagaaatgagtcgagccatgggggcgagttcgggtgcacaatggaggagctccgctccctcatggagctgcggggcactgaggctgtggtcaagatcaaggagacttatggggacaccgaagccatctgccggcgcctcaaaacctcacctgttgaaggtttgccgggcaccgctccagacctggaaaagagaaagcaaatttttgggcaaaactttatacctccaaagaagccaaaaaccttcctgcagctcgtgtgggaggcgctgcaggacgtgacgctcatcatcctggagattgccgccatcatctccctggggctgtccttctaccacccgcccggcgagggcaacgaaggatgtgcgacggcccagggtggggcagaggatgaaggagaggcagaggcaggttggatcgagggggccgccattctcctctcagttatctgtgtggtcctggtcacggccttcaatgactggagcaaagagaaacagttccggggcctgcagagccgcatcgagcaggaacagaaatttaccgtggtccgggctggccaggtggtccagatccctgtggctgagatcgtggttggggacatagcccaggtcaaatatggtgacctcctccctgccgacggcctcttcatccagggcaatgacctcaagattgatgaaagctccctaactggagagtctgaccaggtgcgcaagtccgtggacaaggaccccatgctgctgtcaggaacccacgtgatggagggctcaggacggatgttggtgactgctgtgggtgtgaactctcagactggcatcatctttaccctcctgggggctggtggtgaagaggaagagaagaaagacaaaaaagccaaacaacaggacggggcagccgccatggagatgcagcccctcaagagtgccgagggcggcgacgctgacgacaggaagaaggccagcatgcacaagaaggagaagtccgtgctgcagggcaagctcaccaagctggctgtgcagatcgggaaggcgggcttggtgatgtcagccatcacggtgatcatcctggtgctctacttcactgtggacaccttcgtggtcaacaagaagccgtggctgcctgagtgcacgcccgtctacgtgcagtactttgtcaagttcttcatcattggcgtgacggtgctggtggtcgccgtgcccgaggggctccctctggccgtcaccatctcgttggcctattcggtgaagaaaatgatgaaggacaacaacctggtacgccacctggatgcctgtgagaccatgggcaatgccacagccatctgctcagacaagacaggcacgctgaccaccaatcgcatgacagtggtacaggcctatgtcggcgacgtccactataaagagatccccgaccccagctccatcaacaccaagaccatggagctgctgatcaatgccatcgccatcaacagcgcctacaccaccaagattctgcccccagagaaggagggcgccctgcctcggcaggtgggcaacaagacggagtgcggcctgctgggcttcgtgctggacctgaagcaggactacgagcccgtgcgcagccagatgccagaggagaagttgtacaaagtgtacaccttcaactccgtgcgcaagtccatgagcactgtcatcaagctgcccgacgagagcttccgcatgtacagcaagggggcttctgagatcgtgctcaagaagtgctgcaaaatcctcaatggggcgggagagcctcgtgtcttccggccccgcgaccgggacgagatggtaaagaaggtgattgagcccatggcttgcgatgggctccgcactatctgcgtggcctaccgcgacttccccagcagcccggagccggactgggacaatgagaatgacatcctcaacgaactcacctgcatctgcgtggtgggcatcgaggacccggtgcggccagaggtcccagaagccatccgcaagtgccagcgggcaggcatcacggtccgcatggtcactggcgacaatatcaacacggctcgggccatcgccatcaagtgtggcatcatccatcctggggaggactttctgtgcctcgagggcaaggagttcaacaggaggatccgcaacgagaagggggagattgagcaggagcgaattgacaagatctggccaaagctgcgggtgctggctcgctcctccccaacggacaagcataccctggttaaaggcatcatcgacagcacacacactgagcagcggcaggtggtggccgtgacgggggacgggaccaacgacgggcctgcactcaagaaggccgacgtgggcttcgccatgggcatcgcaggcactgacgtggccaaggaggcctcagacatcatcctgacagacgacaatttcagcagcatcgtcaaggcagtgatgtggggccgcaacgtctatgacagcatctccaaattcttgcagttccagctcaccgtcaacgtggtggccgtgattgtggccttcacaggcgcctgcatcacgcaggactcccctctgaaggccgtgcagatgctctgggtgaacctcatcatggacacgtttgcctcgctggcactggccactgagccgcccacggagaccctgctgctgaggaagccgtacggccgcaacaagccgctcatctccaggaccatgatgaagaacatcctgggccatgctgtctaccagcttgccctcatcttcaccctgctctttgttggcgagaagatgttccagatcgacagcgggaggaacgcgcccctgcattcgccaccctcagaacattacaccatcatcttcaacaccttcgtcatgatgcagctcttcaacgagatcaacgcccgcaagatccacggcgagcgcaatgtctttgacggcatcttccggaaccccatcttctgcaccatcgtgctgggcacctttgccatccagatagtgatcgtgcagtttggagggaagccattcagctgctctccactgcagctggaccagtggatgtggtgcatattcattgggttaggagagctcgtttggggccaggtcatcgccaccatcccgaccagcagactcaagttcctcaaggaggcaggcaggctcacacagaaggaggagatcccggaggaggagctcaacgaggacgtggaggagatcgaccacgcggagcgggagctgcggcggggccagatcctgtggttccgaggcctgaatcggatccagacacagatccgcgtcgtgaaggcgttccgtagctctctctatgaaggtttagaaaagcctgaatctcgaacctccatccataacttcatggctcatcctgaattccggatcgaagattcccagccccacatccccctcattgatgacaccgacctggaagaagatgccgcgctcaagcagaactcgagcccgccgtcatccctcaacaagaacaacagcgccatcgacagtgggatcaacctgacgaccgacacaagcaaatcagctacctcttcaagtccagggagccccatccacagcctggagacgtcgctttagctgaggaccctctcgcctgcccgcccgccctcatggaccccgctgccacccgctttccgggcacccatccatccaggcacccaactcacccaagcagcaacgagcaacaatcggaaaccaaatactggagagaaaaccaacgtttccacccacagaccctttctctggctgcgatgctgtttgaactctttttcacttcaaggcaaggggcgggatctccactgggggcttacgggagtgagcggttttcccaaaacaagcccttcctggctcccacccagacatggaccagccatgcacccgcccagccaccacgtcccccgcatgaatgtactgtacactttcaatcctccccttgtttggtttttgggggttggggaggggtttttgtttgtttgtttgttttcttaggcgggaactgcaaacagactcttttctgagactatttatccaatccactggtctgtgagtttttgaaatgcttgcacagcatggtctcagttgtatagattaatttaataactttttgaaattgcagagcttaactcgcctagtagatttgcaccaatggaaccgaagaacttcatagacactcacaaggttatatccatttctttgtatctatatcaacgtatacttttccgagactgtatacgtccatatagataggtagatatatatatatatatataaatatatatacatggatatataaagtttctttgccggcatgttgccttgtttccgcttaaattgctctattttaacttatttatgtcctaaaagaagaatgtaatttgtttacaaacctgtagataacgtctttggctatttgtatggtttaagaacactggtggctgagatgctataaaaacagctcggcccaacagacacttcccctgggttgcatcctggatgttttatgatagccatgctctgatttttgcctgctatttccgttcaataatgtcactaccgtgagaggctcaggcagaagccaaatgctaccgagttgccatcctgaggggtttaacaacatgctccgtagacgaagggagaggaggagagaaggcttcctgggtttgcaacactaacggccatccggcccaaggatgccaggatctgcaaagcactgctcgaagacttttctctcaatgaaactcgcttgagtttactaagagcatttcaaaaataggttctctttggcactgtctgtacagagattgaggtagtgttgaaatattataaatggtattgtgttgatttttttttttatttagtaacttacaggtttgtttccttattaatggcagcatctgagctgttggcatattggatgaggatcagtatggcttgctgcttttatttttatttttgaagaagaatagcctttttctctgcactatttagatccgaatgaaccttatgatgtgtatattgagatgtactcagtgtgattttaaaccaaattgtcttcctgtagtcacaatatatactgtagccttttaacagcaagtcttgctttcccaaacagaaagccattctgaaaccctacagtatcacaggtgagaaaaggtggttattttttccccaagacaacagcactagtaatcccacttaataagagcttatttaattggatgtcagcctcttaactgctaagcactttgtgggtctcagcgtttttcataaaagaacttttgtatttaatacaaagtttgctttgagacttttcagcatatgatcttttttccataaacttgtacagtgcaaaagacattttgaataccatgatcgatgatgtcccatgcttcgaggaaaaccaaacactttccgcctctcttgcaaaatccattcctcatgctgaccctcctcacgatggctgtgtcagcccagccccttcccttctccaggcccagagaactcttccacaaacaagatgagagccactcgggaaaagagccatagtcaactgggagggcctacatctggatggcggtggaaaaacttgagggtttggggttcaaagtcagcccatcccacctggcaaaatcctcctggaaggaggaccttcaagagcgcatcacctgaatgtcgtgaagaagtatctctgaatgtatccaggagaggaactgcataaccaaaggggtgaccagccctcagatgtgcttattggattccagtacaaacgccaccaaagccagcccactgctctcctacaaggaaggaaagatctgcacgtgtaaaacatggggcagccttggaacatggtgttttttggagtttcctttctcacagttttccatctccccacttctttgatcagtcatgtgtccgtgacctcgttccatgacatcaggatagctgtgtttgcacaccatgctccatgttcattcggagccaggaggggttctcagtggagcctggcttagggaacagggagcgatggaagaatgccaacattagcgttggtcttctcttgtcaggaatgaaggatgcttgcacacatgcaccccctcactctcacacttgcacacatacacacacacacacacgaaatggttggtttgtcaaaactcactgtagtacataaagcttgcactctgcgtcctatatctagcagcatggggtacgtttggcagttcactccattagggggtaaataatttatgaccattcatctgtttttatgaatttttttatctagacaataatgtaaataaagaactcaccatctctgttcatttaatactatgcaatggttatgctttcaatcgctggctcttctgactcgtgcagtgtggttctgaaatgtttgtggtttaaaaaaaaaagcaaaaaacaacatcaaacagaacatagtaaatatatctgtaatgtatacttttttctactttgggactgcatcatccacatagcttcttttctgtcctctagacaagggctccaggagtaagtggcagatttggttctgagagctaagctcaccaacttgtctccccctcaacagatgagggaagggcagggagcccgttcagtgactcctggcgctgcagaatcactcatctttggaggtgagcagagagagctctgaggagtttccttcttgcaactcaggcggagctttctttaactcaggagcagcctccattgctcccgccaacccctcaccatggccccttgtccccttgtcccaaccatagcatagagatgacaagagagaggcagtcctatttctgagactggaccaattaaaatgactgcactggctcaaaggactctgaacctgtcttgtcctgggtcctccagttgttggaagccactcttttccccaaccatgctgaaatgccacctttaccacacactgatgtcttacatagacttagatctatttctggaacttctcttctcttcgcttacttgggtgtctcatctggcaccagccatacaattttaactattgtcaatttctaatgtcttattatgtggtgggatgagtcccttcactcttcttttacaaaatttcctagttattctctcacatctattcttccacataaactttaaattgtgcccagtcctccaccccctgtcccattcccacccccaaattctgggctctgtcattccctgtgccatcatcttccccccattgtaattactgtccactcagggctgtgaaatagactatgttctgtaaagagggacaaaaagggcatcctgatcttgagagaagcctgctgttcctcccatcatttcacctgccccctaagcccaggagttgtcatgagaggtcaccaggcccccactcaatctcagcttgggaaccaaagtcacccaccttggttgtgttggggtggacccgccatctgtccctggtccagacgagaaagaggagtctctcctaggcctggagctgggaaagaatgtgtggcccagttgtctgcacttctaattctcatcatggagaaacctttattcctatctccctttcctgaactggttttttgttgtttttgtttcattttgttttggggggatagtttcttgctctttaatttggagtctccagtacctttgggatgcaggcagttcttgcctgggccttctcggaaccctcactcccctagcccactcttgcgctacctgcaggaggctgccaacctggtgcattctgacaagcctcccacccaaatctctctcctgccattgtgtccaaaatcccaccattagaggctcttgtagggaagagcgtttcttgaaggcttttaggccttccagagccaggagggaagtcagacaatagcaggaagtccccaggccttttcaaagttccaaaccaagctctcctgattttaatgtagagatcataccaacccaggtgggggaggagggtccccagccccaggcagcagccatcaccccctccactgaaaacaatattggaggctgctttgggactgcccttctcagccccctaagtctgttttgtaatgcctgtggtgctctccctcctggacctttcctctcgggggtcaccacactttgctaactcttgtgtgcacatattttataatagagtagcgagggaatggtgccgcctccagcttccgtaagctgcccgggctctggggggctctgggacaatcggggctgggaagtgactgtgctcttattgtacactctttatttctctgtatctttggcttgtgctctttgtaattaatgggatttgtctgccttttcaacactatactgagcaataacaataaatgcacacgtggaaatgca

SEQ ID NO: 2730 - DNA, 8964 bp, Homo sapiens
  source 1..8964: mol_type = unassigned DNA
gggcagccgcggcagaggagccgcagccgcagcggggccgggccgggccgggcgcgcaccagcggcagcggcggcggcagcggcggcggcagcatctcgctctcggagccggcgcaggtttccctgtacttagagcgtggactgtgaacccccaagcagacgagctgaacttcgtcacccagtccctagagccagcaagacatgggccccagtttccagaccctgacacctctcatttaaccagaagacgtggaggggagccaccacccctgaccatgtagatgccagttccagggagcagcatgggccccactgaatggagactcctgggtctacagccctgagcccctccggcccctggacctcgtcccacaccggaggacacctcttggagctcaccaccactgtcaccagcccgcctcggccacccccaccccccgggacccggagtcggccgcctggtgccacagctgaccagtgagggtgtgctgaggacagccacaagcagccatcacccggcagcctcttgtccagcgctgacccttgggcccagcccgagcaaggaccgcagcaaacatgggtgacatgaccaacagcgacttttactccaaaaaccaaagaaatgagtcgagccatgggggcgagttcgggtgcacaatggaggagctccgctccctcatggagctgcggggcactgaggctgtggtcaagatcaaggagacttatggggacaccgaagccatctgccggcgcctcaaaacctcacctgttgaaggtttgccgggcaccgctccagacctggaaaagagaaagcaaatttttgggcaaaactttatacctccaaagaagccaaaaaccttcctgcagctcgtgtgggaggcgctgcaggacgtgacgctcatcatcctggagattgccgccatcatctccctggggctgtccttctaccacccgcccggcgagggcaacgaaggatgtgcgacggcccagggtggggcagaggatgaaggagaggcagaggcaggttggatcgagggggccgccattctcctctcagttatctgtgtggtcctggtcacggccttcaatgactggagcaaagagaaacagttccggggcctgcagagccgcatcgagcaggaacagaaatttaccgtggtccgggctggccaggtggtccagatccctgtggctgagatcgtggttggggacatagcccaggtcaaatatggtgacctcctccctgccgacggcctcttcatccagggcaatgacctcaagattgatgaaagctccctaactggagagtctgaccaggtgcgcaagtccgtggacaaggaccccatgctgctgtcaggaacccacgtgatggagggctcaggacggatgttggtgactgctgtgggtgtgaactctcagactggcatcatctttaccctcctgggggctggtggtgaagaggaagagaagaaagacaaaaaagccaaacaacaggacggggcagccgccatggagatgcagcccctcaagagtgccgagggcggcgacgctgacgacaggaagaaggccagcatgcacaagaaggagaagtccgtgctgcagggcaagctcaccaagctggctgtgcagatcgggaaggcgggcttggtgatgtcagccatcacggtgatcatcctggtgctctacttcactgtggacaccttcgtggtcaacaagaagccgtggctgcctgagtgcacgcccgtctacgtgcagtactttgtcaagttcttcatcattggcgtgacggtgctggtggtcgccgtgcccgaggggctccctctggccgtcaccatctcgttggcctattcggtgaagaaaatgatgaaggacaacaacctggtacgccacctggatgcctgtgagaccatgggcaatgccacagccatctgctcagacaagacaggcacgctgaccaccaatcgcatgacagtggtacaggcctatgtcggcgacgtccactataaagagatccccgaccccagctccatcaacaccaagaccatggagctgctgatcaatgccatcgccatcaacagcgcctacaccaccaagattctgcccccagagaaggagggcgccctgcctcggcaggtgggcaacaagacggagtgcggcctgctgggcttcgtgctggacctgaagcaggactacgagcccgtgcgcagccagatgccagaggagaagttgtacaaagtgtacaccttcaactccgtgcgcaagtccatgagcactgtcatcaagctgcccgacgagagcttccgcatgtacagcaagggggcttctgagatcgtgctcaagaagtgctgcaaaatcctcaatggggcgggagagcctcgtgtcttccggccccgcgaccgggacgagatggtaaagaaggtgattgagcccatggcttgcgatgggctccgcactatctgcgtggcctaccgcgacttccccagcagcccggagccggactgggacaatgagaatgacatcctcaacgaactcacctgcatctgcgtggtgggcatcgaggacccggtgcggccagaggtcccagaagccatccgcaagtgccagcgggcaggcatcacggtccgcatggtcactggcgacaatatcaacacggctcgggccatcgccatcaagtgtggcatcatccatcctggggaggactttctgtgcctcgagggcaaggagttcaacaggaggatccgcaacgagaagggggagattgagcaggagcgaattgacaagatctggccaaagctgcgggtgctggctcgctcctccccaacggacaagcataccctggttaaaggcatcatcgacagcacacacactgagcagcggcaggtggtggccgtgacgggggacgggaccaacgacgggcctgcactcaagaaggccgacgtgggcttcgccatgggcatcgcaggcactgacgtggccaaggaggcctcagacatcatcctgacagacgacaatttcagcagcatcgtcaaggcagtgatgtggggccgcaacgtctatgacagcatctccaaattcttgcagttccagctcaccgtcaacgtggtggccgtgattgtggccttcacaggcgcctgcatcacgcaggactcccctctgaaggccgtgcagatgctctgggtgaacctcatcatggacacgtttgcctcgctggcactggccactgagccgcccacggagaccctgctgctgaggaagccgtacggccgcaacaagccgctcatctccaggaccatgatgaagaacatcctgggccatgctgtctaccagcttgccctcatcttcaccctgctctttgttggcgagaagatgttccagatcgacagcgggaggaacgcgcccctgcattcgccaccctcagaacattacaccatcatcttcaacaccttcgtcatgatgcagctcttcaacgagatcaacgcccgcaagatccacggcgagcgcaatgtctttgacggcatcttccggaaccccatcttctgcaccatcgtgctgggcacctttgccatccagatagtgatcgtgcagtttggagggaagccattcagctgctctccactgcagctggaccagtggatgtggtgcatattcattgggttaggagagctcgtttggggccaggtcatcgccaccatcccgaccagcagactcaagttcctcaaggaggcaggcaggctcacacagaaggaggagatcccggaggaggagctcaacgaggacgtggaggagatcgaccacgcggagcgggagctgcggcggggccagatcctgtggttccgaggcctgaatcggatccagacacagatccgcgtcgtgaaggcgttccgtagctctctctatgaaggtttagaaaagcctgaatctcgaacctccatccataacttcatggctcatcctgaattccggatcgaagattcccagccccacatccccctcattgatgacaccgacctggaagaagatgccgcgctcaagcagaactcgagcccgccgtcatccctcaacaagaacaacagcgccatcgacagtgggatcaacctgacgaccgacacaagcaaatcagctacctcttcaagtccagggagccccatccacagcctggagacgtcgctttagctgaggaccctctcgcctgcccgcccgccctcatggaccccgctgccacccgctttccgggcacccatccatccaggcacccaactcacccaagcagcaacgagcaacaatcggaaaccaaatactggagagaaaaccaacgtttccacccacagaccctttctctggctgcgatgctgtttgaactctttttcacttcaaggcaaggggcgggatctccactgggggcttacgggagtgagcggttttcccaaaacaagcccttcctggctcccacccagacatggaccagccatgcacccgcccagccaccacgtcccccgcatgaatgtactgtacactttcaatcctccccttgtttggtttttgggggttggggaggggtttttgtttgtttgtttgttttcttaggcgggaactgcaaacagactcttttctgagactatttatccaatccactggtctgtgagtttttgaaatgcttgcacagcatggtctcagttgtatagattaatttaataactttttgaaattgcagagcttaactcgcctagtagatttgcaccaatggaaccgaagaacttcatagacactcacaaggttatatccatttctttgtatctatatcaacgtatacttttccgagactgtatacgtccatatagataggtagatatatatatatatatataaatatatatacatggatatataaagtttctttgccggcatgttgccttgtttccgcttaaattgctctattttaacttatttatgtcctaaaagaagaatgtaatttgtttacaaacctgtagataacgtctttggctatttgtatggtttaagaacactggtggctgagatgctataaaaacagctcggcccaacagacacttcccctgggttgcatcctggatgttttatgatagccatgctctgatttttgcctgctatttccgttcaataatgtcactaccgtgagaggctcaggcagaagccaaatgctaccgagttgccatcctgaggggtttaacaacatgctccgtagacgaagggagaggaggagagaaggcttcctgggtttgcaacactaacggccatccggcccaaggatgccaggatctgcaaagcactgctcgaagacttttctctcaatgaaactcgcttgagtttactaagagcatttcaaaaataggttctctttggcactgtctgtacagagattgaggtagtgttgaaatattataaatggtattgtgttgatttttttttttatttagtaacttacaggtttgtttccttattaatggcagcatctgagctgttggcatattggatgaggatcagtatggcttgctgcttttatttttatttttgaagaagaatagcctttttctctgcactatttagatccgaatgaaccttatgatgtgtatattgagatgtactcagtgtgattttaaaccaaattgtcttcctgtagtcacaatatatactgtagccttttaacagcaagtcttgctttcccaaacagaaagccattctgaaaccctacagtatcacaggtgagaaaaggtggttattttttccccaagacaacagcactagtaatcccacttaataagagcttatttaattggatgtcagcctcttaactgctaagcactttgtgggtctcagcgtttttcataaaagaacttttgtatttaatacaaagtttgctttgagacttttcagcatatgatcttttttccataaacttgtacagtgcaaaagacattttgaataccatgatcgatgatgtcccatgcttcgaggaaaaccaaacactttccgcctctcttgcaaaatccattcctcatgctgaccctcctcacgatggctgtgtcagcccagccccttcccttctccaggcccagagaactcttccacaaacaagatgagagccactcgggaaaagagccatagtcaactgggagggcctacatctggatggcggtggaaaaacttgagggtttggggttcaaagtcagcccatcccacctggcaaaatcctcctggaaggaggaccttcaagagcgcatcacctgaatgtcgtgaagaagtatctctgaatgtatccaggagaggaactgcataaccaaaggggtgaccagccctcagatgtgcttattggattccagtacaaacgccaccaaagccagcccactgctctcctacaaggaaggaaagatctgcacgtgtaaaacatggggcagccttggaacatggtgttttttggagtttcctttctcacagttttccatctccccacttctttgatcagtcatgtgtccgtgacctcgttccatgacatcaggatagctgtgtttgcacaccatgctccatgttcattcggagccaggaggggttctcagtggagcctggcttagggaacagggagcgatggaagaatgccaacattagcgttggtcttctcttgtcaggaatgaaggatgcttgcacacatgcaccccctcactctcacacttgcacacatacacacacacacacacgaaatggttggtttgtcaaaactcactgtagtacataaagcttgcactctgcgtcctatatctagcagcatggggtacgtttggcagttcactccattagggggtaaataatttatgaccattcatctgtttttatgaatttttttatctagacaataatgtaaataaagaactcaccatctctgttcatttaatactatgcaatggttatgctttcaatcgctggctcttctgactcgtgcagtgtggttctgaaatgtttgtggtttaaaaaaaaaagcaaaaaacaacatcaaacagaacatagtaaatatatctgtaatgtatacttttttctactttgggactgcatcatccacatagcttcttttctgtcctctagacaagggctccaggagtaagtggcagatttggttctgagagctaagctcaccaacttgtctccccctcaacagatgagggaagggcagggagcccgttcagtgactcctggcgctgcagaatcactcatctttggaggtgagcagagagagctctgaggagtttccttcttgcaactcaggcggagctttctttaactcaggagcagcctccattgctcccgccaacccctcaccatggccccttgtccccttgtcccaaccatagcatagagatgacaagagagaggcagtcctatttctgagactggaccaattaaaatgactgcactggctcaaaggactctgaacctgtcttgtcctgggtcctccagttgttggaagccactcttttccccaaccatgctgaaatgccacctttaccacacactgatgtcttacatagacttagatctatttctggaacttctcttctcttcgcttacttgggtgtctcatctggcaccagccatacaattttaactattgtcaatttctaatgtcttattatgtggtgggatgagtcccttcactcttcttttacaaaatttcctagttattctctcacatctattcttccacataaactttaaattgtgcccagtcctccaccccctgtcccattcccacccccaaattctgggctctgtcattccctgtgccatcatcttccccccattgtaattactgtccactcagggctgtgaaatagactatgttctgtaaagagggacaaaaagggcatcctgatcttgagagaagcctgctgttcctcccatcatttcacctgccccctaagcccaggagttgtcatgagaggtcaccaggcccccactcaatctcagcttgggaaccaaagtcacccaccttggttgtgttggggtggacccgccatctgtccctggtccagacgagaaagaggagtctctcctaggcctggagctgggaaagaatgtgtggcccagttgtctgcacttctaattctcatcatggagaaacctttattcctatctccctttcctgaactggttttttgttgtttttgtttcattttgttttggggggatagtttcttgctctttaatttggagtctccagtacctttgggatgcaggcagttcttgcctgggccttctcggaaccctcactcccctagcccactcttgcgctacctgcaggaggctgccaacctggtgcattctgacaagcctcccacccaaatctctctcctgccattgtgtccaaaatcccaccattagaggctcttgtagggaagagcgtttcttgaaggcttttaggccttccagagccaggagggaagtcagacaatagcaggaagtccccaggccttttcaaagttccaaaccaagctctcctgattttaatgtagagatcataccaacccaggtgggggaggagggtccccagccccaggcagcagccatcaccccctccactgaaaacaatattggaggctgctttgggactgcccttctcagccccctaagtctgttttgtaatgcctgtggtgctctccctcctggacctttcctctcgggggtcaccacactttgctaactcttgtgtgcacatattttataatagagtagcgagggaatggtgccgcctccagcttccgtaagctgcccgggctctggggggctctgggacaatcggggctgggaagtgactgtgctcttattgtacactctttatttctctgtatctttggcttgtgctctttgtaattaatgggatttgtctgccttttcaacactatactgagcaataacaataaatgcacacgtggaaatgca

SEQ ID NO: 2731 - DNA, 8053 bp, Homo sapiens
  source 1..8053: mol_type = unassigned DNA
agtctgcagaggggcccgggcacgctggctgggctcagccgcggcaccagctgccgcaccgcgattacggggctgcccgccgggaaaccgtgcaggattggtggtgattttcatagccaagagccaccacccctgaccatgtagatgccagttccagggagcagcatgggccccactgaatggagactcctgggtctacagccctgagcccctccggcccctggacctcgtcccacaccggaggacacctcttggagctcaccaccactgtcaccagcccgcctcggccacccccaccccccgggacccggagtcggccgcctggtgccacagctgaccagtgagggtgtgctgaggacagccacaagcagccatcacccggcagcctcttgtccagcgctgacccttgggcccagcccgagcaaggaccgcagcaaacatgggtgacatgaccaacagcgacttttactccaaaaaccaaagaaatgagtcgagccatgggggcgagttcgggtgcacaatggaggagctccgctccctcatggagctgcggggcactgaggctgtggtcaagatcaaggagacttatggggacaccgaagccatctgccggcgcctcaaaacctcacctgttgaaggtttgccgggcaccgctccagacctggaaaagagaaagcaaatttttgggcaaaactttatacctccaaagaagccaaaaaccttcctgcagctcgtgtgggaggcgctgcaggacgtgacgctcatcatcctggagattgccgccatcatctccctggggctgtccttctaccacccgcccggcgagggcaacgaaggatgtgcgacggcccagggtggggcagaggatgaaggagaggcagaggcaggttggatcgagggggccgccattctcctctcagttatctgtgtggtcctggtcacggccttcaatgactggagcaaagagaaacagttccggggcctgcagagccgcatcgagcaggaacagaaatttaccgtggtccgggctggccaggtggtccagatccctgtggctgagatcgtggttggggacatagcccaggtcaaatatggtgacctcctccctgccgacggcctcttcatccagggcaatgacctcaagattgatgaaagctccctaactggagagtctgaccaggtgcgcaagtccgtggacaaggaccccatgctgctgtcaggaacccacgtgatggagggctcaggacggatgttggtgactgctgtgggtgtgaactctcagactggcatcatctttaccctcctgggggctggtggtgaagaggaagagaagaaagacaaaaaaggtgtgaagaagggggatggccttcagctaccagcagcagacggtgcggcagcttcaaatgctgcagatagtgcgaatgccagcctagtcaatggtaaaatgcaggatggcaatgtggacgccagccagagcaaagccaaacaacaggacggggcagccgccatggagatgcagcccctcaagagtgccgagggcggcgacgctgacgacaggaagaaggccagcatgcacaagaaggagaagtccgtgctgcagggcaagctcaccaagctggctgtgcagatcgggaaggcgggcttggtgatgtcagccatcacggtgatcatcctggtgctctacttcactgtggacaccttcgtggtcaacaagaagccgtggctgcctgagtgcacgcccgtctacgtgcagtactttgtcaagttcttcatcattggcgtgacggtgctggtggtcgccgtgcccgaggggctccctctggccgtcaccatctcgttggcctattcggtgaagaaaatgatgaaggacaacaacctggtacgccacctggatgcctgtgagaccatgggcaatgccacagccatctgctcagacaagacaggcacgctgaccaccaatcgcatgacagtggtacaggcctatgtcggcgacgtccactataaagagatccccgaccccagctccatcaacaccaagaccatggagctgctgatcaatgccatcgccatcaacagcgcctacaccaccaagattctgcccccagagaaggagggcgccctgcctcggcaggtgggcaacgtctatgacagcatctccaaattcttgcagttccagctcaccgtcaacgtggtggccgtgattgtggccttcacaggcgcctgcatcacgcaggactcccctctgaaggccgtgcagatgctctgggtgaacctcatcatggacacgtttgcctcgctggcactggccactgagccgcccacggagaccctgctgctgaggaagccgtacggccgcaacaagccgctcatctccaggaccatgatgaagaacatcctgggccatgctgtctaccagcttgccctcatcttcaccctgctctttgttggcgagaagatgttccagatcgacagcgggaggaacgcgcccctgcattcgccaccctcagaacattacaccatcatcttcaacaccttcgtcatgatgcagctcttcaacgagatcaacgcccgcaagatccacggcgagcgcaatgtctttgacggcatcttccggaaccccatcttctgcaccatcgtgctgggcacctttgccatccagatagtgatcgtgcagtttggagggaagccattcagctgctctccactgcagctggaccagtggatgtggtgcatattcattgggttaggagagctcgtttggggccaggtcatcgccaccatcccgaccagcagactcaagttcctcaaggaggcaggcaggctcacacagaaggaggagatcccggaggaggagctcaacgaggacgtggaggagatcgaccacgcggagcgggagctgcggcggggccagatcctgtggttccgaggcctgaatcggatccagacacagatccgcgtcgtgaaggcgttccgtagctctctctatgaaggtttagaaaagcctgaatctcgaacctccatccataacttcatggctcatcctgaattccggatcgaagattcccagccccacatccccctcattgatgacaccgacctggaagaagatgccgcgctcaagcagaactcgagcccgccgtcatccctcaacaagaacaacagcgccatcgacagtgggatcaacctgacgaccgacacaagcaaatcagctacctcttcaagtccagggagccccatccacagcctggagacgtcgctttagctgaggaccctctcgcctgcccgcccgccctcatggaccccgctgccacccgctttccgggcacccatccatccaggcacccaactcacccaagcagcaacgagcaacaatcggaaaccaaatactggagagaaaaccaacgtttccacccacagaccctttctctggctgcgatgctgtttgaactctttttcacttcaaggcaaggggcgggatctccactgggggcttacgggagtgagcggttttcccaaaacaagcccttcctggctcccacccagacatggaccagccatgcacccgcccagccaccacgtcccccgcatgaatgtactgtacactttcaatcctccccttgtttggtttttgggggttggggaggggtttttgtttgtttgtttgttttcttaggcgggaactgcaaacagactcttttctgagactatttatccaatccactggtctgtgagtttttgaaatgcttgcacagcatggtctcagttgtatagattaatttaataactttttgaaattgcagagcttaactcgcctagtagatttgcaccaatggaaccgaagaacttcatagacactcacaaggttatatccatttctttgtatctatatcaacgtatacttttccgagactgtatacgtccatatagataggtagatatatatatatatatataaatatatatacatggatatataaagtttctttgccggcatgttgccttgtttccgcttaaattgctctattttaacttatttatgtcctaaaagaagaatgtaatttgtttacaaacctgtagataacgtctttggctatttgtatggtttaagaacactggtggctgagatgctataaaaacagctcggcccaacagacacttcccctgggttgcatcctggatgttttatgatagccatgctctgatttttgcctgctatttccgttcaataatgtcactaccgtgagaggctcaggcagaagccaaatgctaccgagttgccatcctgaggggtttaacaacatgctccgtagacgaagggagaggaggagagaaggcttcctgggtttgcaacactaacggccatccggcccaaggatgccaggatctgcaaagcactgctcgaagacttttctctcaatgaaactcgcttgagtttactaagagcatttcaaaaataggttctctttggcactgtctgtacagagattgaggtagtgttgaaatattataaatggtattgtgttgatttttttttttatttagtaacttacaggtttgtttccttattaatggcagcatctgagctgttggcatattggatgaggatcagtatggcttgctgcttttatttttatttttgaagaagaatagcctttttctctgcactatttagatccgaatgaaccttatgatgtgtatattgagatgtactcagtgtgattttaaaccaaattgtcttcctgtagtcacaatatatactgtagccttttaacagcaagtcttgctttcccaaacagaaagccattctgaaaccctacagtatcacaggtgagaaaaggtggttattttttccccaagacaacagcactagtaatcccacttaataagagcttatttaattggatgtcagcctcttaactgctaagcactttgtgggtctcagcgtttttcataaaagaacttttgtatttaatacaaagtttgctttgagacttttcagcatatgatcttttttccataaacttgtacagtgcaaaagacattttgaataccatgatcgatgatgtcccatgcttcgaggaaaaccaaacactttccgcctctcttgcaaaatccattcctcatgctgaccctcctcacgatggctgtgtcagcccagccccttcccttctccaggcccagagaactcttccacaaacaagatgagagccactcgggaaaagagccatagtcaactgggagggcctacatctggatggcggtggaaaaacttgagggtttggggttcaaagtcagcccatcccacctggcaaaatcctcctggaaggaggaccttcaagagcgcatcacctgaatgtcgtgaagaagtatctctgaatgtatccaggagaggaactgcataaccaaaggggtgaccagccctcagatgtgcttattggattccagtacaaacgccaccaaagccagcccactgctctcctacaaggaaggaaagatctgcacgtgtaaaacatggggcagccttggaacatggtgttttttggagtttcctttctcacagttttccatctccccacttctttgatcagtcatgtgtccgtgacctcgttccatgacatcaggatagctgtgtttgcacaccatgctccatgttcattcggagccaggaggggttctcagtggagcctggcttagggaacagggagcgatggaagaatgccaacattagcgttggtcttctcttgtcaggaatgaaggatgcttgcacacatgcaccccctcactctcacacttgcacacatacacacacacacacacgaaatggttggtttgtcaaaactcactgtagtacataaagcttgcactctgcgtcctatatctagcagcatggggtacgtttggcagttcactccattagggggtaaataatttatgaccattcatctgtttttatgaatttttttatctagacaataatgtaaataaagaactcaccatctctgttcatttaatactatgcaatggttatgctttcaatcgctggctcttctgactcgtgcagtgtggttctgaaatgtttgtggtttaaaaaaaaaagcaaaaaacaacatcaaacagaacatagtaaatatatctgtaatgtatacttttttctactttgggactgcatcatccacatagcttcttttctgtcctctagacaagggctccaggagtaagtggcagatttggttctgagagctaagctcaccaacttgtctccccctcaacagatgagggaagggcagggagcccgttcagtgactcctggcgctgcagaatcactcatctttggaggtgagcagagagagctctgaggagtttccttcttgcaactcaggcggagctttctttaactcaggagcagcctccattgctcccgccaacccctcaccatggccccttgtccccttgtcccaaccatagcatagagatgacaagagagaggcagtcctatttctgagactggaccaattaaaatgactgcactggctcaaaggactctgaacctgtcttgtcctgggtcctccagttgttggaagccactcttttccccaaccatgctgaaatgccacctttaccacacactgatgtcttacatagacttagatctatttctggaacttctcttctcttcgcttacttgggtgtctcatctggcaccagccatacaattttaactattgtcaatttctaatgtcttattatgtggtgggatgagtcccttcactcttcttttacaaaatttcctagttattctctcacatctattcttccacataaactttaaattgtgcccagtcctccaccccctgtcccattcccacccccaaattctgggctctgtcattccctgtgccatcatcttccccccattgtaattactgtccactcagggctgtgaaatagactatgttctgtaaagagggacaaaaagggcatcctgatcttgagagaagcctgctgttcctcccatcatttcacctgccccctaagcccaggagttgtcatgagaggtcaccaggcccccactcaatctcagcttgggaaccaaagtcacccaccttggttgtgttggggtggacccgccatctgtccctggtccagacgagaaagaggagtctctcctaggcctggagctgggaaagaatgtgtggcccagttgtctgcacttctaattctcatcatggagaaacctttattcctatctccctttcctgaactggttttttgttgtttttgtttcattttgttttggggggatagtttcttgctctttaatttggagtctccagtacctttgggatgcaggcagttcttgcctgggccttctcggaaccctcactcccctagcccactcttgcgctacctgcaggaggctgccaacctggtgcattctgacaagcctcccacccaaatctctctcctgccattgtgtccaaaatcccaccattagaggctcttgtagggaagagcgtttcttgaaggcttttaggccttccagagccaggagggaagtcagacaatagcaggaagtccccaggccttttcaaagttccaaaccaagctctcctgattttaatgtagagatcataccaacccaggtgggggaggagggtccccagccccaggcagcagccatcaccccctccactgaaaacaatattggaggctgctttgggactgcccttctcagccccctaagtctgttttgtaatgcctgtggtgctctccctcctggacctttcctctcgggggtcaccacactttgctaactcttgtgtgcacatattttataatagagtagcgagggaatggtgccgcctccagcttccgtaagctgcccgggctctggggggctctgggacaatcggggctgggaagtgactgtgctcttattgtacactctttatttctctgtatctttggcttgtgctctttgtaattaatgggatttgtctgccttttcaacactatactgagcaataacaataaatgcacacgtggaaatgca

SEQ ID NO: 2732 - DNA, 8869 bp, Homo sapiens
  source 1..8869: mol_type = unassigned DNA
agtctgcagaggggcccgggcacgctggctgggctcagccgcggcaccagctgccgcaccgcgattacggggctgcccgccgggaaaccgtgcaggattggtggtgattttcatagccaagagccaccacccctgaccatgtagatgccagttccagggagcagcatgggccccactgaatggagactcctgggtctacagccctgagcccctccggcccctggacctcgtcccacaccggaggacacctcttggagctcaccaccactgtcaccagcccgcctcggccacccccaccccccgggacccggagtcggccgcctggtgccacagctgaccagtgagggtgtgctgaggacagccacaagcagccatcacccggcagcctcttgtccagcgctgacccttgggcccagcccgagcaaggaccgcagcaaacatgggtgacatgaccaacagcgacttttactccaaaaaccaaagaaatgagtcgagccatgggggcgagttcgggtgcacaatggaggagctccgctccctcatggagctgcggggcactgaggctgtggtcaagatcaaggagacttatggggacaccgaagccatctgccggcgcctcaaaacctcacctgttgaaggtttgccgggcaccgctccagacctggaaaagagaaagcaaatttttgggcaaaactttatacctccaaagaagccaaaaaccttcctgcagctcgtgtgggaggcgctgcaggacgtgacgctcatcatcctggagattgccgccatcatctccctggggctgtccttctaccacccgcccggcgagggcaacgaaggatgtgcgacggcccagggtggggcagaggatgaaggagaggcagaggcaggttggatcgagggggccgccattctcctctcagttatctgtgtggtcctggtcacggccttcaatgactggagcaaagagaaacagttccggggcctgcagagccgcatcgagcaggaacagaaatttaccgtggtccgggctggccaggtggtccagatccctgtggctgagatcgtggttggggacatagcccaggtcaaatatggtgacctcctccctgccgacggcctcttcatccagggcaatgacctcaagattgatgaaagctccctaactggagagtctgaccaggtgcgcaagtccgtggacaaggaccccatgctgctgtcaggaacccacgtgatggagggctcaggacggatgttggtgactgctgtgggtgtgaactctcagactggcatcatctttaccctcctgggggctggtggtgaagaggaagagaagaaagacaaaaaaggtaaaatgcaggatggcaatgtggacgccagccagagcaaagccaaacaacaggacggggcagccgccatggagatgcagcccctcaagagtgccgagggcggcgacgctgacgacaggaagaaggccagcatgcacaagaaggagaagtccgtgctgcagggcaagctcaccaagctggctgtgcagatcgggaaggcgggcttggtgatgtcagccatcacggtgatcatcctggtgctctacttcactgtggacaccttcgtggtcaacaagaagccgtggctgcctgagtgcacgcccgtctacgtgcagtactttgtcaagttcttcatcattggcgtgacggtgctggtggtcgccgtgcccgaggggctccctctggccgtcaccatctcgttggcctattcggtgaagaaaatgatgaaggacaacaacctggtacgccacctggatgcctgtgagaccatgggcaatgccacagccatctgctcagacaagacaggcacgctgaccaccaatcgcatgacagtggtacaggcctatgtcggcgacgtccactataaagagatccccgaccccagctccatcaacaccaagaccatggagctgctgatcaatgccatcgccatcaacagcgcctacaccaccaagattctgcccccagagaaggagggcgccctgcctcggcaggtgggcaacaagacggagtgcggcctgctgggcttcgtgctggacctgaagcaggactacgagcccgtgcgcagccagatgccagaggagaagttgtacaaagtgtacaccttcaactccgtgcgcaagtccatgagcactgtcatcaagctgcccgacgagagcttccgcatgtacagcaagggggcttctgagatcgtgctcaagaagtgctgcaaaatcctcaatggggcgggagagcctcgtgtcttccggccccgcgaccgggacgagatggtaaagaaggtgattgagcccatggcttgcgatgggctccgcactatctgcgtggcctaccgcgacttccccagcagcccggagccggactgggacaatgagaatgacatcctcaacgaactcacctgcatctgcgtggtgggcatcgaggacccggtgcggccagaggtcccagaagccatccgcaagtgccagcgggcaggcatcacggtccgcatggtcactggcgacaatatcaacacggctcgggccatcgccatcaagtgtggcatcatccatcctggggaggactttctgtgcctcgagggcaaggagttcaacaggaggatccgcaacgagaagggggagattgagcaggagcgaattgacaagatctggccaaagctgcgggtgctggctcgctcctccccaacggacaagcataccctggttaaaggcatcatcgacagcacacacactgagcagcggcaggtggtggccgtgacgggggacgggaccaacgacgggcctgcactcaagaaggccgacgtgggcttcgccatgggcatcgcaggcactgacgtggccaaggaggcctcagacatcatcctgacagacgacaatttcagcagcatcgtcaaggcagtgatgtggggccgcaacgtctatgacagcatctccaaattcttgcagttccagctcaccgtcaacgtggtggccgtgattgtggccttcacaggcgcctgcatcacgcaggactcccctctgaaggccgtgcagatgctctgggtgaacctcatcatggacacgtttgcctcgctggcactggccactgagccgcccacggagaccctgctgctgaggaagccgtacggccgcaacaagccgctcatctccaggaccatgatgaagaacatcctgggccatgctgtctaccagcttgccctcatcttcaccctgctctttgttggcgagaagatgttccagatcgacagcgggaggaacgcgcccctgcattcgccaccctcagaacattacaccatcatcttcaacaccttcgtcatgatgcagctcttcaacgagatcaacgcccgcaagatccacggcgagcgcaatgtctttgacggcatcttccggaaccccatcttctgcaccatcgtgctgggcacctttgccatccagatagtgatcgtgcagtttggagggaagccattcagctgctctccactgcagctggaccagtggatgtggtgcatattcattgggttaggagagctcgtttggggccaggtcatcgccaccatcccgaccagcagactcaagttcctcaaggaggcaggcaggctcacacagaaggaggagatcccggaggaggagctcaacgaggacgtggaggagatcgaccacgcggagcgggagctgcggcggggccagatcctgtggttccgaggcctgaatcggatccagacacagatccgcgtcgtgaaggcgttccgtagctctctctatgaaggtttagaaaagcctgaatctcgaacctccatccataacttcatggctcatcctgaattccggatcgaagattcccagccccacatccccctcattgatgacaccgacctggaagaagatgccgcgctcaagcagaactcgagcccgccgtcatccctcaacaagaacaacagcgccatcgacagtgggatcaacctgacgaccgacacaagcaaatcagctacctcttcaagtccagggagccccatccacagcctggagacgtcgctttagctgaggaccctctcgcctgcccgcccgccctcatggaccccgctgccacccgctttccgggcacccatccatccaggcacccaactcacccaagcagcaacgagcaacaatcggaaaccaaatactggagagaaaaccaacgtttccacccacagaccctttctctggctgcgatgctgtttgaactctttttcacttcaaggcaaggggcgggatctccactgggggcttacgggagtgagcggttttcccaaaacaagcccttcctggctcccacccagacatggaccagccatgcacccgcccagccaccacgtcccccgcatgaatgtactgtacactttcaatcctccccttgtttggtttttgggggttggggaggggtttttgtttgtttgtttgttttcttaggcgggaactgcaaacagactcttttctgagactatttatccaatccactggtctgtgagtttttgaaatgcttgcacagcatggtctcagttgtatagattaatttaataactttttgaaattgcagagcttaactcgcctagtagatttgcaccaatggaaccgaagaacttcatagacactcacaaggttatatccatttctttgtatctatatcaacgtatacttttccgagactgtatacgtccatatagataggtagatatatatatatatatataaatatatatacatggatatataaagtttctttgccggcatgttgccttgtttccgcttaaattgctctattttaacttatttatgtcctaaaagaagaatgtaatttgtttacaaacctgtagataacgtctttggctatttgtatggtttaagaacactggtggctgagatgctataaaaacagctcggcccaacagacacttcccctgggttgcatcctggatgttttatgatagccatgctctgatttttgcctgctatttccgttcaataatgtcactaccgtgagaggctcaggcagaagccaaatgctaccgagttgccatcctgaggggtttaacaacatgctccgtagacgaagggagaggaggagagaaggcttcctgggtttgcaacactaacggccatccggcccaaggatgccaggatctgcaaagcactgctcgaagacttttctctcaatgaaactcgcttgagtttactaagagcatttcaaaaataggttctctttggcactgtctgtacagagattgaggtagtgttgaaatattataaatggtattgtgttgatttttttttttatttagtaacttacaggtttgtttccttattaatggcagcatctgagctgttggcatattggatgaggatcagtatggcttgctgcttttatttttatttttgaagaagaatagcctttttctctgcactatttagatccgaatgaaccttatgatgtgtatattgagatgtactcagtgtgattttaaaccaaattgtcttcctgtagtcacaatatatactgtagccttttaacagcaagtcttgctttcccaaacagaaagccattctgaaaccctacagtatcacaggtgagaaaaggtggttattttttccccaagacaacagcactagtaatcccacttaataagagcttatttaattggatgtcagcctcttaactgctaagcactttgtgggtctcagcgtttttcataaaagaacttttgtatttaatacaaagtttgctttgagacttttcagcatatgatcttttttccataaacttgtacagtgcaaaagacattttgaataccatgatcgatgatgtcccatgcttcgaggaaaaccaaacactttccgcctctcttgcaaaatccattcctcatgctgaccctcctcacgatggctgtgtcagcccagccccttcccttctccaggcccagagaactcttccacaaacaagatgagagccactcgggaaaagagccatagtcaactgggagggcctacatctggatggcggtggaaaaacttgagggtttggggttcaaagtcagcccatcccacctggcaaaatcctcctggaaggaggaccttcaagagcgcatcacctgaatgtcgtgaagaagtatctctgaatgtatccaggagaggaactgcataaccaaaggggtgaccagccctcagatgtgcttattggattccagtacaaacgccaccaaagccagcccactgctctcctacaaggaaggaaagatctgcacgtgtaaaacatggggcagccttggaacatggtgttttttggagtttcctttctcacagttttccatctccccacttctttgatcagtcatgtgtccgtgacctcgttccatgacatcaggatagctgtgtttgcacaccatgctccatgttcattcggagccaggaggggttctcagtggagcctggcttagggaacagggagcgatggaagaatgccaacattagcgttggtcttctcttgtcaggaatgaaggatgcttgcacacatgcaccccctcactctcacacttgcacacatacacacacacacacacgaaatggttggtttgtcaaaactcactgtagtacataaagcttgcactctgcgtcctatatctagcagcatggggtacgtttggcagttcactccattagggggtaaataatttatgaccattcatctgtttttatgaatttttttatctagacaataatgtaaataaagaactcaccatctctgttcatttaatactatgcaatggttatgctttcaatcgctggctcttctgactcgtgcagtgtggttctgaaatgtttgtggtttaaaaaaaaaagcaaaaaacaacatcaaacagaacatagtaaatatatctgtaatgtatacttttttctactttgggactgcatcatccacatagcttcttttctgtcctctagacaagggctccaggagtaagtggcagatttggttctgagagctaagctcaccaacttgtctccccctcaacagatgagggaagggcagggagcccgttcagtgactcctggcgctgcagaatcactcatctttggaggtgagcagagagagctctgaggagtttccttcttgcaactcaggcggagctttctttaactcaggagcagcctccattgctcccgccaacccctcaccatggccccttgtccccttgtcccaaccatagcatagagatgacaagagagaggcagtcctatttctgagactggaccaattaaaatgactgcactggctcaaaggactctgaacctgtcttgtcctgggtcctccagttgttggaagccactcttttccccaaccatgctgaaatgccacctttaccacacactgatgtcttacatagacttagatctatttctggaacttctcttctcttcgcttacttgggtgtctcatctggcaccagccatacaattttaactattgtcaatttctaatgtcttattatgtggtgggatgagtcccttcactcttcttttacaaaatttcctagttattctctcacatctattcttccacataaactttaaattgtgcccagtcctccaccccctgtcccattcccacccccaaattctgggctctgtcattccctgtgccatcatcttccccccattgtaattactgtccactcagggctgtgaaatagactatgttctgtaaagagggacaaaaagggcatcctgatcttgagagaagcctgctgttcctcccatcatttcacctgccccctaagcccaggagttgtcatgagaggtcaccaggcccccactcaatctcagcttgggaaccaaagtcacccaccttggttgtgttggggtggacccgccatctgtccctggtccagacgagaaagaggagtctctcctaggcctggagctgggaaagaatgtgtggcccagttgtctgcacttctaattctcatcatggagaaacctttattcctatctccctttcctgaactggttttttgttgtttttgtttcattttgttttggggggatagtttcttgctctttaatttggagtctccagtacctttgggatgcaggcagttcttgcctgggccttctcggaaccctcactcccctagcccactcttgcgctacctgcaggaggctgccaacctggtgcattctgacaagcctcccacccaaatctctctcctgccattgtgtccaaaatcccaccattagaggctcttgtagggaagagcgtttcttgaaggcttttaggccttccagagccaggagggaagtcagacaatagcaggaagtccccaggccttttcaaagttccaaaccaagctctcctgattttaatgtagagatcataccaacccaggtgggggaggagggtccccagccccaggcagcagccatcaccccctccactgaaaacaatattggaggctgctttgggactgcccttctcagccccctaagtctgttttgtaatgcctgtggtgctctccctcctggacctttcctctcgggggtcaccacactttgctaactcttgtgtgcacatattttataatagagtagcgagggaatggtgccgcctccagcttccgtaagctgcccgggctctggggggctctgggacaatcggggctgggaagtgactgtgctcttattgtacactctttatttctctgtatctttggcttgtgctctttgtaattaatgggatttgtctgccttttcaacactatactgagcaataacaataaatgcacacgtggaaatgca

SEQ ID NO: 2733 - DNA, 6420 bp, Homo sapiens
  source 1..6420: mol_type = unassigned DNA
gtgtccacgcttagcagctttctcaccgccgccaaaccttgcctgggcactgggaccgtgggtggccgcctgtccctagctgtggctgagccaagattgcacttgtgagaaggcctgacaggcagcatgggcgacatggccaatagttccatcgagttccaccccaagccccagcagcagcgggatgtcccccaggctggaggctttgggtgcacgctggcggagctgcgcaccctcatggagctgcgaggggccgaggcgctgcagaagatcgaggaggcctacggggatgtcagcgggctctgccggaggctgaagacctcacccacagagggcctggcggacaacaccaatgacctggagaagcgcaggcagatctacgggcagaacttcatccccccaaagcaacccaagaccttcctgcagctggtgtgggaggccctgcaggacgtgaccctcatcatcctggaggtggctgccatcgtctctctgggcctctcgttctatgcgccgccaggagaggagagtgaagcctgtgggaatgtgtcgggaggcgcagaagatgagggcgaggccgaagctggctggatcgagggggctgccatcctgctgtccgtcatctgtgtggtgctggtcacggccttcaatgactggagcaaggagaagcagttccgaggcctgcagagccgaattgagcaggagcagaagttcacggtcatccggaacgggcagctcctccaggtccccgtggctgcgctggtggtgggggacattgcccaggtcaagtacggcgacctgctgccagccgacggcgtgctcatccaggccaatgacctcaagatcgacgagagctccctgacgggcgagtctgaccacgtgcgcaagtcagctgacaaagatcccatgctgctctcaggcactcatgtcatggaaggttctggaagaatggtggtgaccgccgttggcgtgaattcccagacaggcatcatcttcacgctgcttggagctggcggagaggaggaagagaagaaagataagaaaggcaagcagcaggatggggccatggagagtagccagaccaaagctaagaagcaggatggtgcagtggccatggagatgcagcccctgaagagcgcggagggtggggagatggaggagcgggagaagaagaaagccaacgcacccaaaaaggagaagtctgtccttcaggggaagctcacaaagctagccgtgcagatcgggaaagcagggctggtgatgtctgccatcaccgtcatcatcctggtcctctactttgtgattgagacgtttgtcgtggaaggccggacatggctggcagagtgcacgccggtctatgtacaatacttcgtgaagttcttcatcattggtgtcactgtgctggtcgtggctgtcccagagggcctgcctcttgctgtcaccatctccttagcttactctgtcaagaaaatgatgaaagacaacaacctggtgcgccacctggatgcctgcgagaccatgggcaacgccacagccatctgctccgacaagacgggcacgctcaccaccaaccgtatgaccgtggtccagtcctacctaggagacacccactacaaagagattccggcccccagcgccctgacccctaagatcctcgacctcctggtccatgccatctccatcaacagtgcctataccaccaaaatactacctcctgagaaggaaggcgccctcccacgccaggtgggcaataagacggagtgcgccctgctgggcttcgtcttggacctgaagcgggacttccagcccgtgcgcgagcagatcccggaagacaagctttacaaagtgtacaccttcaactcggtccgcaagtccatgagcacagtcatccgcatgcccgacggtggcttccgcctcttcagcaagggggcctcagagatcctcttgaaaaagtgcaccaacatcttgaacagcaatggcgaactccggggctttcggcctcgggaccgggacgacatggtgaggaagatcatcgagccgatggcttgcgatggcctccgcaccatctgcatcgcctaccgggacttctctgcaggccaggagcccgactgggacaacgagaatgaggtcgtgggtgacctcacctgcatagctgtcgtgggcattgaggaccctgtgcggcccgaggtccctgaagctatccgaaaatgccagcgtgctggcatcacagtccgcatggtgactggggacaacatcaacacggcccgggccatcgcagccaaatgcggcatcatccagcccggggaggacttcctgtgcctagaagggaaggagttcaaccggcggatccgcaatgagaaaggcgagatagaacaggagcggctggacaaggtgtggcccaagctgagggtgctggcccggtcgtctcccaccgacaagcacacactggtcaaagggattatcgacagcaccactggtgagcagcggcaggtggtggctgtgacaggggatggcaccaacgatgggccggccctcaagaaggcggacgtgggcttcgccatgggcatcgcagggaccgacgtggccaaggaggcctccgacatcatcctgaccgatgacaacttcaccagcatcgtcaaggcagtcatgtggggccgtaacgtctatgacagcatctccaagttcctgcagtttcaactgacggtcaatgtggtggctgtgatcgtggccttcacaggtgcctgcattactcaggactctcctctcaaagccgtgcagatgttgtgggtgaacttgatcatggacacatttgcctctctggccctggcgacggagccacccacagagtcgctgctgctgcggaagccgtacggccgcgacaagcccctcatctcccgcaccatgatgaagaacattctgggccacgccgtgtaccagctcgccatcatcttcaccctgctgtttgtcggggagctcttcttcgacatcgacagcgggaggaatgcgcccctgcactcgccaccctcagagcactacaccatcatcttcaacacgttcgtcatgatgcagctctttaacgagatcaacgcccgcaagatccacggcgagaggaacgtgttcgacggcatcttcagcaaccccatcttctgcaccatcgttttgggcactttcgggattcagattgtcatcgtccagtttggcgggaagcccttcagctgctccccactatccacagaacagtggctctggtgcctgtttgttggtgttggggagctggtctggggacaggtcattgccaccatccccaccagccagctcaagtgcctgaaggaagccgggcacgggcccgggaaggacgagatgaccgacgaggagctggccgaaggcgaggaagagatcgaccatgccgagcgggagctccgcaggggccagatcctctggttccggggcctgaaccggattcagacgcagatccgggtggtgaaagcgttccgtagctcgctctatgaaggcctggagaaaccagaatccaagacctccattcacaacttcatggccacgcccgagtttctgatcaatgactacacccacaacatcccgctcattgacgacacggacgtggacgagaacgaggagcgcctccgggcccccccgcccccgtcccccaaccagaacaacaacgccatagacagcggcatctacctgaccacgcatgtcaccaagtcagctacctcttcagtgttttcctccagtcccgggagcccgctccacagcgtggagacgtccctctaacaagaacttgtctcagcacatgcgcacacgcacactcggactcacacgaagtcacacgcacacatgcacgcacacacacatatggggacctgcacacctgcaaaacgagggaacaactaaggtggctgaagacctttctggcagggcatttgcaaggacccaaatccattcaacaagggtgcagcctgccacaggctcctcatccggactgaggaagacgaggacagggaggaggaaaaggaggaagaggaggacaaaaagggggaggagaaggttcttcgtccaaaggaggaaggagaagaagtagaaagtgcgaagagctgagttccccacctttttttctattgatgcttcttttttaacaaactacagttttaccgtgtgtttgccatttgagctgtgtggtgggcagggggctggtttgggtttatggggagcttttgttgcacccatgcaggggcaatcagatcagcatcttcatgcaaaaaaaaaaaaaaagttgagtgctctgcaggcctgtgaagggtgccacctgagggagccgcctgcaagcggccctgcagccacaaagcaacccgccctctgcaaaaactaggcacatccgcagtgcgcatgtgtgtgcgtgcatgcacatatgtgtatgtgtgtggatctgtacacacacacgtatatatggccagatgcgtatttcaataaggaactatttactggcatgatatttgcattcctcttatcaggcattttcatttggaaatttcattattgaatgtagcaaggttgtagttgtttttttttttttttcagggaactagactgcaagaatatctttctggtcaacccatttttgtccctcatcaccccgcccccacctttcgctcctgccctctgcccggccctactgagattcccaaggagaaggccgagagggggcgctccaggtctggagcaggtataattggagcatttgcactgagacccctgccagagaggagaaaaccctttcaagggaaattttaatctaaaaggaaaaaaccaaaatattgatgagaaggagtcctccagttagtgaaaggggagtttcgttttcagctttctttggttcctactccaattccacatccttcatcctggccatgcccccaccttcaagagcatgaagcactcttggagttgtgggtcctgcccagagtccagagagcagcctcagctgagcacaggtccgagggggcgggggcagggccaagagttcaaaagaagccaatggagggagagggagcgtcagaagcccggaggagctggtggtgggagaatgacggcagggacgcagccacagttcagaccctgtcccctcagcacctggatggactcccactgtttgctttggcaaatgccgaggagtcctcggtagaccaccttgatgtctgctgtgacatcagaggtgccaccaccaaagcactcttcccaccctagtctttgtgtccagcggccaagcttaagccatgaagtcatggatttgtggctcagcaccaggtcctgaggggagcgtatcctggcagtgtgggcacctggtggccaagcctcagtttcccccaaatgagcaaaggggataaagaggggcccgacttttgccaccctcctgaggaagcccctaggtccacacagtgatgccatgggggacccttgccttccacacttgcaggtgtcacgttttgcagggaggtgtttgggccttgggctcagccactgggagacagttgggacctgagggacagaggatcggaatggaaaccaccaacgtgcactggcaccctcagaaggcttgtctcacctccaccggcatccacacaaaaccaaacaggagcaggcgtcatccccactattcccatgaatgccatgtcacccctgagcagaagcagtcaaatcttgggcaaaagaatttcggttagaaaagaaaatcccactttaaaatgccagctgcagataactcaaagccatcccttttttctaaagggcacattgagaatgtcacccatttgtaaactgttccctgatgtccttgtttaaacgataataagaaaaagggcaactccatttgttgagggtctttgtgttcttcaatgagaaatcaaatttgagacgttgaaattggagctgcgtgctgctgcactcaccggcttcttctcactctctgtcgtagacacaccgataggaccaatggccaatagatattaaaagcaaaccctcactgctgctgtataaagttgcctaatgtaaatgtctattgtttagtccctaggtcacctttgtgctgtgctgtggagttcagaaacggggtaccatgacctggaatcttttgctcttgtttttgcagtcttcaaggctgggggccctgtctcattgggaagcccctctttataaagcattatattacttggaatggcttggtcaactgtgttcagttcataaatatgttttacatttttatctgcctgttataaagatgaacaaaaaaacttaatgagaaagatcacagatacgtaataatttaaagtctgtagttgaatttcctaacttaaagaatagaccaaaatttctgtgtataaaaaaaaatgaaaggctccttacatcctg

SEQ ID NO: 2734 - DNA, 4280 bp, Homo sapiens
  source 1..4280: mol_type = unassigned DNA
ccgccgccggtgcagagcgtggggagcactcggccgcagccctcgcccgccgcagagggtcgcgtcccgcgccgccggccaggccgccccgtgcccaggcctttccatccttggagcggatcgttgcccgcctgacgcccgcccgcagcgacagcgcccgccggagccgaggccgcggcggcggccgtgcccatgcccgggtgtccacgcttagcagctttctcaccgccgccaaaccttgcctgggcactgggaccgtgggtggccgcctgtccctagctgtggctgagccaagattgcacttgtgagaaggcctgacaggcagcatgggcgacatggccaatagttccatcgagttccaccccaagccccagcagcagcgggatgtcccccaggctggaggctttgggtgcacgctggcggagctgcgcaccctcatggagctgcgaggggccgaggcgctgcagaagatcgaggaggcctacggggatgtcagcgggctctgccggaggctgaagacctcacccacagagggcctggcggacaacaccaatgacctggagaagcgcaggcagatctacgggcagaacttcatccccccaaagcaacccaagaccttcctgcagctggtgtgggaggccctgcaggacgtgaccctcatcatcctggaggtggctgccatcgtctctctgggcctctcgttctatgcgccgccaggagaggagagtgaagcctgtgggaatgtgtcgggaggcgcagaagatgagggcgaggccgaagctggctggatcgagggggctgccatcctgctgtccgtcatctgtgtggtgctggtcacggccttcaatgactggagcaaggagaagcagttccgaggcctgcagagccgaattgagcaggagcagaagttcacggtcatccggaacgggcagctcctccaggtccccgtggctgcgctggtggtgggggacattgcccaggtcaagtacggcgacctgctgccagccgacggcgtgctcatccaggccaatgacctcaagatcgacgagagctccctgacgggcgagtctgaccacgtgcgcaagtcagctgacaaagatcccatgctgctctcaggcactcatgtcatggaaggttctggaagaatggtggtgaccgccgttggcgtgaattcccagacaggcatcatcttcacgctgcttggagctggcggagaggaggaagagaagaaagataagaaaggcaagcagcaggatggggccatggagagtagccagaccaaagctaagaagcaggatggtgcagtggccatggagatgcagcccctgaagagcgcggagggtggggagatggaggagcgggagaagaagaaagccaacgcacccaaaaaggagaagtctgtccttcaggggaagctcacaaagctagccgtgcagatcgggaaagcagggctggtgatgtctgccatcaccgtcatcatcctggtcctctactttgtgattgagacgtttgtcgtggaaggccggacatggctggcagagtgcacgccggtctatgtacaatacttcgtgaagttcttcatcattggtgtcactgtgctggtcgtggctgtcccagagggcctgcctcttgctgtcaccatctccttagcttactctgtcaagaaaatgatgaaagacaacaacctggtgcgccacctggatgcctgcgagaccatgggcaacgccacagccatctgctccgacaagacgggcacgctcaccaccaaccgtatgaccgtggtccagtcctacctaggagacacccactacaaagagattccggcccccagcgccctgacccctaagatcctcgacctcctggtccatgccatctccatcaacagtgcctataccaccaaaatactacctcctgagaaggaaggcgccctcccacgccaggtgggcaataagacggagtgcgccctgctgggcttcgtcttggacctgaagcgggacttccagcccgtgcgcgagcagatcccggaagacaagctttacaaagtgtacaccttcaactcggtccgcaagtccatgagcacagtcatccgcatgcccgacggtggcttccgcctcttcagcaagggggcctcagagatcctcttgaaaaagtgcaccaacatcttgaacagcaatggcgaactccggggctttcggcctcgggaccgggacgacatggtgaggaagatcatcgagccgatggcttgcgatggcctccgcaccatctgcatcgcctaccgggacttctctgcaggccaggagcccgactgggacaacgagaatgaggtcgtgggtgacctcacctgcatagctgtcgtgggcattgaggaccctgtgcggcccgaggtccctgaagctatccgaaaatgccagcgtgctggcatcacagtccgcatggtgactggggacaacatcaacacggcccgggccatcgcagccaaatgcggcatcatccagcccggggaggacttcctgtgcctagaagggaaggagttcaaccggcggatccgcaatgagaaaggcgagatagaacaggagcggctggacaaggtgtggcccaagctgagggtgctggcccggtcgtctcccaccgacaagcacacactggtcaaagggattatcgacagcaccactggtgagcagcggcaggtggtggctgtgacaggggatggcaccaacgatgggccggccctcaagaaggcggacgtgggcttcgccatgggcatcgcagggaccgacgtggccaaggaggcctccgacatcatcctgaccgatgacaacttcaccagcatcgtcaaggcagtcatgtggggccgtaacgtctatgacagcatctccaagttcctgcagtttcaactgacggtcaatgtggtggctgtgatcgtggccttcacaggtgcctgcattactcaggactctcctctcaaagccgtgcagatgttgtgggtgaacttgatcatggacacatttgcctctctggccctggcgacggagccacccacagagtcgctgctgctgcggaagccgtacggccgcgacaagcccctcatctcccgcaccatgatgaagaacattctgggccacgccgtgtaccagctcgccatcatcttcaccctgctgtttgtcggggagctcttcttcgacatcgacagcgggaggaatgcgcccctgcactcgccaccctcagagcactacaccatcatcttcaacacgttcgtcatgatgcagctctttaacgagatcaacgcccgcaagatccacggcgagaggaacgtgttcgacggcatcttcagcaaccccatcttctgcaccatcgttttgggcactttcgggattcagattgtcatcgtccagtttggcgggaagcccttcagctgctccccactatccacagaacagtggctctggtgcctgtttgttggtgttggggagctggtctggggacaggtcattgccaccatccccaccagccagctcaagtgcctgaaggaagccgggcacgggcccgggaaggacgagatgaccgacgaggagctggccgaaggcgaggaagagatcgaccatgccgagcgggagctccgcaggggccagatcctctggttccggggcctgaaccggattcagacgcagatccgggtggtgaaagcgttccgtagctcgctctatgaaggcctggagaaaccagaatccaagacctccattcacaacttcatggccacgcccgagtttctgatcaatgactacacccacaacatcccgctcattgacgacacggacgtggacgagaacgaggagcgcctccgggcccccccgcccccgtcccccaaccagaacaacaacgccatagacagcggcatctacctgaccacgcatgtcaccaagtcagctacctcttcagtgttttcctccagtcccgggagcccgctccacagcgtggagacgtccctctaacaagaacttgtctcagcacatgcgcacacgcacactcggactcacacgaagtcacacgcacacatgcacgcacacacacatatggggacctgcacacctgcaaaacgagggaacaactaaggtggctgaagacctttctggcagggcatttgcaaggacccaaatccattcaacaagggtgcagcctgccacaggctcctcatccggactgaggaagacgaggacagggaggaggaaaaggaggaagaggaggacaaaaagggggaggagaaggttcttcgtccaaaggag

SEQ ID NO: 2735 - DNA, 4234 bp, Homo sapiens
  source 1..4234: mol_type = unassigned DNA
gtgtccacgcttagcagctttctcaccgccgccaaaccttgcctgggcactgggaccgtgggtggccgcctgtccctagctgtggctgagccaagattgcacttgtgagaaggcctgacaggcagcatgggcgacatggccaatagttccatcgagttccaccccaagccccagcagcagcgggatgtcccccaggctggaggctttgggtgcacgctggcggagctgcgcaccctcatggagctgcgaggggccgaggcgctgcagaagatcgaggaggcctacggggatgtcagcgggctctgccggaggctgaagacctcacccacagagggcctggcggacaacaccaatgacctggagaagcgcaggcagatctacgggcagaacttcatccccccaaagcaacccaagaccttcctgcagctggtgtgggaggccctgcaggacgtgaccctcatcatcctggaggtggctgccatcgtctctctgggcctctcgttctatgcgccgccaggagaggagagtgaagcctgtgggaatgtgtcgggaggcgcagaagatgagggcgaggccgaagctggctggatcgagggggctgccatcctgctgtccgtcatctgtgtggtgctggtcacggccttcaatgactggagcaaggagaagcagttccgaggcctgcagagccgaattgagcaggagcagaagttcacggtcatccggaacgggcagctcctccaggtccccgtggctgcgctggtggtgggggacattgcccaggtcaagtacggcgacctgctgccagccgacggcgtgctcatccaggccaatgacctcaagatcgacgagagctccctgacgggcgagtctgaccacgtgcgcaagtcagctgacaaagatcccatgctgctctcaggcactcatgtcatggaaggttctggaagaatggtggtgaccgccgttggcgtgaattcccagacaggcatcatcttcacgctgcttggagctggcggagaggaggaagagaagaaagataagaaaggcaagcagcaggatggggccatggagagtagccagaccaaagctaagaagcaggatggtgcagtggccatggagatgcagcccctgaagagcgcggagggtggggagatggaggagcgggagaagaagaaagccaacgcacccaaaaaggagaagtctgtccttcaggggaagctcacaaagctagccgtgcagatcgggaaagcagggctggtgatgtctgccatcaccgtcatcatcctggtcctctactttgtgattgagacgtttgtcgtggaaggccggacatggctggcagagtgcacgccggtctatgtacaatacttcgtgaagttcttcatcattggtgtcactgtgctggtcgtggctgtcccagagggcctgcctcttgctgtcaccatctccttagcttactctgtcaagaaaatgatgaaagacaacaacctggtgcgccacctggatgcctgcgagaccatgggcaacgccacagccatctgctccgacaagacgggcacgctcaccaccaaccgtatgaccgtggtccagtcctacctaggagacacccactacaaagagattccggcccccagcgccctgacccctaagatcctcgacctcctggtccatgccatctccatcaacagtgcctataccaccaaaatactacctcctgagaaggaaggcgccctcccacgccaggtgggcaataagacggagtgcgccctgctgggcttcgtcttggacctgaagcgggacttccagcccgtgcgcgagcagatcccggaagacaagctttacaaagtgtacaccttcaactcggtccgcaagtccatgagcacagtcatccgcatgcccgacggtggcttccgcctcttcagcaagggggcctcagagatcctcttgaaaaagtgcaccaacatcttgaacagcaatggcgaactccggggctttcggcctcgggaccgggacgacatggtgaggaagatcatcgagccgatggcttgcgatggcctccgcaccatctgcatcgcctaccgggacttctctgcaggccaggagcccgactgggacaacgagaatgaggtcgtgggtgacctcacctgcatagctgtcgtgggcattgaggaccctgtgcggcccgaggtccctgaagctatccgaaaatgccagcgtgctggcatcacagtccgcatggtgactggggacaacatcaacacggcccgggccatcgcagccaaatgcggcatcatccagcccggggaggacttcctgtgcctagaagggaaggagttcaaccggcggatccgcaatgagaaaggcgagatagaacaggagcggctggacaaggtgtggcccaagctgagggtgctggcccggtcgtctcccaccgacaagcacacactggtcaaagggattatcgacagcaccactggtgagcagcggcaggtggtggctgtgacaggggatggcaccaacgatgggccggccctcaagaaggcggacgtgggcttcgccatgggcatcgcagggaccgacgtggccaaggaggcctccgacatcatcctgaccgatgacaacttcaccagcatcgtcaaggcagtcatgtggggccgtaacgtctatgacagcatctccaagttcctgcagtttcaactgacggtcaatgtggtggctgtgatcgtggccttcacaggtgcctgcattactcaggactctcctctcaaagccgtgcagatgttgtgggtgaacttgatcatggacacatttgcctctctggccctggcgacggagccacccacagagtcgctgctgctgcggaagccgtacggccgcgacaagcccctcatctcccgcaccatgatgaagaacattctgggccacgccgtgtaccagctcgccatcatcttcaccctgctgtttgtcggggagctcttcttcgacatcgacagcgggaggaatgcgcccctgcactcgccaccctcagagcactacaccatcatcttcaacacgttcgtcatgatgcagctctttaacgagatcaacgcccgcaagatccacggcgagaggaacgtgttcgacggcatcttcagcaaccccatcttctgcaccatcgttttgggcactttcgggattcagattgtcatcgtccagtttggcgggaagcccttcagctgctccccactatccacagaacagtggctctggtgcctgtttgttggtgttggggagctggtctggggacaggtcattgccaccatccccaccagccagctcaagtgcctgaaggaagccgggcacgggcccgggaaggacgagatgaccgacgaggagctggccgaaggcgaggaagagatcgaccatgccgagcgggagctccgcaggggccagatcctctggttccggggcctgaaccggattcagacgcagatggaggtagtgagtaccttcaagagaagcggttcagttcagggtgctgtgcgccggcggtcttcggtcctcagccagcttcatgacgtaaccaatctttctacccctactcacgcaattctctctgctgccaatcctaccagtgctgctgggaatccgggtggtgaaagcgttccgtagctcgctctatgaaggcctggagaaaccagaatccaagacctccattcacaacttcatggccacgcccgagtttctgatcaatgactacacccacaacatcccgctcattgacgacacggacgtggacgagaacgaggagcgcctccgggcccccccgcccccgtcccccaaccagaacaacaacgccatagacagcggcatctacctgaccacgcatgtcaccaagtcagctacctcttcagtgttttcctccagtcccgggagcccgctccacagcgtggagacgtccctctaacaagaacttgtctcagcacatgcgcacacgcacactcggactcacacgaagtcacacgcacacatgcacgcacacacacatatggggacctgcacacctgcaaaacgagggaacaactaaggtggctgaagacctttctggcagggcatttgcaaggacccaaatccattcaacaagggtgcagcctgccacaggctcctcatccggactgaggaagacgaggacagggaggaggaaaaggaggaagaggaggacaaaaagggggaggagaaggttcttcgtccaaaggag

SEQ ID NO: 2736 - DNA, 6532 bp, Homo sapiens
  source 1..6532: mol_type = unassigned DNA
gtgtccacgcttagcagctttctcaccgccgccaaaccttgcctgggcactgggaccgtgggtggccgcctgtccctagctgtggctgagccaagattgcacttgtgagaaggcctgacaggcagcatgggcgacatggccaatagttccatcgagttccaccccaagccccagcagcagcgggatgtcccccaggctggaggctttgggtgcacgctggcggagctgcgcaccctcatggagctgcgaggggccgaggcgctgcagaagatcgaggaggcctacggggatgtcagcgggctctgccggaggctgaagacctcacccacagagggcctggcggacaacaccaatgacctggagaagcgcaggcagatctacgggcagaacttcatccccccaaagcaacccaagaccttcctgcagctggtgtgggaggccctgcaggacgtgaccctcatcatcctggaggtggctgccatcgtctctctgggcctctcgttctatgcgccgccaggagaggagagtgaagcctgtgggaatgtgtcgggaggcgcagaagatgagggcgaggccgaagctggctggatcgagggggctgccatcctgctgtccgtcatctgtgtggtgctggtcacggccttcaatgactggagcaaggagaagcagttccgaggcctgcagagccgaattgagcaggagcagaagttcacggtcatccggaacgggcagctcctccaggtccccgtggctgcgctggtggtgggggacattgcccaggtcaagtacggcgacctgctgccagccgacggcgtgctcatccaggccaatgacctcaagatcgacgagagctccctgacgggcgagtctgaccacgtgcgcaagtcagctgacaaagatcccatgctgctctcaggcactcatgtcatggaaggttctggaagaatggtggtgaccgccgttggcgtgaattcccagacaggcatcatcttcacgctgcttggagctggcggagaggaggaagagaagaaagataagaaagctaagaagcaggatggtgcagtggccatggagatgcagcccctgaagagcgcggagggtggggagatggaggagcgggagaagaagaaagccaacgcacccaaaaaggagaagtctgtccttcaggggaagctcacaaagctagccgtgcagatcgggaaagcagggctggtgatgtctgccatcaccgtcatcatcctggtcctctactttgtgattgagacgtttgtcgtggaaggccggacatggctggcagagtgcacgccggtctatgtacaatacttcgtgaagttcttcatcattggtgtcactgtgctggtcgtggctgtcccagagggcctgcctcttgctgtcaccatctccttagcttactctgtcaagaaaatgatgaaagacaacaacctggtgcgccacctggatgcctgcgagaccatgggcaacgccacagccatctgctccgacaagacgggcacgctcaccaccaaccgtatgaccgtggtccagtcctacctaggagacacccactacaaagagattccggcccccagcgccctgacccctaagatcctcgacctcctggtccatgccatctccatcaacagtgcctataccaccaaaatactacctcctgagaaggaaggcgccctcccacgccaggtgggcaataagacggagtgcgccctgctgggcttcgtcttggacctgaagcgggacttccagcccgtgcgcgagcagatcccggaagacaagctttacaaagtgtacaccttcaactcggtccgcaagtccatgagcacagtcatccgcatgcccgacggtggcttccgcctcttcagcaagggggcctcagagatcctcttgaaaaagtgcaccaacatcttgaacagcaatggcgaactccggggctttcggcctcgggaccgggacgacatggtgaggaagatcatcgagccgatggcttgcgatggcctccgcaccatctgcatcgcctaccgggacttctctgcaggccaggagcccgactgggacaacgagaatgaggtcgtgggtgacctcacctgcatagctgtcgtgggcattgaggaccctgtgcggcccgaggtccctgaagctatccgaaaatgccagcgtgctggcatcacagtccgcatggtgactggggacaacatcaacacggcccgggccatcgcagccaaatgcggcatcatccagcccggggaggacttcctgtgcctagaagggaaggagttcaaccggcggatccgcaatgagaaaggcgagatagaacaggagcggctggacaaggtgtggcccaagctgagggtgctggcccggtcgtctcccaccgacaagcacacactggtcaaagggattatcgacagcaccactggtgagcagcggcaggtggtggctgtgacaggggatggcaccaacgatgggccggccctcaagaaggcggacgtgggcttcgccatgggcatcgcagggaccgacgtggccaaggaggcctccgacatcatcctgaccgatgacaacttcaccagcatcgtcaaggcagtcatgtggggccgtaacgtctatgacagcatctccaagttcctgcagtttcaactgacggtcaatgtggtggctgtgatcgtggccttcacaggtgcctgcattactcaggactctcctctcaaagccgtgcagatgttgtgggtgaacttgatcatggacacatttgcctctctggccctggcgacggagccacccacagagtcgctgctgctgcggaagccgtacggccgcgacaagcccctcatctcccgcaccatgatgaagaacattctgggccacgccgtgtaccagctcgccatcatcttcaccctgctgtttgtcggggagctcttcttcgacatcgacagcgggaggaatgcgcccctgcactcgccaccctcagagcactacaccatcatcttcaacacgttcgtcatgatgcagctctttaacgagatcaacgcccgcaagatccacggcgagaggaacgtgttcgacggcatcttcagcaaccccatcttctgcaccatcgttttgggcactttcgggattcagattgtcatcgtccagtttggcgggaagcccttcagctgctccccactatccacagaacagtggctctggtgcctgtttgttggtgttggggagctggtctggggacaggtcattgccaccatccccaccagccagctcaagtgcctgaaggaagccgggcacgggcccgggaaggacgagatgaccgacgaggagctggccgaaggcgaggaagagatcgaccatgccgagcgggagctccgcaggggccagatcctctggttccggggcctgaaccggattcagacgcagatggaggtagtgagtaccttcaagagaagcggttcagttcagggtgctgtgcgccggcggtcttcggtcctcagccagcttcatgacgtaaccaatctttctacccctactcacgcaattctctctgctgccaatcctaccagtgctgctgggaatccgggtggtgaaagcgttccgtagctcgctctatgaaggcctggagaaaccagaatccaagacctccattcacaacttcatggccacgcccgagtttctgatcaatgactacacccacaacatcccgctcattgacgacacggacgtggacgagaacgaggagcgcctccgggcccccccgcccccgtcccccaaccagaacaacaacgccatagacagcggcatctacctgaccacgcatgtcaccaagtcagctacctcttcagtgttttcctccagtcccgggagcccgctccacagcgtggagacgtccctctaacaagaacttgtctcagcacatgcgcacacgcacactcggactcacacgaagtcacacgcacacatgcacgcacacacacatatggggacctgcacacctgcaaaacgagggaacaactaaggtggctgaagacctttctggcagggcatttgcaaggacccaaatccattcaacaagggtgcagcctgccacaggctcctcatccggactgaggaagacgaggacagggaggaggaaaaggaggaagaggaggacaaaaagggggaggagaaggttcttcgtccaaaggaggaaggagaagaagtagaaagtgcgaagagctgagttccccacctttttttctattgatgcttcttttttaacaaactacagttttaccgtgtgtttgccatttgagctgtgtggtgggcagggggctggtttgggtttatggggagcttttgttgcacccatgcaggggcaatcagatcagcatcttcatgcaaaaaaaaaaaaaaagttgagtgctctgcaggcctgtgaagggtgccacctgagggagccgcctgcaagcggccctgcagccacaaagcaacccgccctctgcaaaaactaggcacatccgcagtgcgcatgtgtgtgcgtgcatgcacatatgtgtatgtgtgtggatctgtacacacacacgtatatatggccagatgcgtatttcaataaggaactatttactggcatgatatttgcattcctcttatcaggcattttcatttggaaatttcattattgaatgtagcaaggttgtagttgtttttttttttttttcagggaactagactgcaagaatatctttctggtcaacccatttttgtccctcatcaccccgcccccacctttcgctcctgccctctgcccggccctactgagattcccaaggagaaggccgagagggggcgctccaggtctggagcaggtataattggagcatttgcactgagacccctgccagagaggagaaaaccctttcaagggaaattttaatctaaaaggaaaaaaccaaaatattgatgagaaggagtcctccagttagtgaaaggggagtttcgttttcagctttctttggttcctactccaattccacatccttcatcctggccatgcccccaccttcaagagcatgaagcactcttggagttgtgggtcctgcccagagtccagagagcagcctcagctgagcacaggtccgagggggcgggggcagggccaagagttcaaaagaagccaatggagggagagggagcgtcagaagcccggaggagctggtggtgggagaatgacggcagggacgcagccacagttcagaccctgtcccctcagcacctggatggactcccactgtttgctttggcaaatgccgaggagtcctcggtagaccaccttgatgtctgctgtgacatcagaggtgccaccaccaaagcactcttcccaccctagtctttgtgtccagcggccaagcttaagccatgaagtcatggatttgtggctcagcaccaggtcctgaggggagcgtatcctggcagtgtgggcacctggtggccaagcctcagtttcccccaaatgagcaaaggggataaagaggggcccgacttttgccaccctcctgaggaagcccctaggtccacacagtgatgccatgggggacccttgccttccacacttgcaggtgtcacgttttgcagggaggtgtttgggccttgggctcagccactgggagacagttgggacctgagggacagaggatcggaatggaaaccaccaacgtgcactggcaccctcagaaggcttgtctcacctccaccggcatccacacaaaaccaaacaggagcaggcgtcatccccactattcccatgaatgccatgtcacccctgagcagaagcagtcaaatcttgggcaaaagaatttcggttagaaaagaaaatcccactttaaaatgccagctgcagataactcaaagccatcccttttttctaaagggcacattgagaatgtcacccatttgtaaactgttccctgatgtccttgtttaaacgataataagaaaaagggcaactccatttgttgagggtctttgtgttcttcaatgagaaatcaaatttgagacgttgaaattggagctgcgtgctgctgcactcaccggcttcttctcactctctgtcgtagacacaccgataggaccaatggccaatagatattaaaagcaaaccctcactgctgctgtataaagttgcctaatgtaaatgtctattgtttagtccctaggtcacctttgtgctgtgctgtggagttcagaaacggggtaccatgacctggaatcttttgctcttgtttttgcagtcttcaaggctgggggccctgtctcattgggaagcccctctttataaagcattatattacttggaatggcttggtcaactgtgttcagttcataaatatgttttacatttttatctgcctgttataaagatgaacaaaaaaacttaatgagaaagatcacagatacgtaataatttaaagtctgtagttgaatttcctaacttaaagaatagaccaaaatttctgtgtataaaaaaaaatgaaaggctccttacatcctg

SEQ ID NO: 2737 - DNA, 6742 bp, Homo sapiens
  source 1..6742: mol_type = unassigned DNA
ccgccgccggtgcagagcgtggggagcactcggccgcagccctcgcccgccgcagagggtcgcgtcccgcgccgccggccaggccgccccgtgcccaggcctttccatccttggagcggatcgttgcccgcctgacgcccgcccgcagcgacagcgcccgccggagccgaggccgcggcggcggccgtgcccatgcccgggtgtccacgcttagcagctttctcaccgccgccaaaccttgcctgggcactgggaccgtgggtggccgcctgtccctagctgtggctgagccaagattgcacttgtgagaaggcctgacaggcagcatgggcgacatggccaatagttccatcgagttccaccccaagccccagcagcagcgggatgtcccccaggctggaggctttgggtgcacgctggcggagctgcgcaccctcatggagctgcgaggggccgaggcgctgcagaagatcgaggaggcctacggggatgtcagcgggctctgccggaggctgaagacctcacccacagagggcctggcggacaacaccaatgacctggagaagcgcaggcagatctacgggcagaacttcatccccccaaagcaacccaagaccttcctgcagctggtgtgggaggccctgcaggacgtgaccctcatcatcctggaggtggctgccatcgtctctctgggcctctcgttctatgcgccgccaggagaggagagtgaagcctgtgggaatgtgtcgggaggcgcagaagatgagggcgaggccgaagctggctggatcgagggggctgccatcctgctgtccgtcatctgtgtggtgctggtcacggccttcaatgactggagcaaggagaagcagttccgaggcctgcagagccgaattgagcaggagcagaagttcacggtcatccggaacgggcagctcctccaggtccccgtggctgcgctggtggtgggggacattgcccaggtcaagtacggcgacctgctgccagccgacggcgtgctcatccaggccaatgacctcaagatcgacgagagctccctgacgggcgagtctgaccacgtgcgcaagtcagctgacaaagatcccatgctgctctcaggcactcatgtcatggaaggttctggaagaatggtggtgaccgccgttggcgtgaattcccagacaggcatcatcttcacgctgcttggagctggcggagaggaggaagagaagaaagataagaaagctaagaagcaggatggtgcagtggccatggagatgcagcccctgaagagcgcggagggtggggagatggaggagcgggagaagaagaaagccaacgcacccaaaaaggagaagtctgtccttcaggggaagctcacaaagctagccgtgcagatcgggaaagcagggctggtgatgtctgccatcaccgtcatcatcctggtcctctactttgtgattgagacgtttgtcgtggaaggccggacatggctggcagagtgcacgccggtctatgtacaatacttcgtgaagttcttcatcattggtgtcactgtgctggtcgtggctgtcccagagggcctgcctcttgctgtcaccatctccttagcttactctgtcaagaaaatgatgaaagacaacaacctggtgcgccacctggatgcctgcgagaccatgggcaacgccacagccatctgctccgacaagacgggcacgctcaccaccaaccgtatgaccgtggtccagtcctacctaggagacacccactacaaagagattccggcccccagcgccctgacccctaagatcctcgacctcctggtccatgccatctccatcaacagtgcctataccaccaaaatactacctcctgagaaggaaggcgccctcccacgccaggtgggcaataagacggagtgcgccctgctgggcttcgtcttggacctgaagcgggacttccagcccgtgcgcgagcagatcccggaagacaagctttacaaagtgtacaccttcaactcggtccgcaagtccatgagcacagtcatccgcatgcccgacggtggcttccgcctcttcagcaagggggcctcagagatcctcttgaaaaagtgcaccaacatcttgaacagcaatggcgaactccggggctttcggcctcgggaccgggacgacatggtgaggaagatcatcgagccgatggcttgcgatggcctccgcaccatctgcatcgcctaccgggacttctctgcaggccaggagcccgactgggacaacgagaatgaggtcgtgggtgacctcacctgcatagctgtcgtgggcattgaggaccctgtgcggcccgaggtccctgaagctatccgaaaatgccagcgtgctggcatcacagtccgcatggtgactggggacaacatcaacacggcccgggccatcgcagccaaatgcggcatcatccagcccggggaggacttcctgtgcctagaagggaaggagttcaaccggcggatccgcaatgagaaaggcgagatagaacaggagcggctggacaaggtgtggcccaagctgagggtgctggcccggtcgtctcccaccgacaagcacacactggtcaaagggattatcgacagcaccactggtgagcagcggcaggtggtggctgtgacaggggatggcaccaacgatgggccggccctcaagaaggcggacgtgggcttcgccatgggcatcgcagggaccgacgtggccaaggaggcctccgacatcatcctgaccgatgacaacttcaccagcatcgtcaaggcagtcatgtggggccgtaacgtctatgacagcatctccaagttcctgcagtttcaactgacggtcaatgtggtggctgtgatcgtggccttcacaggtgcctgcattactcaggactctcctctcaaagccgtgcagatgttgtgggtgaacttgatcatggacacatttgcctctctggccctggcgacggagccacccacagagtcgctgctgctgcggaagccgtacggccgcgacaagcccctcatctcccgcaccatgatgaagaacattctgggccacgccgtgtaccagctcgccatcatcttcaccctgctgtttgtcggggagctcttcttcgacatcgacagcgggaggaatgcgcccctgcactcgccaccctcagagcactacaccatcatcttcaacacgttcgtcatgatgcagctctttaacgagatcaacgcccgcaagatccacggcgagaggaacgtgttcgacggcatcttcagcaaccccatcttctgcaccatcgttttgggcactttcgggattcagattgtcatcgtccagtttggcgggaagcccttcagctgctccccactatccacagaacagtggctctggtgcctgtttgttggtgttggggagctggtctggggacaggtcattgccaccatccccaccagccagctcaagtgcctgaaggaagccgggcacgggcccgggaaggacgagatgaccgacgaggagctggccgaaggcgaggaagagatcgaccatgccgagcgggagctccgcaggggccagatcctctggttccggggcctgaaccggattcagacgcagatggaggtagtgagtaccttcaagagaagcggttcagttcagggtgctgtgcgccggcggtcttcggtcctcagccagcttcatgacgtaaccaatctttctacccctactcacgcaattctctctgctgccaatcctaccagtgctgctgggaatccgggtggtgaaagcgttccgtagctcgctctatgaaggcctggagaaaccagaatccaagacctccattcacaacttcatggccacgcccgagtttctgatcaatgactacacccacaacatcccgctcattgacgacacggacgtggacgagaacgaggagcgcctccgggcccccccgcccccgtcccccaaccagaacaacaacgccatagacagcggcatctacctgaccacgcatgtcaccaagtcagctacctcttcagtgttttcctccagtcccgggagcccgctccacagcgtggagacgtccctctaacaagaacttgtctcagcacatgcgcacacgcacactcggactcacacgaagtcacacgcacacatgcacgcacacacacatatggggacctgcacacctgcaaaacgagggaacaactaaggtggctgaagacctttctggcagggcatttgcaaggacccaaatccattcaacaagggtgcagcctgccacaggctcctcatccggactgaggaagacgaggacagggaggaggaaaaggaggaagaggaggacaaaaagggggaggagaaggttcttcgtccaaaggaggaaggagaagaagtagaaagtgcgaagagctgagttccccacctttttttctattgatgcttcttttttaacaaactacagttttaccgtgtgtttgccatttgagctgtgtggtgggcagggggctggtttgggtttatggggagcttttgttgcacccatgcaggggcaatcagatcagcatcttcatgcaaaaaaaaaaaaaaagttgagtgctctgcaggcctgtgaagggtgccacctgagggagccgcctgcaagcggccctgcagccacaaagcaacccgccctctgcaaaaactaggcacatccgcagtgcgcatgtgtgtgcgtgcatgcacatatgtgtatgtgtgtggatctgtacacacacacgtatatatggccagatgcgtatttcaataaggaactatttactggcatgatatttgcattcctcttatcaggcattttcatttggaaatttcattattgaatgtagcaaggttgtagttgtttttttttttttttcagggaactagactgcaagaatatctttctggtcaacccatttttgtccctcatcaccccgcccccacctttcgctcctgccctctgcccggccctactgagattcccaaggagaaggccgagagggggcgctccaggtctggagcaggtataattggagcatttgcactgagacccctgccagagaggagaaaaccctttcaagggaaattttaatctaaaaggaaaaaaccaaaatattgatgagaaggagtcctccagttagtgaaaggggagtttcgttttcagctttctttggttcctactccaattccacatccttcatcctggccatgcccccaccttcaagagcatgaagcactcttggagttgtgggtcctgcccagagtccagagagcagcctcagctgagcacaggtccgagggggcgggggcagggccaagagttcaaaagaagccaatggagggagagggagcgtcagaagcccggaggagctggtggtgggagaatgacggcagggacgcagccacagttcagaccctgtcccctcagcacctggatggactcccactgtttgctttggcaaatgccgaggagtcctcggtagaccaccttgatgtctgctgtgacatcagaggtgccaccaccaaagcactcttcccaccctagtctttgtgtccagcggccaagcttaagccatgaagtcatggatttgtggctcagcaccaggtcctgaggggagcgtatcctggcagtgtgggcacctggtggccaagcctcagtttcccccaaatgagcaaaggggataaagaggggcccgacttttgccaccctcctgaggaagcccctaggtccacacagtgatgccatgggggacccttgccttccacacttgcaggtgtcacgttttgcagggaggtgtttgggccttgggctcagccactgggagacagttgggacctgagggacagaggatcggaatggaaaccaccaacgtgcactggcaccctcagaaggcttgtctcacctccaccggcatccacacaaaaccaaacaggagcaggcgtcatccccactattcccatgaatgccatgtcacccctgagcagaagcagtcaaatcttgggcaaaagaatttcggttagaaaagaaaatcccactttaaaatgccagctgcagataactcaaagccatcccttttttctaaagggcacattgagaatgtcacccatttgtaaactgttccctgatgtccttgtttaaacgataataagaaaaagggcaactccatttgttgagggtctttgtgttcttcaatgagaaatcaaatttgagacgttgaaattggagctgcgtgctgctgcactcaccggcttcttctcactctctgtcgtagacacaccgataggaccaatggccaatagatattaaaagcaaaccctcactgctgctgtataaagttgcctaatgtaaatgtctattgtttagtccctaggtcacctttgtgctgtgctgtggagttcagaaacggggtaccatgacctggaatcttttgctcttgtttttgcagtcttcaaggctgggggccctgtctcattgggaagcccctctttataaagcattatattacttggaatggcttggtcaactgtgttcagttcataaatatgttttacatttttatctgcctgttataaagatgaacaaaaaaacttaatgagaaagatcacagatacgtaataatttaaagtctgtagttgaatttcctaacttaaagaatagaccaaaatttctgtgtataaaaaaaaatgaaaggctccttacatcctggtctgggtaa

SEQ ID NO: 2738 - DNA, 4064 bp, Homo sapiens
  source 1..4064: mol_type = unassigned DNA
cagccaacagtcgctctaaatgggccttactctaactgatggatcctgtctgccctatagcctgttgcattcatgaagacagtgagggttagcagagcaccccgaccccaccctgtcctccaggatggagactccacctcccaggactccaagttcctcccctgtgggccaggcccccattcactcattcctccaggcccccggccacatgcgggactgaccacgcggtagacttcctgccgactccataccacgtgtctcaaagagcttagggcccagtgtccacgcttagcagctttctcaccgccgccaaaccttgcctgggcactgggaccgtgggtggccgcctgtccctagctgtggctgagccaagattgcacttgtgagaaggcctgacaggcagcatgggcgacatggccaatagttccatcgagttccaccccaagccccagcagcagcgggatgtcccccaggctggaggctttgggtgcacgctggcggagctgcgcaccctcatggagctgcgaggggccgaggcgctgcagaagatcgaggaggcctacggggatgtcagcgggctctgccggaggctgaagacctcacccacagagggcctggcggacaacaccaatgacctggagaagcgcaggcagatctacgggcagaacttcatccccccaaagcaacccaagaccttcctgcagctggtgtgggaggccctgcaggacgtgaccctcatcatcctggaggtggctgccatcgtctctctgggcctctcgttctatgcgccgccaggagaggagagtgaagcctgtgggaatgtgtcgggaggcgcagaagatgagggcgaggccgaagctggctggatcgagggggctgccatcctgctgtccgtcatctgtgtggtgctggtcacggccttcaatgactggagcaaggagaagcagttccgaggcctgcagagccgaattgagcaggagcagaagttcacggtcatccggaacgggcagctcctccaggtccccgtggctgcgctggtggtgggggacattgcccaggtcaagtacggcgacctgctgccagccgacggcgtgctcatccaggccaatgacctcaagatcgacgagagctccctgacgggcgagtctgaccacgtgcgcaagtcagctgacaaagatcccatgctgctctcaggcactcatgtcatggaaggttctggaagaatggtggtgaccgccgttggcgtgaattcccagacaggcatcatcttcacgctgcttggagctggcggagaggaggaagagaagaaagataagaaagctaagaagcaggatggtgcagtggccatggagatgcagcccctgaagagcgcggagggtggggagatggaggagcgggagaagaagaaagccaacgcacccaaaaaggagaagtctgtccttcaggggaagctcacaaagctagccgtgcagatcgggaaagcagggctggtgatgtctgccatcaccgtcatcatcctggtcctctactttgtgattgagacgtttgtcgtggaaggccggacatggctggcagagtgcacgccggtctatgtacaatacttcgtgaagttcttcatcattggtgtcactgtgctggtcgtggctgtcccagagggcctgcctcttgctgtcaccatctccttagcttactctgtcaagaaaatgatgaaagacaacaacctggtgcgccacctggatgcctgcgagaccatgggcaacgccacagccatctgctccgacaagacgggcacgctcaccaccaaccgtatgaccgtggtccagtcctacctaggagacacccactacaaagagattccggcccccagcgccctgacccctaagatcctcgacctcctggtccatgccatctccatcaacagtgcctataccaccaaaatactacctcctgagaaggaaggcgccctcccacgccaggtgggcaataagacggagtgcgccctgctgggcttcgtcttggacctgaagcgggacttccagcccgtgcgcgagcagatcccggaagacaagctttacaaagtgtacaccttcaactcggtccgcaagtccatgagcacagtcatccgcatgcccgacggtggcttccgcctcttcagcaagggggcctcagagatcctcttgaaaaagtgcaccaacatcttgaacagcaatggcgaactccggggctttcggcctcgggaccgggacgacatggtgaggaagatcatcgagccgatggcttgcgatggcctccgcaccatctgcatcgcctaccgggacttctctgcaggccaggagcccgactgggacaacgagaatgaggtcgtgggtgacctcacctgcatagctgtcgtgggcattgaggaccctgtgcggcccgaggtccctgaagctatccgaaaatgccagcgtgctggcatcacagtccgcatggtgactggggacaacatcaacacggcccgggccatcgcagccaaatgcggcatcatccagcccggggaggacttcctgtgcctagaagggaaggagttcaaccggcggatccgcaatgagaaaggcgagatagaacaggagcggctggacaaggtgtggcccaagctgagggtgctggcccggtcgtctcccaccgacaagcacacactggtcaaagggattatcgacagcaccactggtgagcagcggcaggtggtggctgtgacaggggatggcaccaacgatgggccggccctcaagaaggcggacgtgggcttcgccatgggcatcgcagggaccgacgtggccaaggaggcctccgacatcatcctgaccgatgacaacttcaccagcatcgtcaaggcagtcatgtggggccgtaacgtctatgacagcatctccaagttcctgcagtttcaactgacggtcaatgtggtggctgtgatcgtggccttcacaggtgcctgcattactcaggactctcctctcaaagccgtgcagatgttgtgggtgaacttgatcatggacacatttgcctctctggccctggcgacggagccacccacagagtcgctgctgctgcggaagccgtacggccgcgacaagcccctcatctcccgcaccatgatgaagaacattctgggccacgccgtgtaccagctcgccatcatcttcaccctgctgtttgtcggggagctcttcttcgacatcgacagcgggaggaatgcgcccctgcactcgccaccctcagagcactacaccatcatcttcaacacgttcgtcatgatgcagctctttaacgagatcaacgcccgcaagatccacggcgagaggaacgtgttcgacggcatcttcagcaaccccatcttctgcaccatcgttttgggcactttcgggattcagattgtcatcgtccagtttggcgggaagcccttcagctgctccccactatccacagaacagtggctctggtgcctgtttgttggtgttggggagctggtctggggacaggtcattgccaccatccccaccagccagctcaagtgcctgaaggaagccgggcacgggcccgggaaggacgagatgaccgacgaggagctggccgaaggcgaggaagagatcgaccatgccgagcgggagctccgcaggggccagatcctctggttccggggcctgaaccggattcagacgcagatggaggtagtgagtaccttcaagagaagcggttcagttcagggtgctgtgcgccggcggtcttcggtcctcagccagcttcatgacgtaaccaatctttctacccctactcacgcaattctctctgctgccaatcctaccagtgctgctgggagtgagtcttgacttcccttttctctcataaatggcatctctggggaagaataagcctccccagctcggccttctctcttttgcagtcttgcattccgctcaccgtggcttttctgttctttctttaccgccctgtccagtccttcccgcccagacggtgtctctcgaaagccatattcttttatgaaacgtattcaacccatggca

SEQ ID NO: 2739 - DNA, 4658 bp, Homo sapiens
  source 1..4658: mol_type = unassigned DNA
gctggttgttgctaaggttgctgccatggtaacatgcacatcctgtttacaccttcatctgggcaagttggtctaagctaggaacctacctaccctggacaactactatcatcaccacctggggacaccaatcatcgtgacacggagtccaccttccactcagttcccccatcctcttcctcctctcgctgccagacttcatacggaagaaaggatctagacttcggacggctactcgggagcttattgcacaagatatattcaatctattccctcactgggcccccagagaagcaagaagtaggaagaagttgagacagggaggcaggagacactggtcagttgaagggaaacgctacatcttctctggttgaggggcttggtaacagcaggcaaaatgacgaacccatcagaccgtgtcttgcctgccaactcgatggccgagagccgtgaaggggactttggctgcacagtaatggaactgaggaagctcatggagctgcgttcaagggatgcactgacccagattaatgtccactatggaggtgtacagaatctctgcagtagactgaaaacctcccctgtggaaggtctgtctgggaaccctgcagatctggagaaacgtaggcaggtgtttggacacaacgtgatcccccccaaaaagcccaagactttcttagaattagtgtgggaagctcttcaagatgtcacgcttatcatcctggagattgcagccatcatctccctggtcctgtccttttatcgccctgctggtgaagaaaatgaactgtgtggtcaagtcgcaactaccccagaagatgaaaatgaggcacaagctggctggattgagggggcagccatccttttctcagtgatcatcgtggtgttagtgactgcctttaatgattggagcaaagagaagcaattccgggggctgcagtgccgcattgaacaggagcaaaagttctccatcatccgaaacggtcaactcatccagctccctgtggctgagattgtggttggtgatattgcccaagtcaaatacggtgatctgctgcctgcagatggaatcctgatccaagggaatgatctgaagattgatgagagctctctgacaggggaatctgaccatgtcaagaagtccctggacaaagaccccatgttgctctcagggacccatgtcatggaaggttctggccggatggtggtgacagctgttggtgtcaactctcagactggaatcatccttactctcttgggggtcaatgaggatgacgaaggggagaaaaagaagaaaggtaaaaaacaaggagtccctgaaaatcgcaacaaagcaaagacccaagacggagtggccctggaaatccagccactcaacagccaggagggaatcgacaatgaggaaaaggacaagaaggcagtcaaggtgcctaaaaaggagaagtcagtgctgcagggcaagctgactcgcctggctgttcagattgggaaagccggtctgctcatgtctgctctcacggttttcatcctgattctatactttgtgattgacaactttgtgataaatcgcagaccatggctccctgagtgtactcccatctacatccagtactttgtcaagttcttcatcatcggcatcactgtactggtggtggctgtgccagaggggctgcctctggctgtcaccatctcactggcctactctgtgaagaaaatgatgaaagacaataacctagtacggcacttggatgcttgtgagaccatgggcaacgccaccgccatctgctctgataagacaggcacgttgaccatgaaccgcatgactgtggtacaagcttatattgggggcatccattaccgtcaaatcccaagccctgatgtcttcctgcccaaagtcctggacctcattgtcaatggcatttctatcaacagtgcttatacctccaagattctgcctccagagaaggagggaggcctgcctcggcaggtgggcaacaagaccgagtgtgctctgctaggctttgtcacagatctgaagcaggattatcaggctgtgcgtaatgaagtgcccgaggagaagctctacaaggtgtacacctttaactcagtgcgcaagtcaatgagcaccgtcatcaggaatcccaacggtggcttccgtatgtacagcaagggcgcctctgagatcatcttgcgcaagtgtaatcgaatcctggaccggaaaggggaagcagtgccattcaagaataaagacagagatgatatggtacgcactgtcatcgagcccatggcctgtgatggactccggactatctgcatagcttaccgggacttcgatgacacagagccctcttgggacaatgagaatgagatcctcaccgaactgacctgtatcgcggtggtgggcattgaggaccctgtgcgcccagaggtgccagatgctattgccaaatgcaaacaagctggcattactgtcagaatggtgacaggtgacaacatcaacacagcccgggccattgccaccaaatgtggcattctgacacctggggatgacttcctgtgcttagaaggcaaagaattcaaccggctcatccgcaacgagaaaggcgaggtagagcaagaaaagctggacaagatctggcctaagcttcgggtcctggcgcgatcttctcccactgacaagcacaccctggtgaaaggcataattgacagcactgttggggaacaccggcaggtcgtggctgtcactggtgatggcacaaatgacgggcctgctctgaagaaagcggatgttggttttgccatgggcatcgcaggcacagatgtagcaaaggaggcttcagacatcatcctaacagatgacaacttcaccagcattgtgaaggcagtgatgtggggacgaaatgtctatgacagcatctccaagttcctgcagttccagctcactgtcaatgtggtggccgtgattgtagccttcactggagcctgtatcactcaggattccccattgaaagctgtgcagatgttgtgggttaatctgatcatggacacttttgcttcattggccctggccacagagccccctacggaatctctgttgaagcggcgcccctatggccgaaataagcctctgatctcacgcactatgatgaagaacatcttgggccatgcattctatcagctcattgtcatctttatccttgtctttgcgggtgagaaattctttgatattgatagtgggaggaaggcacctctacattcaccacccagccagcactataccattgtttttaacaccttcgtgctgatgcagctcttcaatgaaatcaactcccgaaagatccatggagagaagaacgtcttttcaggcatctaccgcaacattatcttctgctctgtagtcttgggcacattcatctgccagattttcatcgtggaatttgggggtaaacccttcagttgtacaagcctcagcctgtctcagtggctgtggtgtctcttcattgggattggagaacttctgtggggccagttcatctccgcaatacctacccgatccctgaagttcctgaaggaggctgggcatggcaccaccaaagaggagatcaccaaggatgccgagggactggatgagattgaccatgctgagatggagctgcgccgaggccagatcctctggttccggggcctgaaccgtatccagactcagatcgacgtaattaacacattccagacgggagcctcttttaagggagtcctaaggcgacagaacatgggtcaacaccttgatgtaaaacttgttcctagttcatcctatgtagcagttgcaccagtcaaatcttcccccaccacttctgttcctgctgtttcatctcctcctatgggcaatcaaagtggtcaaagcgttccatagttccctccacgaaagcattcagaaaccctacaaccaaaagtccatccacagcttcatgacccaccctgaattcgccatagaggaggagttgccacgaacaccactcctggatgaggaagaggaggaaaatcctgacaaggcttctaagtttgggactagggtgctcctgttggatggtgaggtcactccatatgccaatacaaacaacaatgcggtggattgcaaccaagtgcagctcccccagtcggacagctctctacagagcctagagacatcagtttgaattttctttctctgactctcatccctattttacctatttccattttcgtctatcccatctatgaggtgatgatgggacttttcattgtcacgtcagctgctgtgttaacagcagtgtgtgtgaagtgaacctctacctgaccatgaagaggcaagagcacagacttacaaggatttcaacttaagcttgacttggggtttgtagcgggacccagtcaaaccccattcaggtcatggtagaatctactccttggtagtcacttgtcatttttaaagaaatgatgacaatcctcttggcatcaccccaccccacattctccccgatgttcctctcctgaattctggattttgtcctacaagtctgtgccatttataagctaagttgagggttcagagggagacaaatatccccaagtgaaatatgttgcggtagagatggaatgtataaaatccgccagtagtgtga

SEQ ID NO: 2740 - DNA, 613 bp, Homo sapiens
  source 1..613: mol_type = unassigned DNA
ggattggagaacttctgtggggccagttcatctccgcaatacctacccgatccctgaagttcctgaaggaggctgggcatggcaccaccaaagaggagatcaccaaggatgccgagggactggatgagattgaccatgctgagatggagctgcgccgaggccagatcctctggttccggggcctgaaccgtatccagactcagatcgacgtaattaacacattccagacgggagcctcttttaagggagtcctaaggcgacagaacatgggtcaacaccttgatgtaaaacttgttcctagttcatcctatgtagcagttgcaccagtcaaatcttcccccaccacttctgttcctgctgtttcatctcctcctatgggcagtgagtgatagtctattatgatgcatgatttgctaaaatgaccacaagagagcacgtggcatccactttaaccaaccatggttatcttttccttttggtttttccctttgatattttgacttaagggaagaaaaagacaaaaatcctactctaaaaccagactgtgtgcccttgtattttatttttgtaatgtagaaaagctattaaaccttaactgttttaaagacaataa

SEQ ID NO: 2741 - DNA, 8968 bp, Homo sapiens
  source 1..8968: mol_type = unassigned DNA
caccctcacccctcctccacccctactcagctttctattcaacaagtgagagcaagggcggggaagaaagccgacaggggagaggattgcttccctttcttttcccattcccccttaagacgaaccaggaagtaaccgcaagaatcgggccaccttaacagtagagtaatggtttggcctcgcgccaagtcccacctctgttccagctcctgctcctcccctctctcttcccgcactgcttggggagagctggtgagcaagagtctggcccgagttagctagagctgttgccatgacaagcattttcttaagaaagctctgctgttgagatcgtccaaagctgggggctgggagggggggcacgaacttcgtggggcaccatccctccgaagagagcaagatcagagacacccgcccagctctcctgcaccctttttctttcaggaacctgagaggtccttcccattggaggggcagggggaggagacccagcccactccccggccttagccagaaaggcaagagagcaaagccagcgtctctagcttggttgccacactggggagactggtgggtggtcaccccaccctaccctcatccatggaaacccggagggagagtcccgcctgaagaaacctggatctttgctagaaagagagagatccagttgtcatcggtatccaggaagctctcctcttcctcctcctgacgtctactactacagttgctggttgttgctaaggttgctgccatggtaacatgcacatcctgtttacaccttcatctgggcaagttggtctaagctaggaacctacctaccctggacaactactatcatcaccacctggggacaccaatcatcgtgacacggagtccaccttccactcagttcccccatcctcttcctcctctcgctgccagacttcatacggaagaaaggatctagacttcggacggctactcgggagcttattgcacaagatatattcaatctattccctcactgggcccccagagaagcaagaagtaggaagaagttgagacagggaggcaggagacactggtcagttgaagggaaacgctacatcttctctggttgaggggcttggtaacagcaggcaaaatgacgaacccatcagaccgtgtcttgcctgccaactcgatggccgagagccgtgaaggggactttggctgcacagtaatggaactgaggaagctcatggagctgcgttcaagggatgcactgacccagattaatgtccactatggaggtgtacagaatctctgcagtagactgaaaacctcccctgtggaaggtctgtctgggaaccctgcagatctggagaaacgtaggcaggtgtttggacacaacgtgatcccccccaaaaagcccaagactttcttagaattagtgtgggaagctcttcaagatgtcacgcttatcatcctggagattgcagccatcatctccctggtcctgtccttttatcgccctgctggtgaagaaaatgaactgtgtggtcaagtcgcaactaccccagaagatgaaaatgaggcacaagctggctggattgagggggcagccatccttttctcagtgatcatcgtggtgttagtgactgcctttaatgattggagcaaagagaagcaattccgggggctgcagtgccgcattgaacaggagcaaaagttctccatcatccgaaacggtcaactcatccagctccctgtggctgagattgtggttggtgatattgcccaagtcaaatacggtgatctgctgcctgcagatggaatcctgatccaagggaatgatctgaagattgatgagagctctctgacaggggaatctgaccatgtcaagaagtccctggacaaagaccccatgttgctctcagggacccatgtcatggaaggttctggccggatggtggtgacagctgttggtgtcaactctcagactggaatcatccttactctcttgggggtcaatgaggatgacgaaggggagaaaaagaagaaaggtaaaaaacaaggagtccctgaaaatcgcaacaaagcaaagacccaagacggagtggccctggaaatccagccactcaacagccaggagggaatcgacaatgaggaaaaggacaagaaggcagtcaaggtgcctaaaaaggagaagtcagtgctgcagggcaagctgactcgcctggctgttcagattgggaaagccggtctgctcatgtctgctctcacggttttcatcctgattctatactttgtgattgacaactttgtgataaatcgcagaccatggctccctgagtgtactcccatctacatccagtactttgtcaagttcttcatcatcggcatcactgtactggtggtggctgtgccagaggggctgcctctggctgtcaccatctcactggcctactctgtgaagaaaatgatgaaagacaataacctagtacggcacttggatgcttgtgagaccatgggcaacgccaccgccatctgctctgataagacaggcacgttgaccatgaaccgcatgactgtggtacaagcttatattgggggcatccattaccgtcaaatcccaagccctgatgtcttcctgcccaaagtcctggacctcattgtcaatggcatttctatcaacagtgcttatacctccaagattctgcctccagagaaggagggaggcctgcctcggcaggtgggcaacaagaccgagtgtgctctgctaggctttgtcacagatctgaagcaggattatcaggctgtgcgtaatgaagtgcccgaggagaagctctacaaggtgtacacctttaactcagtgcgcaagtcaatgagcaccgtcatcaggaatcccaacggtggcttccgtatgtacagcaagggcgcctctgagatcatcttgcgcaagtgtaatcgaatcctggaccggaaaggggaagcagtgccattcaagaataaagacagagatgatatggtacgcactgtcatcgagcccatggcctgtgatggactccggactatctgcatagcttaccgggacttcgatgacacagagccctcttgggacaatgagaatgagatcctcaccgaactgacctgtatcgcggtggtgggcattgaggaccctgtgcgcccagaggtgccagatgctattgccaaatgcaaacaagctggcattactgtcagaatggtgacaggtgacaacatcaacacagcccgggccattgccaccaaatgtggcattctgacacctggggatgacttcctgtgcttagaaggcaaagaattcaaccggctcatccgcaacgagaaaggcgaggtagagcaagaaaagctggacaagatctggcctaagcttcgggtcctggcgcgatcttctcccactgacaagcacaccctggtgaaaggcataattgacagcactgttggggaacaccggcaggtcgtggctgtcactggtgatggcacaaatgacgggcctgctctgaagaaagcggatgttggttttgccatgggcatcgcaggcacagatgtagcaaaggaggcttcagacatcatcctaacagatgacaacttcaccagcattgtgaaggcagtgatgtggggacgaaatgtctatgacagcatctccaagttcctgcagttccagctcactgtcaatgtggtggccgtgattgtagccttcactggagcctgtatcactcaggattccccattgaaagctgtgcagatgttgtgggttaatctgatcatggacacttttgcttcattggccctggccacagagccccctacggaatctctgttgaagcggcgcccctatggccgaaataagcctctgatctcacgcactatgatgaagaacatcttgggccatgcattctatcagctcattgtcatctttatccttgtctttgcgggtgagaaattctttgatattgatagtgggaggaaggcacctctacattcaccacccagccagcactataccattgtttttaacaccttcgtgctgatgcagctcttcaatgaaatcaactcccgaaagatccatggagagaagaacgtcttttcaggcatctaccgcaacattatcttctgctctgtagtcttgggcacattcatctgccagattttcatcgtggaatttgggggtaaacccttcagttgtacaagcctcagcctgtctcagtggctgtggtgtctcttcattgggattggagaacttctgtggggccagttcatctccgcaatacctacccgatccctgaagttcctgaaggaggctgggcatggcaccaccaaagaggagatcaccaaggatgccgagggactggatgagattgaccatgctgagatggagctgcgccgaggccagatcctctggttccggggcctgaaccgtatccagactcagatcaaagtggtcaaagcgttccatagttccctccacgaaagcattcagaaaccctacaaccaaaagtccatccacagcttcatgacccaccctgaattcgccatagaggaggagttgccacgaacaccactcctggatgaggaagaggaggaaaatcctgacaaggcttctaagtttgggactagggtgctcctgttggatggtgaggtcactccatatgccaatacaaacaacaatgcggtggattgcaaccaagtgcagctcccccagtcggacagctctctacagagcctagagacatcagtttgaattttctttctctgactctcatccctattttacctatttccattttcgtctatcccatctatgaggtgatgatgggacttttcattgtcacgtcagctgctgtgttaacagcagtgtgtgtgaagtgaacctctacctgaccatgaagaggcaagagcacagacttacaaggatttcaacttaagcttgacttggggtttgtagcgggacccagtcaaaccccattcaggtcatggtagaatctactccttggtagtcacttgtcatttttaaagaaatgatgacaatcctcttggcatcaccccaccccacattctccccgatgttcctctcctgaattctggattttgtcctacaagtctgtgccatttataagctaagttgagggttcagagggagacaaatatccccaagtgaaatatgttgcggtagagatggaatgtataaaatccgccagtagtgtgattgtttttcaatttttcccactttgaaaacttacacctaaaggcctgtaggcctctaactctttctgccctttcattcaaacctctccaaagttctttgtcttttgtcttcccttcctttccttttttttttttttttttatgatgattaagaaaatggaaaggatatggatgaattgtgtaaacttagatccttctcccttttggcccaaaagaacccttgatttagttccagaatccaaccagtttctttgttaaaagggtccttttgaagcaattaagtgctggtaagaatatttctctgttgttgccaggttaccttctgcttttaaattgccatcttgtaaagtgtatgtggttcttaagtgccagggagatcagccttgcccatgaaggttgcatatgtgtggtatacagtttttacctgaaagcctgagctttctcttattcctaaagtggtggcaaaagaatgaactgggtatgaccctgcccccttactgggcttggatattgaggaccagacgctgccaaatctaggacaagacagaccatcaaagcagacttttgtgggctcctctttggggtgaccactgctttcaaagccatctgccaaggctctccagggcaggacctgactggtggggaatgagtgttcagaagccttgggagaggccaaagagccattctagcatgatctgagaaaaccttcctgcagaggccagaaaccttgagcttaggtgcctggggaccagcttcgacattctctccagtttctgattctaatttttgccacgtgtcacaacttttccagtctctgagaaggtcccagcctttctcaaatattctgattttgaaaatatgtatccaaagtgggaggcccctgtgacattttgccaacttaaacgagaaaaagaccccccgcacccggcacactcccccttcctccagccccgcttcagccacatgctccagctgctgcccagtaaagccctgtgcctttttttcccctgaatactgcccaaagcatccccttcccatctgcctctcaggagttggggactttgctaggagattttttaagtgttccttactgggacaacgtggagccacgtttgcaggagctccatttgtatccctgctggtgttgacttctgtgtaggggccagttcatgtccctgactctcacctcccattagataaatgaagcccacccccctttctagagtgatgagagtcaagaagaggggatgtatgaacggccaaattcccatgtgagaggaagatgacctgatccacctagccttttcttctggatctgtcctccctcacccctttcacctgagctgtccacagtaggaaacataaagaaacaatgtcccctacatatccccatgactacataatccatcatcgtaggaaataggaaagcaaatttgattttggttttgtaaaacgtacatgcttcaataattcttttttgtgtcttaaatactcataggggaaaaaaacagctcacccaaggtgttaggtttcacatatatattcatcaactattttagaagatttaattctatcaaatcttgtattacctcagatcattttaaatagcaagccaataacgagctttgaaggctattttaccattcctgttcacaaaaggttctcatggtgcctgacaggttacccttgagggcttgtgtctactttttaaaagtcaatggttttttttcttgtgttctagtttccataataggagagaaaatatagaaatatatgcaaaaattatagttttctttagatcagaaactgatatttttgggtcagccatatgtattttgtttaaaggatttaaaataaagtgccgtcatgtagccctgtggaagggagcacataaccagctgtttggcatgacaggtgacttagtatatttgtaattggttttaaaaccaatacaccatactttctttctgcaaacagccatctttatacttagggaagaaaaattgttgggttctagacttttttaatataaattttgttgatatggaattaggtaagtttaagtgtctatgtgcatatgttttttatataagttttttctattcagtttcactgatccaactggcagtgggtaaatatggcataagttaataacacttttccccaaaatggtgctttggatttgaaaagggtctgatggggagaaggagaacgtatcatcctagcttcctctcttaataaacctagaaaaacgggtagtaaactgtggatagtcaggaaaacacccagcaagggacacagctgtcaggaaatgaatcttccccccaacccccaccatgcagatggatagacagaatctttcctgactagtcattaggatcaggggcctctgttggatttgtgtttcttgaagaatagctggcagagtggtataaaagacacgaatatctcctggtctataaggatactctgatttggggtttgcatttttcatggtttttatttcctgttccccctggagttttccattagtgagtttttgtgcaaggatcttatttgtgatgccttccctcccctagaaagattttgtgcaatatattaaatggggacagaattctaaatggataaaacaatggctggttctagccctgagtgacagtcttaaggctagatccttcccatagtatcatctgtcctctggaatgactctcctgtccctaaaggggttaagagagagatcacctagaaatccctctggacacttgtgggttctttagggtttgagtttcttcttccccttgagcttcagagaggagagttggcatggttaaatctgaatggttacctcactgctgaaaacccagaggggcgtggcacactcgcttgtgtggaaaagcctctaaatgcatcccttcctttctttcctgcttcctttgccttacaattgaagcagcccgtggtaccatcacagtatgcagagacttcctcacctttcatatctagggaccacccccgatgcattggtgagggtgggcacttataaatgcctgctattgttaagccattccagcctcttcctctgaatagaccagacgccctttcacttagttcagtgccagtccttttgccttcccaaccctgctgttaggcctgctgttccctttgctcttgattaggagagatggaaggagatgagctcccataactgaattggcctttggttcatgttttctccccatatgtatatatgccatatgtgaatatgccatatatatgtgccaacaaatctatctacgttgttcttttcaaattagcacgcagataggaattttgagtttcttcttcttttagtaactagtataacaagcactggtatttttgtacaaaaaagaaaaacaaaagattgactattgtggtctgcatgacataaacaaacaaatggtgatatcaaagcaacgtataccccagtccagtgtgtgttgccataatttgcaattcagcttaacagtgcacccaatctatatttgcattttgatattatttaagctctatgtacaaggttttgcatgtatttatatggttcttagggaaaaaaaatgctataaactgcaaatctgaaattcaaatgtgttgttccactgagaccagaagaagaagaggagttttaaaagggataatttgttggagccaataaagctttttgctgatgaacagaaaccaatactgctgtgcactgagaataaaaactcatgcccacttgtaa

SEQ ID NO: 2742 - DNA, 8905 bp, Homo sapiens
  source 1..8905: mol_type = unassigned DNA
ttggggagagctggtgagcaagagtctggcccgagttagctagagctgttgccatgacaagcattttcttaagaaagctctgctgttgagatcgtccaaagctgggggctgggagggggggcacgaacttcgtggggcaccatccctccgaagagagcaagatcagagacacccgcccagctctcctgcaccctttttctttcaggaacctgagaggtccttcccattggaggggcagggggaggagacccagcccactccccggccttagccagaaaggcaagagagcaaagccagcgtctctagcttggttgccacactggggagactggtgggtggtcaccccaccctaccctcatccatggaaacccggagggagagtcccgcctgaagaaacctggatctttgctagaaagagagagatccagttgtcatcggtatccaggaagctctcctcttcctcctcctgacgtctactactacagttgctggttgttgctaaggttgctgccatggtaacatgcacatcctgtttacaccttcatctgggcaagttggtctaagctaggaacctacctaccctggacaactactatcatcaccacctggggacaccaatcatcgtgacacggagtccaccttccactcagttcccccatcctcttcctcctctcgctgccagacttcatacggaagaaaggatctagacttcggacggctactcgggagcttattgcacaagatatattcaatctattccctcactgggcccccagagaagcaagaagtaggaagaagttgagacagggaggcaggagacactggtcagttgaagggaaacgctacatcttctctggttgaggggcttggtaacagcaggcaaaatgacgaacccatcagaccgtgtcttgcctgccaactcgatggccgagagccgtgaaggggactttggctgcacagtaatggaactgaggaagctcatggagctgcgttcaagggatgcactgacccagattaatgtccactatggaggtgtacagaatctctgcagtagactgaaaacctcccctgtggaaggtctgtctgggaaccctgcagatctggagaaacgtaggcaggtgtttggacacaacgtgatcccccccaaaaagcccaagactttcttagaattagtgtgggaagctcttcaagatgtcacgcttatcatcctggagattgcagccatcatctccctggtcctgtccttttatcgccctgctggtgaagaaaatgaactgtgtggtcaagtcgcaactaccccagaagatgaaaatgaggcacaagctggctggattgagggggcagccatccttttctcagtgatcatcgtggtgttagtgactgcctttaatgattggagcaaagagaagcaattccgggggctgcagtgccgcattgaacaggagcaaaagttctccatcatccgaaacggtcaactcatccagctccctgtggctgagattgtggttggtgatattgcccaagtcaaatacggtgatctgctgcctgcagatggaatcctgatccaagggaatgatctgaagattgatgagagctctctgacaggggaatctgaccatgtcaagaagtccctggacaaagaccccatgttgctctcagggacccatgtcatggaaggttctggccggatggtggtgacagctgttggtgtcaactctcagactggaatcatccttactctcttgggggtcaatgaggatgacgaaggggagaaaaagaagaaaggtaaaaaacaaggagtccctgaaaatcgcaacaaagcaaagacccaagacggagtggccctggaaatccagccactcaacagccaggagggaatcgacaatgaggaaaaggacaagaaggcagtcaaggtgcctaaaaaggagaagtcagtgctgcagggcaagctgactcgcctggctgttcagattgggaaagccggtctgctcatgtctgctctcacggttttcatcctgattctatactttgtgattgacaactttgtgataaatcgcagaccatggctccctgagtgtactcccatctacatccagtactttgtcaagttcttcatcatcggcatcactgtactggtggtggctgtgccagaggggctgcctctggctgtcaccatctcactggcctactctgtgaagaaaatgatgaaagacaataacctagtacggcacttggatgcttgtgagaccatgggcaacgccaccgccatctgctctgataagacaggcacgttgaccatgaaccgcatgactgtggtacaagcttatattgggggcatccattaccgtcaaatcccaagccctgatgtcttcctgcccaaagtcctggacctcattgtcaatggcatttctatcaacagtgcttatacctccaagattctgcctccagagaaggagggaggcctgcctcggcaggtgggcaacaagaccgagtgtgctctgctaggctttgtcacagatctgaagcaggattatcaggctgtgcgtaatgaagtgcccgaggagaagctctacaaggtgtacacctttaactcagtgcgcaagtcaatgagcaccgtcatcaggaatcccaacggtggcttccgtatgtacagcaagggcgcctctgagatcatcttgcgcaagtgtaatcgaatcctggaccggaaaggggaagcagtgccattcaagaataaagacagagatgatatggtacgcactgtcatcgagcccatggcctgtgatggactccggactatctgcatagcttaccgggacttcgatgacacagagccctcttgggacaatgagaatgagatcctcaccgaactgacctgtatcgcggtggtgggcattgaggaccctgtgcgcccagaggtgccagatgctattgccaaatgcaaacaagctggcattactgtcagaatggtgacaggtgacaacatcaacacagcccgggccattgccaccaaatgtggcattctgacacctggggatgacttcctgtgcttagaaggcaaagaattcaaccggctcatccgcaacgagaaaggcgaggtagagcaagaaaagctggacaagatctggcctaagcttcgggtcctggcgcgatcttctcccactgacaagcacaccctggtgaaaggcataattgacagcactgttggggaacaccggcaggtcgtggctgtcactggtgatggcacaaatgacgggcctgctctgaagaaagcggatgttggttttgccatgggcatcgcaggcacagatgtagcaaaggaggcttcagacatcatcctaacagatgacaacttcaccagcattgtgaaggcagtgatgtggggacgaaatgtctatgacagcatctccaagttcctgcagttccagctcactgtcaatgtggtggccgtgattgtagccttcactggagcctgtatcactcaggattccccattgaaagctgtgcagatgttgtgggttaatctgatcatggacacttttgcttcattggccctggccacagagccccctacggaatctctgttgaagcggcgcccctatggccgaaataagcctctgatctcacgcactatgatgaagaacatcttgggccatgcattctatcagctcattgtcatctttatccttgtctttgcgggtgagaaattctttgatattgatagtgggaggaaggcacctctacattcaccacccagccagcactataccattgtttttaacaccttcgtgctgatgcagctcttcaatgaaatcaactcccgaaagatccatggagagaagaacgtcttttcaggcatctaccgcaacattatcttctgctctgtagtcttgggcacattcatctgccagattttcatcgtggaatttgggggtaaacccttcagttgtacaagcctcagcctgtctcagtggctgtggtgtctcttcattgggattggagaacttctgtggggccagttcatctccgcaatacctacccgatccctgaagttcctgaaggaggctgggcatggcaccaccaaagaggagatcaccaaggatgccgagggactggatgagattgaccatgctgagatggagctgcgccgaggccagatcctctggttccggggcctgaaccgtatccagactcagatcgacgtaattaacacattccagacgggagcctcttttaagggagtcctaaggcgacagaacatgggtcaacaccttgatgtaaaacttgttcctagttcatcctatgtagcagttgcaccagtcaaatcttcccccaccacttctgttcctgctgtttcatctcctcctatgggcaatcaaagtggtcaaagcgttccatagttccctccacgaaagcattcagaaaccctacaaccaaaagtccatccacagcttcatgacccaccctgaattcgccatagaggaggagttgccacgaacaccactcctggatgaggaagaggaggaaaatcctgacaaggcttctaagtttgggactagggtgctcctgttggatggtgaggtcactccatatgccaatacaaacaacaatgcggtggattgcaaccaagtgcagctcccccagtcggacagctctctacagagcctagagacatcagtttgaattttctttctctgactctcatccctattttacctatttccattttcgtctatcccatctatgaggtgatgatgggacttttcattgtcacgtcagctgctgtgttaacagcagtgtgtgtgaagtgaacctctacctgaccatgaagaggcaagagcacagacttacaaggatttcaacttaagcttgacttggggtttgtagcgggacccagtcaaaccccattcaggtcatggtagaatctactccttggtagtcacttgtcatttttaaagaaatgatgacaatcctcttggcatcaccccaccccacattctccccgatgttcctctcctgaattctggattttgtcctacaagtctgtgccatttataagctaagttgagggttcagagggagacaaatatccccaagtgaaatatgttgcggtagagatggaatgtataaaatccgccagtagtgtgattgtttttcaatttttcccactttgaaaacttacacctaaaggcctgtaggcctctaactctttctgccctttcattcaaacctctccaaagttctttgtcttttgtcttcccttcctttccttttttttttttttttttatgatgattaagaaaatggaaaggatatggatgaattgtgtaaacttagatccttctcccttttggcccaaaagaacccttgatttagttccagaatccaaccagtttctttgttaaaagggtccttttgaagcaattaagtgctggtaagaatatttctctgttgttgccaggttaccttctgcttttaaattgccatcttgtaaagtgtatgtggttcttaagtgccagggagatcagccttgcccatgaaggttgcatatgtgtggtatacagtttttacctgaaagcctgagctttctcttattcctaaagtggtggcaaaagaatgaactgggtatgaccctgcccccttactgggcttggatattgaggaccagacgctgccaaatctaggacaagacagaccatcaaagcagacttttgtgggctcctctttggggtgaccactgctttcaaagccatctgccaaggctctccagggcaggacctgactggtggggaatgagtgttcagaagccttgggagaggccaaagagccattctagcatgatctgagaaaaccttcctgcagaggccagaaaccttgagcttaggtgcctggggaccagcttcgacattctctccagtttctgattctaatttttgccacgtgtcacaacttttccagtctctgagaaggtcccagcctttctcaaatattctgattttgaaaatatgtatccaaagtgggaggcccctgtgacattttgccaacttaaacgagaaaaagaccccccgcacccggcacactcccccttcctccagccccgcttcagccacatgctccagctgctgcccagtaaagccctgtgcctttttttcccctgaatactgcccaaagcatccccttcccatctgcctctcaggagttggggactttgctaggagattttttaagtgttccttactgggacaacgtggagccacgtttgcaggagctccatttgtatccctgctggtgttgacttctgtgtaggggccagttcatgtccctgactctcacctcccattagataaatgaagcccacccccctttctagagtgatgagagtcaagaagaggggatgtatgaacggccaaattcccatgtgagaggaagatgacctgatccacctagccttttcttctggatctgtcctccctcacccctttcacctgagctgtccacagtaggaaacataaagaaacaatgtcccctacatatccccatgactacataatccatcatcgtaggaaataggaaagcaaatttgattttggttttgtaaaacgtacatgcttcaataattcttttttgtgtcttaaatactcataggggaaaaaaacagctcacccaaggtgttaggtttcacatatatattcatcaactattttagaagatttaattctatcaaatcttgtattacctcagatcattttaaatagcaagccaataacgagctttgaaggctattttaccattcctgttcacaaaaggttctcatggtgcctgacaggttacccttgagggcttgtgtctactttttaaaagtcaatggttttttttcttgtgttctagtttccataataggagagaaaatatagaaatatatgcaaaaattatagttttctttagatcagaaactgatatttttgggtcagccatatgtattttgtttaaaggatttaaaataaagtgccgtcatgtagccctgtggaagggagcacataaccagctgtttggcatgacaggtgacttagtatatttgtaattggttttaaaaccaatacaccatactttctttctgcaaacagccatctttatacttagggaagaaaaattgttgggttctagacttttttaatataaattttgttgatatggaattaggtaagtttaagtgtctatgtgcatatgttttttatataagttttttctattcagtttcactgatccaactggcagtgggtaaatatggcataagttaataacacttttccccaaaatggtgctttggatttgaaaagggtctgatggggagaaggagaacgtatcatcctagcttcctctcttaataaacctagaaaaacgggtagtaaactgtggatagtcaggaaaacacccagcaagggacacagctgtcaggaaatgaatcttccccccaacccccaccatgcagatggatagacagaatctttcctgactagtcattaggatcaggggcctctgttggatttgtgtttcttgaagaatagctggcagagtggtataaaagacacgaatatctcctggtctataaggatactctgatttggggtttgcatttttcatggtttttatttcctgttccccctggagttttccattagtgagtttttgtgcaaggatcttatttgtgatgccttccctcccctagaaagattttgtgcaatatattaaatggggacagaattctaaatggataaaacaatggctggttctagccctgagtgacagtcttaaggctagatccttcccatagtatcatctgtcctctggaatgactctcctgtccctaaaggggttaagagagagatcacctagaaatccctctggacacttgtgggttctttagggtttgagtttcttcttccccttgagcttcagagaggagagttggcatggttaaatctgaatggttacctcactgctgaaaacccagaggggcgtggcacactcgcttgtgtggaaaagcctctaaatgcatcccttcctttctttcctgcttcctttgccttacaattgaagcagcccgtggtaccatcacagtatgcagagacttcctcacctttcatatctagggaccacccccgatgcattggtgagggtgggcacttataaatgcctgctattgttaagccattccagcctcttcctctgaatagaccagacgccctttcacttagttcagtgccagtccttttgccttcccaaccctgctgttaggcctgctgttccctttgctcttgattaggagagatggaaggagatgagctcccataactgaattggcctttggttcatgttttctccccatatgtatatatgccatatgtgaatatgccatatatatgtgccaacaaatctatctacgttgttcttttcaaattagcacgcagataggaattttgagtttcttcttcttttagtaactagtataacaagcactggtatttttgtacaaaaaagaaaaacaaaagattgactattgtggtctgcatgacataaacaaacaaatggtgatatcaaagcaacgtataccccagtccagtgtgtgttgccataatttgcaattcagcttaacagtgcacccaatctatatttgcattttgatattatttaagctctatgtacaaggttttgcatgtatttatatggttcttagggaaaaaaaatgctataaactgcaaatctgaaattcaaatgtgttgttccactgagaccagaagaagaagaggagttttaaaagggataatttgttggagccaataaagctttttgctgatgaacagaaaccaatactgctgtgcactgagaataaaaactcatgcccacttgt

SEQ ID NO: 2743 - DNA, 8869 bp, Homo sapiens
  source 1..8869: mol_type = unassigned DNA
ttggggagagctggtgagcaagagtctggcccgagttagctagagctgttgccatgacaagcattttcttaagaaagctctgctgttgagatcgtccaaagctgggggctgggagggggggcacgaacttcgtggggcaccatccctccgaagagagcaagatcagagacacccgcccagctctcctgcaccctttttctttcaggaacctgagaggtccttcccattggaggggcagggggaggagacccagcccactccccggccttagccagaaaggcaagagagcaaagccagcgtctctagcttggttgccacactggggagactggtgggtggtcaccccaccctaccctcatccatggaaacccggagggagagtcccgcctgaagaaacctggatctttgctagaaagagagagatccagttgtcatcggtatccaggaagctctcctcttcctcctcctgacgtctactactacagttgctggttgttgctaaggttgctgccatggtaacatgcacatcctgtttacaccttcatctgggcaagttggtctaagctaggaacctacctaccctggacaactactatcatcaccacctggggacaccaatcatcgtgacacggagtccaccttccactcagttcccccatcctcttcctcctctcgctgccagacttcatacggaagaaaggatctagacttcggacggctactcgggagcttattgcacaagatatattcaatctattccctcactgggcccccagagaagcaagaagtaggaagaagttgagacagggaggcaggagacactggtcagttgaagggaaacgctacatcttctctggttgaggggcttggtaacagcaggcaaaatgacgaacccatcagaccgtgtcttgcctgccaactcgatggccgagagccgtgaaggggactttggctgcacagtaatggaactgaggaagctcatggagctgcgttcaagggatgcactgacccagattaatgtccactatggaggtgtacagaatctctgcagtagactgaaaacctcccctgtggaaggtctgtctgggaaccctgcagatctggagaaacgtaggcaggtgtttggacacaacgtgatcccccccaaaaagcccaagactttcttagaattagtgtgggaagctcttcaagatgtcacgcttatcatcctggagattgcagccatcatctccctggtcctgtccttttatcgccctgctggtgaagaaaatgaactgtgtggtcaagtcgcaactaccccagaagatgaaaatgaggcacaagctggctggattgagggggcagccatccttttctcagtgatcatcgtggtgttagtgactgcctttaatgattggagcaaagagaagcaattccgggggctgcagtgccgcattgaacaggagcaaaagttctccatcatccgaaacggtcaactcatccagctccctgtggctgagattgtggttggtgatattgcccaagtcaaatacggtgatctgctgcctgcagatggaatcctgatccaagggaatgatctgaagattgatgagagctctctgacaggggaatctgaccatgtcaagaagtccctggacaaagaccccatgttgctctcagggacccatgtcatggaaggttctggccggatggtggtgacagctgttggtgtcaactctcagactggaatcatccttactctcttgggggtcaatgaggatgacgaaggggagaaaaagaagaaagcaaagacccaagacggagtggccctggaaatccagccactcaacagccaggagggaatcgacaatgaggaaaaggacaagaaggcagtcaaggtgcctaaaaaggagaagtcagtgctgcagggcaagctgactcgcctggctgttcagattgggaaagccggtctgctcatgtctgctctcacggttttcatcctgattctatactttgtgattgacaactttgtgataaatcgcagaccatggctccctgagtgtactcccatctacatccagtactttgtcaagttcttcatcatcggcatcactgtactggtggtggctgtgccagaggggctgcctctggctgtcaccatctcactggcctactctgtgaagaaaatgatgaaagacaataacctagtacggcacttggatgcttgtgagaccatgggcaacgccaccgccatctgctctgataagacaggcacgttgaccatgaaccgcatgactgtggtacaagcttatattgggggcatccattaccgtcaaatcccaagccctgatgtcttcctgcccaaagtcctggacctcattgtcaatggcatttctatcaacagtgcttatacctccaagattctgcctccagagaaggagggaggcctgcctcggcaggtgggcaacaagaccgagtgtgctctgctaggctttgtcacagatctgaagcaggattatcaggctgtgcgtaatgaagtgcccgaggagaagctctacaaggtgtacacctttaactcagtgcgcaagtcaatgagcaccgtcatcaggaatcccaacggtggcttccgtatgtacagcaagggcgcctctgagatcatcttgcgcaagtgtaatcgaatcctggaccggaaaggggaagcagtgccattcaagaataaagacagagatgatatggtacgcactgtcatcgagcccatggcctgtgatggactccggactatctgcatagcttaccgggacttcgatgacacagagccctcttgggacaatgagaatgagatcctcaccgaactgacctgtatcgcggtggtgggcattgaggaccctgtgcgcccagaggtgccagatgctattgccaaatgcaaacaagctggcattactgtcagaatggtgacaggtgacaacatcaacacagcccgggccattgccaccaaatgtggcattctgacacctggggatgacttcctgtgcttagaaggcaaagaattcaaccggctcatccgcaacgagaaaggcgaggtagagcaagaaaagctggacaagatctggcctaagcttcgggtcctggcgcgatcttctcccactgacaagcacaccctggtgaaaggcataattgacagcactgttggggaacaccggcaggtcgtggctgtcactggtgatggcacaaatgacgggcctgctctgaagaaagcggatgttggttttgccatgggcatcgcaggcacagatgtagcaaaggaggcttcagacatcatcctaacagatgacaacttcaccagcattgtgaaggcagtgatgtggggacgaaatgtctatgacagcatctccaagttcctgcagttccagctcactgtcaatgtggtggccgtgattgtagccttcactggagcctgtatcactcaggattccccattgaaagctgtgcagatgttgtgggttaatctgatcatggacacttttgcttcattggccctggccacagagccccctacggaatctctgttgaagcggcgcccctatggccgaaataagcctctgatctcacgcactatgatgaagaacatcttgggccatgcattctatcagctcattgtcatctttatccttgtctttgcgggtgagaaattctttgatattgatagtgggaggaaggcacctctacattcaccacccagccagcactataccattgtttttaacaccttcgtgctgatgcagctcttcaatgaaatcaactcccgaaagatccatggagagaagaacgtcttttcaggcatctaccgcaacattatcttctgctctgtagtcttgggcacattcatctgccagattttcatcgtggaatttgggggtaaacccttcagttgtacaagcctcagcctgtctcagtggctgtggtgtctcttcattgggattggagaacttctgtggggccagttcatctccgcaatacctacccgatccctgaagttcctgaaggaggctgggcatggcaccaccaaagaggagatcaccaaggatgccgagggactggatgagattgaccatgctgagatggagctgcgccgaggccagatcctctggttccggggcctgaaccgtatccagactcagatcgacgtaattaacacattccagacgggagcctcttttaagggagtcctaaggcgacagaacatgggtcaacaccttgatgtaaaacttgttcctagttcatcctatgtagcagttgcaccagtcaaatcttcccccaccacttctgttcctgctgtttcatctcctcctatgggcaatcaaagtggtcaaagcgttccatagttccctccacgaaagcattcagaaaccctacaaccaaaagtccatccacagcttcatgacccaccctgaattcgccatagaggaggagttgccacgaacaccactcctggatgaggaagaggaggaaaatcctgacaaggcttctaagtttgggactagggtgctcctgttggatggtgaggtcactccatatgccaatacaaacaacaatgcggtggattgcaaccaagtgcagctcccccagtcggacagctctctacagagcctagagacatcagtttgaattttctttctctgactctcatccctattttacctatttccattttcgtctatcccatctatgaggtgatgatgggacttttcattgtcacgtcagctgctgtgttaacagcagtgtgtgtgaagtgaacctctacctgaccatgaagaggcaagagcacagacttacaaggatttcaacttaagcttgacttggggtttgtagcgggacccagtcaaaccccattcaggtcatggtagaatctactccttggtagtcacttgtcatttttaaagaaatgatgacaatcctcttggcatcaccccaccccacattctccccgatgttcctctcctgaattctggattttgtcctacaagtctgtgccatttataagctaagttgagggttcagagggagacaaatatccccaagtgaaatatgttgcggtagagatggaatgtataaaatccgccagtagtgtgattgtttttcaatttttcccactttgaaaacttacacctaaaggcctgtaggcctctaactctttctgccctttcattcaaacctctccaaagttctttgtcttttgtcttcccttcctttccttttttttttttttttttatgatgattaagaaaatggaaaggatatggatgaattgtgtaaacttagatccttctcccttttggcccaaaagaacccttgatttagttccagaatccaaccagtttctttgttaaaagggtccttttgaagcaattaagtgctggtaagaatatttctctgttgttgccaggttaccttctgcttttaaattgccatcttgtaaagtgtatgtggttcttaagtgccagggagatcagccttgcccatgaaggttgcatatgtgtggtatacagtttttacctgaaagcctgagctttctcttattcctaaagtggtggcaaaagaatgaactgggtatgaccctgcccccttactgggcttggatattgaggaccagacgctgccaaatctaggacaagacagaccatcaaagcagacttttgtgggctcctctttggggtgaccactgctttcaaagccatctgccaaggctctccagggcaggacctgactggtggggaatgagtgttcagaagccttgggagaggccaaagagccattctagcatgatctgagaaaaccttcctgcagaggccagaaaccttgagcttaggtgcctggggaccagcttcgacattctctccagtttctgattctaatttttgccacgtgtcacaacttttccagtctctgagaaggtcccagcctttctcaaatattctgattttgaaaatatgtatccaaagtgggaggcccctgtgacattttgccaacttaaacgagaaaaagaccccccgcacccggcacactcccccttcctccagccccgcttcagccacatgctccagctgctgcccagtaaagccctgtgcctttttttcccctgaatactgcccaaagcatccccttcccatctgcctctcaggagttggggactttgctaggagattttttaagtgttccttactgggacaacgtggagccacgtttgcaggagctccatttgtatccctgctggtgttgacttctgtgtaggggccagttcatgtccctgactctcacctcccattagataaatgaagcccacccccctttctagagtgatgagagtcaagaagaggggatgtatgaacggccaaattcccatgtgagaggaagatgacctgatccacctagccttttcttctggatctgtcctccctcacccctttcacctgagctgtccacagtaggaaacataaagaaacaatgtcccctacatatccccatgactacataatccatcatcgtaggaaataggaaagcaaatttgattttggttttgtaaaacgtacatgcttcaataattcttttttgtgtcttaaatactcataggggaaaaaaacagctcacccaaggtgttaggtttcacatatatattcatcaactattttagaagatttaattctatcaaatcttgtattacctcagatcattttaaatagcaagccaataacgagctttgaaggctattttaccattcctgttcacaaaaggttctcatggtgcctgacaggttacccttgagggcttgtgtctactttttaaaagtcaatggttttttttcttgtgttctagtttccataataggagagaaaatatagaaatatatgcaaaaattatagttttctttagatcagaaactgatatttttgggtcagccatatgtattttgtttaaaggatttaaaataaagtgccgtcatgtagccctgtggaagggagcacataaccagctgtttggcatgacaggtgacttagtatatttgtaattggttttaaaaccaatacaccatactttctttctgcaaacagccatctttatacttagggaagaaaaattgttgggttctagacttttttaatataaattttgttgatatggaattaggtaagtttaagtgtctatgtgcatatgttttttatataagttttttctattcagtttcactgatccaactggcagtgggtaaatatggcataagttaataacacttttccccaaaatggtgctttggatttgaaaagggtctgatggggagaaggagaacgtatcatcctagcttcctctcttaataaacctagaaaaacgggtagtaaactgtggatagtcaggaaaacacccagcaagggacacagctgtcaggaaatgaatcttccccccaacccccaccatgcagatggatagacagaatctttcctgactagtcattaggatcaggggcctctgttggatttgtgtttcttgaagaatagctggcagagtggtataaaagacacgaatatctcctggtctataaggatactctgatttggggtttgcatttttcatggtttttatttcctgttccccctggagttttccattagtgagtttttgtgcaaggatcttatttgtgatgccttccctcccctagaaagattttgtgcaatatattaaatggggacagaattctaaatggataaaacaatggctggttctagccctgagtgacagtcttaaggctagatccttcccatagtatcatctgtcctctggaatgactctcctgtccctaaaggggttaagagagagatcacctagaaatccctctggacacttgtgggttctttagggtttgagtttcttcttccccttgagcttcagagaggagagttggcatggttaaatctgaatggttacctcactgctgaaaacccagaggggcgtggcacactcgcttgtgtggaaaagcctctaaatgcatcccttcctttctttcctgcttcctttgccttacaattgaagcagcccgtggtaccatcacagtatgcagagacttcctcacctttcatatctagggaccacccccgatgcattggtgagggtgggcacttataaatgcctgctattgttaagccattccagcctcttcctctgaatagaccagacgccctttcacttagttcagtgccagtccttttgccttcccaaccctgctgttaggcctgctgttccctttgctcttgattaggagagatggaaggagatgagctcccataactgaattggcctttggttcatgttttctccccatatgtatatatgccatatgtgaatatgccatatatatgtgccaacaaatctatctacgttgttcttttcaaattagcacgcagataggaattttgagtttcttcttcttttagtaactagtataacaagcactggtatttttgtacaaaaaagaaaaacaaaagattgactattgtggtctgcatgacataaacaaacaaatggtgatatcaaagcaacgtataccccagtccagtgtgtgttgccataatttgcaattcagcttaacagtgcacccaatctatatttgcattttgatattatttaagctctatgtacaaggttttgcatgtatttatatggttcttagggaaaaaaaatgctataaactgcaaatctgaaattcaaatgtgttgttccactgagaccagaagaagaagaggagttttaaaagggataatttgttggagccaataaagctttttgctgatgaacagaaaccaatactgctgtgcactgagaataaaaactcatgcccacttgt

SEQ ID NO: 2744 - DNA, 8797 bp, Homo sapiens
  source 1..8797: mol_type = unassigned DNA
ttggggagagctggtgagcaagagtctggcccgagttagctagagctgttgccatgacaagcattttcttaagaaagctctgctgttgagatcgtccaaagctgggggctgggagggggggcacgaacttcgtggggcaccatccctccgaagagagcaagatcagagacacccgcccagctctcctgcaccctttttctttcaggaacctgagaggtccttcccattggaggggcagggggaggagacccagcccactccccggccttagccagaaaggcaagagagcaaagccagcgtctctagcttggttgccacactggggagactggtgggtggtcaccccaccctaccctcatccatggaaacccggagggagagtcccgcctgaagaaacctggatctttgctagaaagagagagatccagttgtcatcggtatccaggaagctctcctcttcctcctcctgacgtctactactacagttgctggttgttgctaaggttgctgccatggtaacatgcacatcctgtttacaccttcatctgggcaagttggtctaagctaggaacctacctaccctggacaactactatcatcaccacctggggacaccaatcatcgtgacacggagtccaccttccactcagttcccccatcctcttcctcctctcgctgccagacttcatacggaagaaaggatctagacttcggacggctactcgggagcttattgcacaagatatattcaatctattccctcactgggcccccagagaagcaagaagtaggaagaagttgagacagggaggcaggagacactggtcagttgaagggaaacgctacatcttctctggttgaggggcttggtaacagcaggcaaaatgacgaacccatcagaccgtgtcttgcctgccaactcgatggccgagagccgtgaaggggactttggctgcacagtaatggaactgaggaagctcatggagctgcgttcaagggatgcactgacccagattaatgtccactatggaggtgtacagaatctctgcagtagactgaaaacctcccctgtggaaggtctgtctgggaaccctgcagatctggagaaacgtaggcaggtgtttggacacaacgtgatcccccccaaaaagcccaagactttcttagaattagtgtgggaagctcttcaagatgtcacgcttatcatcctggagattgcagccatcatctccctggtcctgtccttttatcgccctgctggtgaagaaaatgaactgtgtggtcaagtcgcaactaccccagaagatgaaaatgaggcacaagctggctggattgagggggcagccatccttttctcagtgatcatcgtggtgttagtgactgcctttaatgattggagcaaagagaagcaattccgggggctgcagtgccgcattgaacaggagcaaaagttctccatcatccgaaacggtcaactcatccagctccctgtggctgagattgtggttggtgatattgcccaagtcaaatacggtgatctgctgcctgcagatggaatcctgatccaagggaatgatctgaagattgatgagagctctctgacaggggaatctgaccatgtcaagaagtccctggacaaagaccccatgttgctctcagggacccatgtcatggaaggttctggccggatggtggtgacagctgttggtgtcaactctcagactggaatcatccttactctcttgggggtcaatgaggatgacgaaggggagaaaaagaagaaaggtaaaaaacaaggagtccctgaaaatcgcaacaaagcaaagacccaagacggagtggccctggaaatccagccactcaacagccaggagggaatcgacaatgaggaaaaggacaagaaggcagtcaaggtgcctaaaaaggagaagtcagtgctgcagggcaagctgactcgcctggctgttcagattgggaaagccggtctgctcatgtctgctctcacggttttcatcctgattctatactttgtgattgacaactttgtgataaatcgcagaccatggctccctgagtgtactcccatctacatccagtactttgtcaagttcttcatcatcggcatcactgtactggtggtggctgtgccagaggggctgcctctggctgtcaccatctcactggcctactctgtgaagaaaatgatgaaagacaataacctagtacggcacttggatgcttgtgagaccatgggcaacgccaccgccatctgctctgataagacaggcacgttgaccatgaaccgcatgactgtggtacaagcttatattgggggcatccattaccgtcaaatcccaagccctgatgtcttcctgcccaaagtcctggacctcattgtcaatggcatttctatcaacagtgcttatacctccaagattctgcctccagagaaggagggaggcctgcctcggcaggtgggcaacaagaccgagtgtgctctgctaggctttgtcacagatctgaagcaggattatcaggctgtgcgtaatgaagtgcccgaggagaagctctacaaggtgtacacctttaactcagtgcgcaagtcaatgagcaccgtcatcaggaatcccaacggtggcttccgtatgtacagcaagggcgcctctgagatcatcttgcgcaagtgtaatcgaatcctggaccggaaaggggaagcagtgccattcaagaataaagacagagatgatatggtacgcactgtcatcgagcccatggcctgtgatggactccggactatctgcatagcttaccgggacttcgatgacacagagccctcttgggacaatgagaatgagatcctcaccgaactgacctgtatcgcggtggtgggcattgaggaccctgtgcgcccagaggtgccagatgctattgccaaatgcaaacaagctggcattactgtcagaatggtgacaggtgacaacatcaacacagcccgggccattgccaccaaatgtggcattctgacacctggggatgacttcctgtgcttagaaggcaaagaattcaaccggctcatccgcaacgagaaaggcgaggtagagcaagaaaagctggacaagatctggcctaagcttcgggtcctggcgcgatcttctcccactgacaagcacaccctggtgaaaggcataattgacagcactgttggggaacaccggcaggtcgtggctgtcactggtgatggcacaaatgacgggcctgctctgaagaaagcggatgttggttttgccatgggcatcgcaggcacagatgtagcaaaggaggcttcagacatcatcctaacagatgacaacttcaccagcattgtgaaggcagtgatgtggggacgaaatgtctatgacagcatctccaagttcctgcagttccagctcactgtcaatgtggtggccgtgattgtagccttcactggagcctgtatcactcaggattccccattgaaagctgtgcagatgttgtgggttaatctgatcatggacacttttgcttcattggccctggccacagagccccctacggaatctctgttgaagcggcgcccctatggccgaaataagcctctgatctcacgcactatgatgaagaacatcttgggccatgcattctatcagctcattgtcatctttatccttgtctttgcgggtgagaaattctttgatattgatagtgggaggaaggcacctctacattcaccacccagccagcactataccattgtttttaacaccttcgtgctgatgcagctcttcaatgaaatcaactcccgaaagatccatggagagaagaacgtcttttcaggcatctaccgcaacattatcttctgctctgtagtcttgggcacattcatctgccagttcatctccgcaatacctacccgatccctgaagttcctgaaggaggctgggcatggcaccaccaaagaggagatcaccaaggatgccgagggactggatgagattgaccatgctgagatggagctgcgccgaggccagatcctctggttccggggcctgaaccgtatccagactcagatcgacgtaattaacacattccagacgggagcctcttttaagggagtcctaaggcgacagaacatgggtcaacaccttgatgtaaaacttgttcctagttcatcctatgtagcagttgcaccagtcaaatcttcccccaccacttctgttcctgctgtttcatctcctcctatgggcaatcaaagtggtcaaagcgttccatagttccctccacgaaagcattcagaaaccctacaaccaaaagtccatccacagcttcatgacccaccctgaattcgccatagaggaggagttgccacgaacaccactcctggatgaggaagaggaggaaaatcctgacaaggcttctaagtttgggactagggtgctcctgttggatggtgaggtcactccatatgccaatacaaacaacaatgcggtggattgcaaccaagtgcagctcccccagtcggacagctctctacagagcctagagacatcagtttgaattttctttctctgactctcatccctattttacctatttccattttcgtctatcccatctatgaggtgatgatgggacttttcattgtcacgtcagctgctgtgttaacagcagtgtgtgtgaagtgaacctctacctgaccatgaagaggcaagagcacagacttacaaggatttcaacttaagcttgacttggggtttgtagcgggacccagtcaaaccccattcaggtcatggtagaatctactccttggtagtcacttgtcatttttaaagaaatgatgacaatcctcttggcatcaccccaccccacattctccccgatgttcctctcctgaattctggattttgtcctacaagtctgtgccatttataagctaagttgagggttcagagggagacaaatatccccaagtgaaatatgttgcggtagagatggaatgtataaaatccgccagtagtgtgattgtttttcaatttttcccactttgaaaacttacacctaaaggcctgtaggcctctaactctttctgccctttcattcaaacctctccaaagttctttgtcttttgtcttcccttcctttccttttttttttttttttttatgatgattaagaaaatggaaaggatatggatgaattgtgtaaacttagatccttctcccttttggcccaaaagaacccttgatttagttccagaatccaaccagtttctttgttaaaagggtccttttgaagcaattaagtgctggtaagaatatttctctgttgttgccaggttaccttctgcttttaaattgccatcttgtaaagtgtatgtggttcttaagtgccagggagatcagccttgcccatgaaggttgcatatgtgtggtatacagtttttacctgaaagcctgagctttctcttattcctaaagtggtggcaaaagaatgaactgggtatgaccctgcccccttactgggcttggatattgaggaccagacgctgccaaatctaggacaagacagaccatcaaagcagacttttgtgggctcctctttggggtgaccactgctttcaaagccatctgccaaggctctccagggcaggacctgactggtggggaatgagtgttcagaagccttgggagaggccaaagagccattctagcatgatctgagaaaaccttcctgcagaggccagaaaccttgagcttaggtgcctggggaccagcttcgacattctctccagtttctgattctaatttttgccacgtgtcacaacttttccagtctctgagaaggtcccagcctttctcaaatattctgattttgaaaatatgtatccaaagtgggaggcccctgtgacattttgccaacttaaacgagaaaaagaccccccgcacccggcacactcccccttcctccagccccgcttcagccacatgctccagctgctgcccagtaaagccctgtgcctttttttcccctgaatactgcccaaagcatccccttcccatctgcctctcaggagttggggactttgctaggagattttttaagtgttccttactgggacaacgtggagccacgtttgcaggagctccatttgtatccctgctggtgttgacttctgtgtaggggccagttcatgtccctgactctcacctcccattagataaatgaagcccacccccctttctagagtgatgagagtcaagaagaggggatgtatgaacggccaaattcccatgtgagaggaagatgacctgatccacctagccttttcttctggatctgtcctccctcacccctttcacctgagctgtccacagtaggaaacataaagaaacaatgtcccctacatatccccatgactacataatccatcatcgtaggaaataggaaagcaaatttgattttggttttgtaaaacgtacatgcttcaataattcttttttgtgtcttaaatactcataggggaaaaaaacagctcacccaaggtgttaggtttcacatatatattcatcaactattttagaagatttaattctatcaaatcttgtattacctcagatcattttaaatagcaagccaataacgagctttgaaggctattttaccattcctgttcacaaaaggttctcatggtgcctgacaggttacccttgagggcttgtgtctactttttaaaagtcaatggttttttttcttgtgttctagtttccataataggagagaaaatatagaaatatatgcaaaaattatagttttctttagatcagaaactgatatttttgggtcagccatatgtattttgtttaaaggatttaaaataaagtgccgtcatgtagccctgtggaagggagcacataaccagctgtttggcatgacaggtgacttagtatatttgtaattggttttaaaaccaatacaccatactttctttctgcaaacagccatctttatacttagggaagaaaaattgttgggttctagacttttttaatataaattttgttgatatggaattaggtaagtttaagtgtctatgtgcatatgttttttatataagttttttctattcagtttcactgatccaactggcagtgggtaaatatggcataagttaataacacttttccccaaaatggtgctttggatttgaaaagggtctgatggggagaaggagaacgtatcatcctagcttcctctcttaataaacctagaaaaacgggtagtaaactgtggatagtcaggaaaacacccagcaagggacacagctgtcaggaaatgaatcttccccccaacccccaccatgcagatggatagacagaatctttcctgactagtcattaggatcaggggcctctgttggatttgtgtttcttgaagaatagctggcagagtggtataaaagacacgaatatctcctggtctataaggatactctgatttggggtttgcatttttcatggtttttatttcctgttccccctggagttttccattagtgagtttttgtgcaaggatcttatttgtgatgccttccctcccctagaaagattttgtgcaatatattaaatggggacagaattctaaatggataaaacaatggctggttctagccctgagtgacagtcttaaggctagatccttcccatagtatcatctgtcctctggaatgactctcctgtccctaaaggggttaagagagagatcacctagaaatccctctggacacttgtgggttctttagggtttgagtttcttcttccccttgagcttcagagaggagagttggcatggttaaatctgaatggttacctcactgctgaaaacccagaggggcgtggcacactcgcttgtgtggaaaagcctctaaatgcatcccttcctttctttcctgcttcctttgccttacaattgaagcagcccgtggtaccatcacagtatgcagagacttcctcacctttcatatctagggaccacccccgatgcattggtgagggtgggcacttataaatgcctgctattgttaagccattccagcctcttcctctgaatagaccagacgccctttcacttagttcagtgccagtccttttgccttcccaaccctgctgttaggcctgctgttccctttgctcttgattaggagagatggaaggagatgagctcccataactgaattggcctttggttcatgttttctccccatatgtatatatgccatatgtgaatatgccatatatatgtgccaacaaatctatctacgttgttcttttcaaattagcacgcagataggaattttgagtttcttcttcttttagtaactagtataacaagcactggtatttttgtacaaaaaagaaaaacaaaagattgactattgtggtctgcatgacataaacaaacaaatggtgatatcaaagcaacgtataccccagtccagtgtgtgttgccataatttgcaattcagcttaacagtgcacccaatctatatttgcattttgatattatttaagctctatgtacaaggttttgcatgtatttatatggttcttagggaaaaaaaatgctataaactgcaaatctgaaattcaaatgtgttgttccactgagaccagaagaagaagaggagttttaaaagggataatttgttggagccaataaagctttttgctgatgaacagaaaccaatactgctgtgcactgagaataaaaactcatgcccacttgt

SEQ ID NO: 2745 - DNA, 429 bp, Homo sapiens
  source 1..429: mol_type = unassigned DNA
ttgggggtaaacccttcagttgtacaagcctcagcctgtctcagtggctgtggtgtctcttcattgggattggagaacttctgtggggccagttcatctccgcaatacctacccgatccctgaagttcctgaaggaggctgggcatggcaccaccaaagaggagatcaccaaggatgccgagggactggatgagattgaccatgctgagatggagctgcgccgaggccagatcctctggttccggggcctgaaccgtatccagactcagcatcttttgcaggattcagacttgcttcctgacaaggaggaagcaataatttcttcaagcctcttcccttcttgcaatttctgaaatgggatagaagccacccctgctgctcttatgtcccctgtctatagccccacaataacttttattttttccactt

SEQ ID NO: 2746 - DNA, 3484 bp, Homo sapiens
  source 1..3484: mol_type = unassigned DNA
gctggcgtgagctggggacgttgcgggcacacgacggggcgggtgcgggatcttggggaggggggctcccgagatagtggctgggcggggaactccttcctcagcctctcgtcagcgccgcttctcctggtttctcttgcagatgctgctgctaggggtggtgggagcagccgtgggacgcgtggccgggagcgggggtgacagcctgggattccgggggcttctcttccttgtcctcctcctctcctctctattcccagtgtggccgtggctgacactaaagactttgtagccatcaacccgagtgcagtttcgatggaaaatgaaggttgcacgttttcaaaaaatacctaatggtgaaaatgagacaatgattcctgtattgacatcaaaaaaagcaagtgaattaccagtcagtgaagttgcaagcattctccaagctgatcttcagaatggtctaaacaaatgtgaagttagtcataggcgagcctttcatggctggaatgagtttgatattagtgaagatgagccactgtggaagaagtatatttctcagtttaaaaatccccttattatgctgcttctggcttctgcagtcatcagtgttttaatgcatcagtttgatgatgccgtcagtatcactgtggcaatacttatcgttgttacagttgcctttgttcaggaatatcgttcagaaaaatctcttgaagaattgagtaaacttgtgccaccagaatgccattgtgtgcgtgaaggaaaattggagcatacacttgcccgagacttggttccaggtgatacagtttgcctttctgttggggatagagttcctgctgacttacgcttgtttgaggctgtggatctttccattgatgagtccagcttgacaggtgagacaacgccttgttctaaggtgacagctcctcagccagctgcaactaatggagatcttgcatcgagaagtaacattgcctttatgggaacactggtcagatgtggcaaagcaaagggtgttgtcattggaacaggagaaaattctgaatttggggaggtttttaaaatgatgcaagcagaagaggcaccaaaaacccctctgcagaagagcatggacctcttaggaaaacaactttccttttactcctttggtataataggaatcatcatgttggttggctggttactgggaaaagatatcctggaaatgtttactattagtgtaagtttggctgtagcagcaattcctgaaggtctccccattgtggtcacagtgacgctagctcttggtgttatgagaatggtgaagaaaagggccattgtgaaaaagctgcctattgttgaaactctgggctgctgtaatgtgatttgttcagataaaactggaacactgacgaagaatgaaatgactgttactcacatatttacttcagatggtctgcatgctgaggttactggagttggctataatcaatttggggaagtgattgttgatggtgatgttgttcatggattctataacccagctgttagcagaattgttgaggcgggctgtgtgtgcaatgatgctgtaattagaaacaatactctaatggggaagccaacagaaggggccttaattgctcttgcaatgaagatgggtcttgatggacttcaacaagactacatcagaaaagctgaatacccttttagctctgagcaaaagtggatggctgttaagtgtgtacaccgaacacagcaggacagaccagagatttgttttatgaaaggtgcttacgaacaagtaattaagtactgtactacataccagagcaaagggcagaccttgacacttactcagcagcagagagatgtgtaccaacaagagaaggcacgcatgggctcagcgggactcagagttcttgctttggcttctggtcctgaactgggacagctgacatttcttggcttggtgggaatcattgatccacctagaactggtgtgaaagaagctgttacaacactcattgcctcaggagtatcaataaaaatgattactggagattcacaggagactgcagttgcaatcgccagtcgtctgggattgtattccaaaacttcccagtcagtctcaggagaagaaatagatgcaatggatgttcagcagctttcacaaatagtaccaaaggttgcagtattttacagagctagcccaaggcacaagatgaaaattattaagtcgctacagaagaacggttcagttgtagccatgacaggagatggagtaaatgatgcagttgctctgaaggctgcagacattggagttgcgatgggccagactggtacagatgtttgcaaagaggcagcagacatgatcctagtggatgatgattttcaaaccataatgtctgcaatcgaagagggtaaagggatttataataacattaaaaatttcgttagattccagctgagcacgagtatagcagcattaactttaatctcattggctacattaatgaactttcctaatcctctcaatgccatgcagattttgtggatcaatattattatggatggacccccagctcagagccttggagtagaaccagtggataaagatgtcattcgtaaacctcctcgcaactggaaagacagcattttgactaaaaacttgatacttaaaatacttgtttcatcaataatcattgtttgtgggactttgtttgtcttctggcgtgagctacgagacaatgtgattacacctcgagacacaacaatgaccttcacatgctttgtgttttttgacatgttcaatgcactaagttccagatcccagaccaagtctgtgtttgagattggactctgcagtaatagaatgttttgctatgcagttcttggatccatcatgggacaattactagttatttactttcctccgcttcagaaggtttttcagactgagagcctaagcatactgggtctggctctgggagaggagtggacagcagctggttgagatacatccccatctggagacaggactgccactgacagaagatgtgagctgtgtctaagtccagtcttgtgcccagccgtgtctgcgccttcactctttggaactctgcatacaacatcttagcaccatcttcctgcagctcttccttacctaaataaagaaacagcccaagggcagtatttctaaaagcactgtaacagcttttcattttctccacatatactacaaattctataaagaaagaaattaatttaaaaaaactaagatgtttttctcttctggcttcataaatgccttgctgtataaattgaaatattgatactgaactgtctttttaatgatgacctaactttattcaacccatcggaatttactttttccctgaaataagatcttttccactggtctactacctgaccataaacatgtctgcatttgaattctctaaaccctaaatctgtgtctatgaaaaatacaaatgactattaaatatta

SEQ ID NO: 2747 - DNA, 3339 bp, Homo sapiens
  source 1..3339: mol_type = unassigned DNA
aaagttgcacgttttcaaaaaatacctaatggtgaaaatgagacaatgattcctgtattgacatcaaaaaaagcaagtgaattaccagtcagtgaagttgcaagcattctccaagctgatcttcagaatggtctaaacaaatgtgaagttagtcataggcgagcctttcatggctggaatgagtttgatattagtgaagatgagccactgtggaagaagtatatttctcagtttaaaaatccccttattatgctgcttctggcttctgcagtcatcagtgttttaatgcatcagtttgatgatgccgtcagtatcactgtggcaatacttatcgttgttacagttgcctttgttcaggaatatcgttcagaaaaatctcttgaagaattgagtaaacttgtgccaccagaatgccattgtgtgcgtgaaggaaaattggagcatacacttgcccgagacttggttccaggtgatacagtttgcctttctgttggggatagagttcctgctgacttacgcttgtttgaggctgtggatctttccattgatgagtccagcttgacaggtgagacaacgccttgttctaaggtgacagctcctcagccagctgcaactaatggagatcttgcatcgagaagtaacattgcctttatgggaacactggtcagatgtggcaaagcaaagggtgttgtcattggaacaggagaaaattctgaatttggggaggtttttaaaatgatgcaagcagaagaggcaccaaaaacccctctgcagaagagcatggacctcttaggaaaacaactttccttttactcctttggtataataggaatcatcatgttggttggctggttactgggaaaagatatcctggaaatgtttactattagtgtaagtttggctgtagcagcaattcctgaaggtctccccattgtggtcacagtgacgctagctcttggtgttatgagaatggtgaagaaaagggccattgtgaaaaagctgcctattgttgaaactctgggctgctgtaatgtgatttgttcagataaaactggaacactgacgaagaatgaaatgactgttactcacatatttacttcagatggtctgcatgctgaggttactggagttggctataatcaatttggggaagtgattgttgatggtgatgttgttcatggattctataacccagctgttagcagaattgttgaggcgggctgtgtgtgcaatgatgctgtaattagaaacaatactctaatggggaagccaacagaaggggccttaattgctcttgcaatgaagatgggtcttgatggacttcaacaagactacatcagaaaagctgaatacccttttagctctgagcaaaagtggatggctgttaagtgtgtacaccgaacacagcaggacagaccagagatttgttttatgaaaggtgcttacgaacaagtaattaagtactgtactacataccagagcaaagggcagaccttgacacttactcagcagcagagagatgtgtaccaacaagagaaggcacgcatgggctcagcgggactcagagttcttgctttggcttctggtcctgaactgggacagctgacatttcttggcttggtgggaatcattgatccacctagaactggtgtgaaagaagctgttacaacactcattgcctcaggagtatcaataaaaatgattactggagattcacaggagactgcagttgcaatcgccagtcgtctgggattgtattccaaaacttcccagtcagtctcaggagaagaaatagatgcaatggatgttcagcagctttcacaaatagtaccaaaggttgcagtattttacagagctagcccaaggcacaagatgaaaattattaagtcgctacagaagaacggttcagttgtagccatgacaggagatggagtaaatgatgcagttgctctgaaggctgcagacattggagttgcgatgggccagactggtacagatgtttgcaaagaggcagcagacatgatcctagtggatgatgattttcaaaccataatgtctgcaatcgaagagggtaaagggatttataataacattaaaaatttcgttagattccagctgagcacgagtatagcagcattaactttaatctcattggctacattaatgaactttcctaatcctctcaatgccatgcagattttgtggatcaatattattatggatggacccccagctcagagccttggagtagaaccagtggataaagatgtcattcgtaaacctcctcgcaactggaaagacagcattttgactaaaaacttgatacttaaaatacttgtttcatcaataatcattgtttgtgggactttgtttgtcttctggcgtgagctacgagacaatgtgattacacctcgagacacaacaatgaccttcacatgctttgtgttttttgacatgttcaatgcactaagttccagatcccagaccaagtctgtgtttgagattggactctgcagtaatagaatgttttgctatgcagttcttggatccatcatgggacaattactagttatttactttcctccgcttcagaaggtttttcagactgagagcctaagcatactggatctgttgtttcttttgggtctcacctcatcagtgtgcatagtggcagaaattataaagaaggttgaaaggagcagggaaaagatccagaagcatgttagttcgacatcatcatcttttcttgaagtttccagctcttcaggtaactttgttgctgtctggctctgggagaggagtggacagcagctggttgagatacatccccatctggagacaggactgccactgacagaagatgtgagctgtgtctaagtccagtcttgtgcccagccgtgtctgcgccttcactctttggaactctgcatacaacatcttagcaccatcttcctgcagctcttccttacctaaataaagaaacagcccaagggcagtatttctaaaagcactgtaacagcttttcattttctccacatatactacaaattctataaagaaagaaattaatttaaaaaaactaagatgtttttctcttctggcttcataaatgccttgctgtataaattgaaatattgatactgaactgtctttttaatgatgacctaactttattcaacccatcggaatttactttttccctgaaataagatcttttccactggtctactacctgaccataaacatgtctgcatttgaattctctaaaccctaaatctgtgtctatgaaaaatacaaatgactattaaatattattctctttactgttctctttcaccg

SEQ ID NO: 2748 - DNA, 3401 bp, Homo sapiens
  source 1..3401: mol_type = unassigned DNA
gggggtgacagcctgggattccgggggcttctcttccttgtcctcctcctctcctctctattcccagtgtggccgtggctgacactaaagactttgtagccatcaacccgagtgcagtttcgatggaaaatgaaggttgcacgttttcaaaaaatacctaatggtgaaaatgagacaatgattcctgtattgacatcaaaaaaagcaagtgaattaccagtcagtgaagttgcaagcattctccaagctgatcttcagaatggtctaaacaaatgtgaagttagtcataggcgagcctttcatggctggaatgagtttgatattagtgaagatgagccactgtggaagaagtatatttctcagtttaaaaatccccttattatgctgcttctggcttctgcagtcatcagtgttttaatgcatcagtttgatgatgccgtcagtatcactgtggcaatacttatcgttgttacagttgcctttgttcaggaatatcgttcagaaaaatctcttgaagaattgagtaaacttgtgccaccagaatgccattgtgtgcgtgaaggaaaattggagcatacacttgcccgagacttggttccaggtgatacagtttgcctttctgttggggatagagttcctgctgacttacgcttgtttgaggctgtggatctttccattgatgagtccagcttgacaggtgagacaacgccttgttctaaggtgacagctcctcagccagctgcaactaatggagatcttgcatcgagaagtaacattgcctttatgggaacactggtcagatgtggcaaagcaaagggtgttgtcattggaacaggagaaaattctgaatttggggaggtttttaaaatgatgcaagcagaagaggcaccaaaaacccctctgcagaagagcatggacctcttaggaaaacaactttccttttactcctttggtataataggaatcatcatgttggttggctggttactgggaaaagatatcctggaaatgtttactattagtgtaagtttggctgtagcagcaattcctgaaggtctccccattgtggtcacagtgacgctagctcttggtgttatgagaatggtgaagaaaagggccattgtgaaaaagctgcctattgttgaaactctgggctgctgtaatgtgatttgttcagataaaactggaacactgacgaagaatgaaatgactgttactcacatatttacttcagatggtctgcatgctgaggttactggagttggctataatcaatttggggaagtgattgttgatggtgatgttgttcatggattctataacccagctgttagcagaattgttgaggcgggctgtgtgtgcaatgatgctgtaattagaaacaatactctaatggggaagccaacagaaggggccttaattgctcttgcaatgaagatgggtcttgatggacttcaacaagactacatcagaaaagctgaatacccttttagctctgagcaaaagtggatggctgttaagtgtgtacaccgaacacagcaggacagaccagagatttgttttatgaaaggtgcttacgaacaagtaattaagtactgtactacataccagagcaaagggcagaccttgacacttactcagcagcagagagatgtgtaccaacaagagaaggcacgcatgggctcagcgggactcagagttcttgctttggcttctggtcctgaactgggacagctgacatttcttggcttggtgggaatcattgatccacctagaactggtgtgaaagaagctgttacaacactcattgcctcaggagtatcaataaaaatgattactggagattcacaggagactgcagttgcaatcgccagtcgtctgggattgtattccaaaacttcccagtcagtctcaggagaagaaatagatgcaatggatgttcagcagctttcacaaatagtaccaaaggttgcagtattttacagagctagcccaaggcacaagatgaaaattattaagtcgctacagaagaacggttcagttgtagccatgacaggagatggagtaaatgatgcagttgctctgaaggctgcagacattggagttgcgatgggccagactggtacagatgtttgcaaagaggcagcagacatgatcctagtggatgatgattttcaaaccataatgtctgcaatcgaagagggtaaagggatttataataacattaaaaatttcgttagattccagctgagcacgagtatagcagcattaactttaatctcattggctacattaatgaactttcctaatcctctcaatgccatgcagattttgtggatcaatattattatggatggacccccagctcagagccttggagtagaaccagtggataaagatgtcattcgtaaacctcctcgcaactggaaagacagcattttgactaaaaacttgatacttaaaatacttgtttcatcaataatcattgtttgtgggactttgtttgtcttctggcgtgagctacgagacaatgtgattacacctcgagacacaacaatgaccttcacatgctttgtgttttttgacatgttcaatgcactaagttccagatcccagaccaagtctgtgtttgagattggactctgcagtaatagaatgttttgctatgcagttcttggatccatcatgggacaattactagttatttactttcctccgcttcagaaggtttttcagactgagagcctaagcatactggatctgttgtttcttttgggtctcacctcatcagtgtgcatagtggcagaaattataaagaaggttgaaaggagcagggaaaagatccagaagcatgttagttcgacatcatcatcttttcttgaagtctggctctgggagaggagtggacagcagctggttgagatacatccccatctggagacaggactgccactgacagaagatgtgagctgtgtctaagtccagtcttgtgcccagccgtgtctgcgccttcactctttggaactctgcatacaacatcttagcaccatcttcctgcagctcttccttacctaaataaagaaacagcccaagggcagtatttctaaaagcactgtaacagcttttcattttctccacatatactacaaattctataaagaaagaaattaatttaaaaaaactaagatgtttttctcttctggcttcataaatgccttgctgtataaattgaaatattgatactgaactgtctttttaatgatgacctaactttattcaacccatcggaatttactttttccctgaaataagatcttttccactggtctactacctgaccataaacatgtctgcatttgaattctctaaaccctaaatctgtgtctatgaaaaatacaaat

SEQ ID NO: 2749 - DNA, 3446 bp, Homo sapiens
  source 1..3446: mol_type = unassigned DNA
ggacgcttctagacagtgttcatacttggctgtctggtttcaccaggaactctacccaaaagaggaaacagcaaggagaacatttgctttgtttgtaggagggaagttgtcgagctacaaacaaatctttaggcatctgaggaattgctaagtttctaatttcatatggttgctgacaaggaggtgcagacaaggaccctcttgctttcctcactatggatagtctgttgcctccatctagattctcttatttcaaaaaatatcctctccatgcaattaggagatatttatcgacgctgagaaaccaaagagccgaagaacaggttgcacgttttcaaaaaatacctaatggtgaaaatgagacaatgattcctgtattgacatcaaaaaaagcaagtgaattaccagtcagtgaagttgcaagcattctccaagctgatcttcagaatggtctaaacaaatgtgaagttagtcataggcgagcctttcatggctggaatgagtttgatattagtgaagatgagccactgtggaagaagtatatttctcagtttaaaaatccccttattatgctgcttctggcttctgcagtcatcagtgttttaatgcatcagtttgatgatgccgtcagtatcactgtggcaatacttatcgttgttacagttgcctttgttcaggaatatcgttcagaaaaatctcttgaagaattgagtaaacttgtgccaccagaatgccattgtgtgcgtgaaggaaaattggagcatacacttgcccgagacttggttccaggtgatacagtttgcctttctgttggggatagagttcctgctgacttacgcttgtttgaggctgtggatctttccattgatgagtccagcttgacaggtgagacaacgccttgttctaaggtgacagctcctcagccagctgcaactaatggagatcttgcatcgagaagtaacattgcctttatgggaacactggtcagatgtggcaaagcaaagggtgttgtcattggaacaggagaaaattctgaatttggggaggtttttaaaatgatgcaagcagaagaggcaccaaaaacccctctgcagaagagcatggacctcttaggaaaacaactttccttttactcctttggtataataggaatcatcatgttggttggctggttactgggaaaagatatcctggaaatgtttactattagtgtaagtttggctgtagcagcaattcctgaaggtctccccattgtggtcacagtgacgctagctcttggtgttatgagaatggtgaagaaaagggccattgtgaaaaagctgcctattgttgaaactctgggctgctgtaatgtgatttgttcagataaaactggaacactgacgaagaatgaaatgactgttactcacatatttacttcagatggtctgcatgctgaggttactggagttggctataatcaatttggggaagtgattgttgatggtgatgttgttcatggattctataacccagctgttagcagaattgttgaggcgggctgtgtgtgcaatgatgctgtaattagaaacaatactctaatggggaagccaacagaaggggccttaattgctcttgcaatgaagatgggtcttgatggacttcaacaagactacatcagaaaagctgaatacccttttagctctgagcaaaagtggatggctgttaagtgtgtacaccgaacacagcaggacagaccagagatttgttttatgaaaggtgcttacgaacaagtaattaagtactgtactacataccagagcaaagggcagaccttgacacttactcagcagcagagagatgtgtaccaacaagagaaggcacgcatgggctcagcgggactcagagttcttgctttggcttctggtcctgaactgggacagctgacatttcttggcttggtgggaatcattgatccacctagaactggtgtgaaagaagctgttacaacactcattgcctcaggagtatcaataaaaatgattactggagattcacaggagactgcagttgcaatcgccagtcgtctgggattgtattccaaaacttcccagtcagtctcaggagaagaaatagatgcaatggatgttcagcagctttcacaaatagtaccaaaggttgcagtattttacagagctagcccaaggcacaagatgaaaattattaagtcgctacagaagaacggttcagttgtagccatgacaggagatggagtaaatgatgcagttgctctgaaggctgcagacattggagttgcgatgggccagactggtacagatgtttgcaaagaggcagcagacatgatcctagtggatgatgattttcaaaccataatgtctgcaatcgaagagggtaaagggatttataataacattaaaaatttcgttagattccagctgagcacgagtatagcagcattaactttaatctcattggctacattaatgaactttcctaatcctctcaatgccatgcagattttgtggatcaatattattatggatggacccccagctcagagccttggagtagaaccagtggataaagatgtcattcgtaaacctcctcgcaactggaaagacagcattttgactaaaaacttgatacttaaaatacttgtttcatcaataatcattgtttgtgggactttgtttgtcttctggcgtgagctacgagacaatgtgattacacctcgagacacaacaatgaccttcacatgctttgtgttttttgacatgttcaatgcactaagttccagatcccagaccaagtctgtgtttgagattggactctgcagtaatagaatgttttgctatgcagttcttggatccatcatgggacaattactagttatttactttcctccgcttcagaaggtttttcagactgagagcctaagcatactggatctgttgtttcttttgggtctcacctcatcagtgtgcatagtggcagaaattataaagaaggttgaaaggagcagggaaaagatccagaagcatgtctggctctgggagaggagtggacagcagctggttgagatacatccccatctggagacaggactgccactgacagaagatgtgagctgtgtctaagtccagtcttgtgcccagccgtgtctgcgccttcactctttggaactctgcatacaacatcttagcaccatcttcctgcagctcttccttacctaaataaagaaacagcccaagggcagtatttctaaaagcactgtaacagcttttcattttctccacatatactacaaattctataaagaaagaaattaatttaaaaaaactaagatgtttttctcttctggcttcataaatgccttgctgtataaattgaaatattgatactgaactgtctttttaatgatgacctaactttattcaacccatcgg

SEQ ID NO: 2750 - DNA, 3386 bp, Homo sapiens
  source 1..3386: mol_type = unassigned DNA
gggggtgacagcctgggattccgggggcttctcttccttgtcctcctcctctcctctctattcccagtgtggccgtggctgacactaaagactttgtagccatcaacccgagtgcagtttcgatggaaaatgaaggttgcacgttttcaaaaaatacctaatggtgaaaatgagacaatgattcctgtattgacatcaaaaaaagcaagtgaattaccagtcagtgaagttgcaagcattctccaagctgatcttcagaatggtctaaacaaatgtgaagttagtcataggcgagcctttcatggctggaatgagtttgatattagtgaagatgagccactgtggaagaagtatatttctcagtttaaaaatccccttattatgctgcttctggcttctgcagtcatcagtgttttaatgcatcagtttgatgatgccgtcagtatcactgtggcaatacttatcgttgttacagttgcctttgttcaggaatatcgttcagaaaaatctcttgaagaattgagtaaacttgtgccaccagaatgccattgtgtgcgtgaaggaaaattggagcatacacttgcccgagacttggttccaggtgatacagtttgcctttctgttggggatagagttcctgctgacttacgcttgtttgaggctgtggatctttccattgatgagtccagcttgacaggtgagacaacgccttgttctaaggtgacagctcctcagccagctgcaactaatggagatcttgcatcgagaagtaacattgcctttatgggaacactggtcagatgtggcaaagcaaagggtgttgtcattggaacaggagaaaattctgaatttggggaggtttttaaaatgatgcaagcagaagaggcaccaaaaacccctctgcagaagagcatggacctcttaggaaaacaactttccttttactcctttggtataataggaatcatcatgttggttggctggttactgggaaaagatatcctggaaatgtttactattagtgtaagtttggctgtagcagcaattcctgaaggtctccccattgtggtcacagtgacgctagctcttggtgttatgagaatggtgaagaaaagggccattgtgaaaaagctgcctattgttgaaactctgggctgctgtaatgtgatttgttcagataaaactggaacactgacgaagaatgaaatgactgttactcacatatttacttcagatggtctgcatgctgaggttactggagttggctataatcaatttggggaagtgattgttgatggtgatgttgttcatggattctataacccagctgttagcagaattgttgaggcgggctgtgtgtgcaatgatgctgtaattagaaacaatactctaatggggaagccaacagaaggggccttaattgctcttgcaatgaagatgggtcttgatggacttcaacaagactacatcagaaaagctgaatacccttttagctctgagcaaaagtggatggctgttaagtgtgtacaccgaacacagcaggacagaccagagatttgttttatgaaaggtgcttacgaacaagtaattaagtactgtactacataccagagcaaagggcagaccttgacacttactcagcagcagagagatgtgtaccaacaagagaaggcacgcatgggctcagcgggactcagagttcttgctttggcttctggtcctgaactgggacagctgacatttcttggcttggtgggaatcattgatccacctagaactggtgtgaaagaagctgttacaacactcattgcctcaggagtatcaataaaaatgattactggagattcacaggagactgcagttgcaatcgccagtcgtctgggattgtattccaaaacttcccagtcagtctcaggagaagaaatagatgcaatggatgttcagcagctttcacaaatagtaccaaaggttgcagtattttacagagctagcccaaggcacaagatgaaaattattaagtcgctacagaagaacggttcagttgtagccatgacaggagatggagtaaatgatgcagttgctctgaaggctgcagacattggagttgcgatgggccagactggtacagatgtttgcaaagaggcagcagacatgatcctagtggatgatgattttcaaaccataatgtctgcaatcgaagagggtaaagggatttataataacattaaaaatttcgttagattccagctgagcacgagtatagcagcattaactttaatctcattggctacattaatgaactttcctaatcctctcaatgccatgcagattttgtggatcaatattattatggatggacccccagctcagagccttggagtagaaccagtggataaagatgtcattcgtaaacctcctcgcaactggaaagacagcattttgactaaaaacttgatacttaaaatacttgtttcatcaataatcattgtttgtgggactttgtttgtcttctggcgtgagctacgagacaatgtgattacacctcgagacacaacaatgaccttcacatgctttgtgttttttgacatgttcaatgcactaagttccagatcccagaccaagtctgtgtttgagattggactctgcagtaatagaatgttttgctatgcagttcttggatccatcatgggacaattactagttatttactttcctccgcttcagaaggtttttcagactgagagcctaagcatactggatctgttgtttcttttgggtctcacctcatcagtgtgcatagtggcagaaattataaagaaggttgaaaggagcagggaaaagatccagaagcatgtctggctctgggagaggagtggacagcagctggttgagatacatccccatctggagacaggactgccactgacagaagatgtgagctgtgtctaagtccagtcttgtgcccagccgtgtctgcgccttcactctttggaactctgcatacaacatcttagcaccatcttcctgcagctcttccttacctaaataaagaaacagcccaagggcagtatttctaaaagcactgtaacagcttttcattttctccacatatactacaaattctataaagaaagaaattaatttaaaaaaactaagatgtttttctcttctggcttcataaatgccttgctgtataaattgaaatattgatactgaactgtctttttaatgatgacctaactttattcaacccatcggaatttactttttccctgaaataagatcttttccactggtctactacctgaccataaacatgtctgcatttgaattctctaaaccctaaatctgtgtctatgaaaaatacaaatgactattaaatatta

SEQ ID NO: 2751 - DNA, 4795 bp, Homo sapiens
  source 1..4795: mol_type = unassigned DNA
gggaactccttcctcagcctctcgtcagcgccgcttctcctggtttctcttgcagatgctgctgctaggggtggtgggagcagccgtgggacgcgtggccgggagcgggggtgacagcctgggattccgggggcttctcttccttgtcctcctcctctcctctctattcccagtgtggccgtggctgacactaaagactttgtagccatcaacccgagtgcagtttcgatggaaaatgaaggttgcacgttttcaaaaaatacctaatggtgaaaatgagacaatgattcctgtattgacatcaaaaaaagcaagtgaattaccagtcagtgaagttgcaagcattctccaagctgatcttcagaatggtctaaacaaatgtgaagttagtcataggcgagcctttcatggctggaatgagtttgatattagtgaagatgagccactgtggaagaagtatatttctcagtttaaaaatccccttattatgctgcttctggcttctgcagtcatcagtgttttaatgcatcagtttgatgatgccgtcagtatcactgtggcaatacttatcgttgttacagttgcctttgttcaggaatatcgttcagaaaaatctcttgaagaattgagtaaacttgtgccaccagaatgccattgtgtgcgtgaaggaaaattggagcatacacttgcccgagacttggttccaggtgatacagtttgcctttctgttggggatagagttcctgctgacttacgcttgtttgaggctgtggatctttccattgatgagtccagcttgacaggtgagacaacgccttgttctaaggtgacagctcctcagccagctgcaactaatggagatcttgcatcgagaagtaacattgcctttatgggaacactggtcagatgtggcaaagcaaagggtgttgtcattggaacaggagaaaattctgaatttggggaggtttttaaaatgatgcaagcagaagaggcaccaaaaacccctctgcagaagagcatggacctcttaggaaaacaactttccttttactcctttggtataataggaatcatcatgttggttggctggttactgggaaaagatatcctggaaatgtttactattagtgtaagtttggctgtagcagcaattcctgaaggtctccccattgtggtcacagtgacgctagctcttggtgttatgagaatggtgaagaaaagggccattgtgaaaaagctgcctattgttgaaactctgggctgctgtaatgtgatttgttcagataaaactggaacactgacgaagaatgaaatgactgttactcacatatttacttcagatggtctgcatgctgaggttactggagttggctataatcaatttggggaagtgattgttgatggtgatgttgttcatggattctataacccagctgttagcagaattgttgaggcgggctgtgtgtgcaatgatgctgtaattagaaacaatactctaatggggaagccaacagaaggggccttaattgctcttgcaatgaagatgggtcttgatggacttcaacaagactacatcagaaaagctgaatacccttttagctctgagcaaaagtggatggctgttaagtgtgtacaccgaacacagcaggacagaccagagatttgttttatgaaaggtgcttacgaacaagtaattaagtactgtactacataccagagcaaagggcagaccttgacacttactcagcagcagagagatgtgtaccaacaagagaaggcacgcatgggctcagcgggactcagagttcttgctttggcttctggtcctgaactgggacagctgacatttcttggcttggtgggaatcattgatccacctagaactggtgtgaaagaagctgttacaacactcattgcctcaggagtatcaataaaaatgattactggagattcacaggagactgcagttgcaatcgccagtcgtctgggattgtattccaaaacttcccagtcagtctcaggagaagaaatagatgcaatggatgttcagcagctttcacaaatagtaccaaaggttgcagtattttacagagctagcccaaggcacaagatgaaaattattaagtcgctacagaagaacggttcagttgtagccatgacaggagatggagtaaatgatgcagttgctctgaaggctgcagacattggagttgcgatgggccagactggtacagatgtttgcaaagaggcagcagacatgatcctagtggatgatgattttcaaaccataatgtctgcaatcgaagagggtaaagggatttataataacattaaaaatttcgttagattccagctgagcacgagtatagcagcattaactttaatctcattggctacattaatgaactttcctaatcctctcaatgccatgcagattttgtggatcaatattattatggatggacccccagctcagagccttggagtagaaccagtggataaagatgtcattcgtaaacctcctcgcaactggaaagacagcattttgactaaaaacttgatacttaaaatacttgtttcatcaataatcattgtttgtgggactttgtttgtcttctggcgtgagctacgagacaatgtgattacacctcgagacacaacaatgaccttcacatgctttgtgttttttgacatgttcaatgcactaagttccagatcccagaccaagtctgtgtttgagattggactctgcagtaatagaatgttttgctatgcagttcttggatccatcatgggacaattactagttatttactttcctccgcttcagaaggtttttcagactgagagcctaagcatactggatctgttgtttcttttgggtctcacctcatcagtgtgcatagtggcagaaattataaagaaggttgaaaggagcagggaaaagatccagaagcatgttagttcgacatcatcatcttttcttgaagtatgatgcatattgcattattttatttgcaaactaggaattgcagtctgaggatcatttagaagggcaagttcaagaggatatgaagatttgagaactttttaactattcattgactaaaaatgaacattaatgttaaagacttaagactttaacctgctggcagtcccaaatgaaattatgcaactttgatatcatattccttgatttaaattggcttttgtgattgagtgaaactttataaagcatatggtcagttatttaattaaaaaggcaaaacctgaaccaccttctgcacttaaagaagtctaacagtacaaatacactatctatcttagatagatatatttttttttatttttaaatattgtactatttatggtggtggggctttcttactaatacacaaataaatttaatcatttcaaaggcattctatttggtttagaagttgattcccaggagtgccatatttcagctactgtatttcctttttcttgtaatgtaagcagctcagataccatgtgctatcatttttgtatcaagttttttgcacaggatgtgaccactgtcagatcactgttcttttctttctttttgtgattgaaaagcctatactacaatttgaagtaaatttttgtttttcttagtaagtgtaaatggttgctttatttttattttaaaaaggtatgtctttggtttggcagaattcatgcagggctatcaagtggtgttctagggtaacagtgtccataattaacgcttagtcatagagtcaaaaacatttaagactgattgggttgaagtttataataaattatattaacatgtcttcctttttgaggtaaagatatatactttgtcaaatatcattttgtcatcctctaaatataaatccaaatacctcagctaagtaattctattttattatttttactgttatgtatgtttttaatcatatttcttaggaagtataggctactggacttagaataaaaagtccccaaacccaaacaaatggtttatgaaccagagtatatgtggaagattctttgctggtcttgctctgtgtgcatctgaagcttctttggcctagattttagcacaaacctgagtatatctcttctactttcatcatgtgttctgtaccttctttttgtttcattgggcatgctagggaaataggtggattttgtgtgtaatgccatcagtttttatgaaagcttgatgaggtataggtcatttgttttgagtatgtgggccagaaatttaaaattagaaatttgtttttctgttgagtatataaacaaaaattggtcccaattctaacaggtttaatccttcttgaagccaataagttttatcttttataatctgtcaggatgaaccactccttagcttttatccaatattaaactgcaagtgttagcactgaaatattgtcattgatagggaaaatatctattctttgagtcattgttactgaggcagttgagtgtaaggagctggctgcagtttattctacttaaccctttaaggctgaattgtcaaatgtacattgttccatgtcgttagatggaacatggaagccattgtctaatcaactctatcattagtgacttgatgtctcataccttaattttgtaatgatttttattctctgttacaaagacttgaaatacgtattaaatgcacgttaatgttttgctttgcattttaggttcagattatgacttgattgaaataaatgtgcctatacattcatttgctttgtactataaaaataaaaatgatttcttaagttaa

SEQ ID NO: 2752 - DNA, 4714 bp, Homo sapiens
  source 1..4714: mol_type = unassigned DNA
cttcctccctcccgctcgcttcttctcacgccgggagcaggctcccgcctcgcaccgctgccccgcgagcagctcctcttctcccgaggcgcgcggggcgcccccgcgagccccgcggctgagaccccgcagcctggaggagggctgtccggggctttgggttgcacgttttcaaaaaatacctaatggtgaaaatgagacaatgattcctgtattgacatcaaaaaaagcaagtgaattaccagtcagtgaagttgcaagcattctccaagctgatcttcagaatggtctaaacaaatgtgaagttagtcataggcgagcctttcatggctggaatgagtttgatattagtgaagatgagccactgtggaagaagtatatttctcagtttaaaaatccccttattatgctgcttctggcttctgcagtcatcagtgttttaatgcatcagtttgatgatgccgtcagtatcactgtggcaatacttatcgttgttacagttgcctttgttcaggaatatcgttcagaaaaatctcttgaagaattgagtaaacttgtgccaccagaatgccattgtgtgcgtgaaggaaaattggagcatacacttgcccgagacttggttccaggtgatacagtttgcctttctgttggggatagagttcctgctgacttacgcttgtttgaggctgtggatctttccattgatgagtccagcttgacaggtgagacaacgccttgttctaaggtgacagctcctcagccagctgcaactaatggagatcttgcatcgagaagtaacattgcctttatgggaacactggtcagatgtggcaaagcaaagggtgttgtcattggaacaggagaaaattctgaatttggggaggtttttaaaatgatgcaagcagaagaggcaccaaaaacccctctgcagaagagcatggacctcttaggaaaacaactttccttttactcctttggtataataggaatcatcatgttggttggctggttactgggaaaagatatcctggaaatgtttactattagtgtaagtttggctgtagcagcaattcctgaaggtctccccattgtggtcacagtgacgctagctcttggtgttatgagaatggtgaagaaaagggccattgtgaaaaagctgcctattgttgaaactctgggctgctgtaatgtgatttgttcagataaaactggaacactgacgaagaatgaaatgactgttactcacatatttacttcagatggtctgcatgctgaggttactggagttggctataatcaatttggggaagtgattgttgatggtgatgttgttcatggattctataacccagctgttagcagaattgttgaggcgggctgtgtgtgcaatgatgctgtaattagaaacaatactctaatggggaagccaacagaaggggccttaattgctcttgcaatgaagatgggtcttgatggacttcaacaagactacatcagaaaagctgaatacccttttagctctgagcaaaagtggatggctgttaagtgtgtacaccgaacacagcaggacagaccagagatttgttttatgaaaggtgcttacgaacaagtaattaagtactgtactacataccagagcaaagggcagaccttgacacttactcagcagcagagagatgtgtaccaacaagagaaggcacgcatgggctcagcgggactcagagttcttgctttggcttctggtcctgaactgggacagctgacatttcttggcttggtgggaatcattgatccacctagaactggtgtgaaagaagctgttacaacactcattgcctcaggagtatcaataaaaatgattactggagattcacaggagactgcagttgcaatcgccagtcgtctgggattgtattccaaaacttcccagtcagtctcaggagaagaaatagatgcaatggatgttcagcagctttcacaaatagtaccaaaggttgcagtattttacagagctagcccaaggcacaagatgaaaattattaagtcgctacagaagaacggttcagttgtagccatgacaggagatggagtaaatgatgcagttgctctgaaggctgcagacattggagttgcgatgggccagactggtacagatgtttgcaaagaggcagcagacatgatcctagtggatgatgattttcaaaccataatgtctgcaatcgaagagggtaaagggatttataataacattaaaaatttcgttagattccagctgagcacgagtatagcagcattaactttaatctcattggctacattaatgaactttcctaatcctctcaatgccatgcagattttgtggatcaatattattatggatggacccccagctcagagccttggagtagaaccagtggataaagatgtcattcgtaaacctcctcgcaactggaaagacagcattttgactaaaaacttgatacttaaaatacttgtttcatcaataatcattgtttgtgggactttgtttgtcttctggcgtgagctacgagacaatgtgattacacctcgagacacaacaatgaccttcacatgctttgtgttttttgacatgttcaatgcactaagttccagatcccagaccaagtctgtgtttgagattggactctgcagtaatagaatgttttgctatgcagttcttggatccatcatgggacaattactagttatttactttcctccgcttcagaaggtttttcagactgagagcctaagcatactggatctgttgtttcttttgggtctcacctcatcagtgtgcatagtggcagaaattataaagaaggttgaaaggagcagggaaaagatccagaagcatgttagttcgacatcatcatcttttcttgaagtatgatgcatattgcattattttatttgcaaactaggaattgcagtctgaggatcatttagaagggcaagttcaagaggatatgaagatttgagaactttttaactattcattgactaaaaatgaacattaatgttaaagacttaagactttaacctgctggcagtcccaaatgaaattatgcaactttgatatcatattccttgatttaaattggcttttgtgattgagtgaaactttataaagcatatggtcagttatttaattaaaaaggcaaaacctgaaccaccttctgcacttaaagaagtctaacagtacaaatacactatctatcttagatagatatatttttttttatttttaaatattgtactatttatggtggtggggctttcttactaatacacaaataaatttaatcatttcaaaggcattctatttggtttagaagttgattcccaggagtgccatatttcagctactgtatttcctttttcttgtaatgtaagcagctcagataccatgtgctatcatttttgtatcaagttttttgcacaggatgtgaccactgtcagatcactgttcttttctttctttttgtgattgaaaagcctatactacaatttgaagtaaatttttgtttttcttagtaagtgtaaatggttgctttatttttattttaaaaaggtatgtctttggtttggcagaattcatgcagggctatcaagtggtgttctagggtaacagtgtccataattaacgcttagtcatagagtcaaaaacatttaagactgattgggttgaagtttataataaattatattaacatgtcttcctttttgaggtaaagatatatactttgtcaaatatcattttgtcatcctctaaatataaatccaaatacctcagctaagtaattctattttattatttttactgttatgtatgtttttaatcatatttcttaggaagtataggctactggacttagaataaaaagtccccaaacccaaacaaatggtttatgaaccagagtatatgtggaagattctttgctggtcttgctctgtgtgcatctgaagcttctttggcctagattttagcacaaacctgagtatatctcttctactttcatcatgtgttctgtaccttctttttgtttcattgggcatgctagggaaataggtggattttgtgtgtaatgccatcagtttttatgaaagcttgatgaggtataggtcatttgttttgagtatgtgggccagaaatttaaaattagaaatttgtttttctgttgagtatataaacaaaaattggtcccaattctaacaggtttaatccttcttgaagccaataagttttatcttttataatctgtcaggatgaaccactccttagcttttatccaatattaaactgcaagtgttagcactgaaatattgtcattgatagggaaaatatctattctttgagtcattgttactgaggcagttgagtgtaaggagctggctgcagtttattctacttaaccctttaaggctgaattgtcaaatgtacattgttccatgtcgttagatggaacatggaagccattgtctaatcaactctatcattagtgacttgatgtctcataccttaattttgtaatgatttttattctctgttacaaagacttgaaatacgtattaaatgcacgttaatgttttgctttgcattttaggttcagattatgacttgattgaaataaatgtgcctatacattcatttgctttgtactataaaaataaaaatgatttcttaagttaa

SEQ ID NO: 2753 - DNA, 556 bp, Homo sapiens
  source 1..556: mol_type = unassigned DNA
ctccctcccgctcgcttcttctcacgccgggagcaggctcccgcctcgcaccgctgccccgcgagcagctcctcttctcccgaggcgcgcggggcgcccccgcgagccccgcggctgagaccccgcagcctggaggagggctgtccggggctttggactttgtagccatcaacccgagtgcagtttcgatggaaaatgaaggttgcacgttttcaaaaaatacctaatggtgaaaatgagacaatgattcctgtattgacatcaaaaaaagcaagtgaattaccagtcagtgaagttgcaagcattctccaagctgatcttcagaatggtctaaacaaatgtgaagttagtcataggcgagcctttcatggctggaatgagtttgatattagtgaagatgagccactgtggaagaagtatatttctcagtttaaaaatccccttattatgctgcttctggcttctgcagtcatcagtgttttaatgcatcagtttgatgatgccgtcagtatcactgtggcaatacttatcgttgttacagttgcctttgttcagg

SEQ ID NO: 2754 - DNA, 4888 bp, Homo sapiens
  source 1..4888: mol_type = unassigned DNA
attgcatttctggacgcttctagacagtgttcatacttggctgtctggtttcaccaggaactctacccaaaagaggaaacagcaaggagaacatttgctttgtttgtaggagggaagttgtcgagctacaaacaaatctttaggcatctgaggaattgctaagtttctaatttcatatggttgctgacaaggaggtgcagacaaggaccctcttgctttcctcactatggatagtctgttgcctccatctagattctcttatttcaaaaaatatcctctccatgcaattaggagatatttatcgacgctgagaaaccaaagagccgaagaacaggttgcacgttttcaaaaaatacctaatggtgaaaatgagacaatgattcctgtattgacatcaaaaaaagcaagtgaattaccagtcagtgaagttgcaagcattctccaagctgatcttcagaatggtctaaacaaatgtgaagttagtcataggcgagcctttcatggctggaatgagtttgatattagtgaagatgagccactgtggaagaagtatatttctcagtttaaaaatccccttattatgctgcttctggcttctgcagtcatcagtgttttaatgcatcagtttgatgatgccgtcagtatcactgtggcaatacttatcgttgttacagttgcctttgttcaggaatatcgttcagaaaaatctcttgaagaattgagtaaacttgtgccaccagaatgccattgtgtgcgtgaaggaaaattggagcatacacttgcccgagacttggttccaggtgatacagtttgcctttctgttggggatagagttcctgctgacttacgcttgtttgaggctgtggatctttccattgatgagtccagcttgacaggtgagacaacgccttgttctaaggtgacagctcctcagccagctgcaactaatggagatcttgcatcgagaagtaacattgcctttatgggaacactggtcagatgtggcaaagcaaagggtgttgtcattggaacaggagaaaattctgaatttggggaggtttttaaaatgatgcaagcagaagaggcaccaaaaacccctctgcagaagagcatggacctcttaggaaaacaactttccttttactcctttggtataataggaatcatcatgttggttggctggttactgggaaaagatatcctggaaatgtttactattagtgtaagtttggctgtagcagcaattcctgaaggtctccccattgtggtcacagtgacgctagctcttggtgttatgagaatggtgaagaaaagggccattgtgaaaaagctgcctattgttgaaactctgggctgctgtaatgtgatttgttcagataaaactggaacactgacgaagaatgaaatgactgttactcacatatttacttcagatggtctgcatgctgaggttactggagttggctataatcaatttggggaagtgattgttgatggtgatgttgttcatggattctataacccagctgttagcagaattgttgaggcgggctgtgtgtgcaatgatgctgtaattagaaacaatactctaatggggaagccaacagaaggggccttaattgctcttgcaatgaagatgggtcttgatggacttcaacaagactacatcagaaaagctgaatacccttttagctctgagcaaaagtggatggctgttaagtgtgtacaccgaacacagcaggacagaccagagatttgttttatgaaaggtgcttacgaacaagtaattaagtactgtactacataccagagcaaagggcagaccttgacacttactcagcagcagagagatgtgtaccaacaagagaaggcacgcatgggctcagcgggactcagagttcttgctttggcttctggtcctgaactgggacagctgacatttcttggcttggtgggaatcattgatccacctagaactggtgtgaaagaagctgttacaacactcattgcctcaggagtatcaataaaaatgattactggagattcacaggagactgcagttgcaatcgccagtcgtctgggattgtattccaaaacttcccagtcagtctcaggagaagaaatagatgcaatggatgttcagcagctttcacaaatagtaccaaaggttgcagtattttacagagctagcccaaggcacaagatgaaaattattaagtcgctacagaagaacggttcagttgtagccatgacaggagatggagtaaatgatgcagttgctctgaaggctgcagacattggagttgcgatgggccagactggtacagatgtttgcaaagaggcagcagacatgatcctagtggatgatgattttcaaaccataatgtctgcaatcgaagagggtaaagggatttataataacattaaaaatttcgttagattccagctgagcacgagtatagcagcattaactttaatctcattggctacattaatgaactttcctaatcctctcaatgccatgcagattttgtggatcaatattattatggatggacccccagctcagagccttggagtagaaccagtggataaagatgtcattcgtaaacctcctcgcaactggaaagacagcattttgactaaaaacttgatacttaaaatacttgtttcatcaataatcattgtttgtgggactttgtttgtcttctggcgtgagctacgagacaatgtgattacacctcgagacacaacaatgaccttcacatgctttgtgttttttgacatgttcaatgcactaagttccagatcccagaccaagtctgtgtttgagattggactctgcagtaatagaatgttttgctatgcagttcttggatccatcatgggacaattactagttatttactttcctccgcttcagaaggtttttcagactgagagcctaagcatactggatctgttgtttcttttgggtctcacctcatcagtgtgcatagtggcagaaattataaagaaggttgaaaggagcagggaaaagatccagaagcatgttagttcgacatcatcatcttttcttgaagtatgatgcatattgcattattttatttgcaaactaggaattgcagtctgaggatcatttagaagggcaagttcaagaggatatgaagatttgagaactttttaactattcattgactaaaaatgaacattaatgttaaagacttaagactttaacctgctggcagtcccaaatgaaattatgcaactttgatatcatattccttgatttaaattggcttttgtgattgagtgaaactttataaagcatatggtcagttatttaattaaaaaggcaaaacctgaaccaccttctgcacttaaagaagtctaacagtacaaatacactatctatcttagatagatatatttttttttatttttaaatattgtactatttatggtggtggggctttcttactaatacacaaataaatttaatcatttcaaaggcattctatttggtttagaagttgattcccaggagtgccatatttcagctactgtatttcctttttcttgtaatgtaagcagctcagataccatgtgctatcatttttgtatcaagttttttgcacaggatgtgaccactgtcagatcactgttcttttctttctttttgtgattgaaaagcctatactacaatttgaagtaaatttttgtttttcttagtaagtgtaaatggttgctttatttttattttaaaaaggtatgtctttggtttggcagaattcatgcagggctatcaagtggtgttctagggtaacagtgtccataattaacgcttagtcatagagtcaaaaacatttaagactgattgggttgaagtttataataaattatattaacatgtcttcctttttgaggtaaagatatatactttgtcaaatatcattttgtcatcctctaaatataaatccaaatacctcagctaagtaattctattttattatttttactgttatgtatgtttttaatcatatttcttaggaagtataggctactggacttagaataaaaagtccccaaacccaaacaaatggtttatgaaccagagtatatgtggaagattctttgctggtcttgctctgtgtgcatctgaagcttctttggcctagattttagcacaaacctgagtatatctcttctactttcatcatgtgttctgtaccttctttttgtttcattgggcatgctagggaaataggtggattttgtgtgtaatgccatcagtttttatgaaagcttgatgaggtataggtcatttgttttgagtatgtgggccagaaatttaaaattagaaatttgtttttctgttgagtatataaacaaaaattggtcccaattctaacaggtttaatccttcttgaagccaataagttttatcttttataatctgtcaggatgaaccactccttagcttttatccaatattaaactgcaagtgttagcactgaaatattgtcattgatagggaaaatatctattctttgagtcattgttactgaggcagttgagtgtaaggagctggctgcagtttattctacttaaccctttaaggctgaattgtcaaatgtacattgttccatgtcgttagatggaacatggaagccattgtctaatcaactctatcattagtgacttgatgtctcataccttaattttgtaatgatttttattctctgttacaaagacttgaaatacgtattaaatgcacgttaatgttttgctttgcattttaggttcagattatgacttgattgaaataaatgtgcctatacattcatttgctttgtactataaaaataaaaatgatttcttaagttaa

SEQ ID NO: 2755 - DNA, 3579 bp, Homo sapiens
  source 1..3579: mol_type = unassigned DNA
tttctggacgcttctagacagtgttcatacttggctgtctggtttcaccaggaactctacccaaaagaggaaacagcaaggagaacatttgctttgtttgtaggagggaagttgtcgagctacaaacaaatctttaggcatctgaggaattgctaagtttctaatttcatatggttgctgacaaggaggtgcagacaaggaccctcttgctttcctcactatggatagtctgttgcctccatctagattctcttatttcaaaaaatatcctctccatgcaattaggagatatttatcgacgctgagaaaccaaagagccgaagaacaggttgcacgttttcaaaaaatacctaatggtgaaaatgagacaatgattcctgtattgacatcaaaaaaagcaagtgaattaccagtcagtgaagttgcaagcattctccaagctgatcttcagaatggtctaaacaaatgtgaagttagtcataggcgagcctttcatggctggaatgagtttgatattagtgaagatgagccactgtggaagaagtatatttctcagtttaaaaatccccttattatgctgcttctggcttctgcagtcatcagtgttttaatgcatcagtttgatgatgccgtcagtatcactgtggcaatacttatcgttgttacagttgcctttgttcaggaatatcgttcagaaaaatctcttgaagaattgagtaaacttgtgccaccagaatgccattgtgtgcgtgaaggaaaattggagcatacacttgcccgagacttggttccaggtgatacagtttgcctttctgttggggatagagttcctgctgacttacgcttgtttgaggctgtggatctttccattgatgagtccagcttgacaggtgagacaacgccttgttctaaggtgacagctcctcagccagctgcaactaatggagatcttgcatcgagaagtaacattgcctttatgggaacactggtcagatgtggcaaagcaaagggtgttgtcattggaacaggagaaaattctgaatttggggaggtttttaaaatgatgcaagcagaagaggcaccaaaaacccctctgcagaagagcatggacctcttaggaaaacaactttccttttactcctttggtataataggaatcatcatgttggttggctggttactgggaaaagatatcctggaaatgtttactattagtgtaagtttggctgtagcagcaattcctgaaggtctccccattgtggtcacagtgacgctagctcttggtgttatgagaatggtgaagaaaagggccattgtgaaaaagctgcctattgttgaaactctgggctgctgtaatgtgatttgttcagataaaactggaacactgacgaagaatgaaatgactgttactcacatatttacttcagatggtctgcatgctgaggttactggagttggctataatcaatttggggaagtgattgttgatggtgatgttgttcatggattctataacccagctgttagcagaattgttgaggcgggctgtgtgtgcaatgatgctgtaattagaaacaatactctaatggggaagccaacagaaggggccttaattgctcttgcaatgaagatgggtcttgatggacttcaacaagactacatcagaaaagctgaatacccttttagctctgagcaaaagtggatggctgttaagtgtgtacaccgaacacagcaggacagaccagagatttgttttatgaaaggtgcttacgaacaagtaattaagtactgtactacataccagagcaaagggcagaccttgacacttactcagcagcagagagatgtgtaccaacaagagaaggcacgcatgggctcagcgggactcagagttcttgctttggcttctggtcctgaactgggacagctgacatttcttggcttggtgggaatcattgatccacctagaactggtgtgaaagaagctgttacaacactcattgcctcaggagtatcaataaaaatgattactggagattcacaggagactgcagttgcaatcgccagtcgtctgggattgtattccaaaacttcccagtcagtctcaggagaagaaatagatgcaatggatgttcagcagctttcacaaatagtaccaaaggttgcagtattttacagagctagcccaaggcacaagatgaaaattattaagtcgctacagaagaacggttcagttgtagccatgacaggagatggagtaaatgatgcagttgctctgaaggctgcagacattggagttgcgatgggccagactggtacagatgtttgcaaagaggcagcagacatgatcctagtggatgatgattttcaaaccataatgtctgcaatcgaagagggtaaagggatttataataacattaaaaatttcgttagattccagctgagcacgagtatagcagcattaactttaatctcattggctacattaatgaactttcctaatcctctcaatgccatgcagattttgtggatcaatattattatggatggacccccagctcagagccttggagtagaaccagtggataaagatgtcattcgtaaacctcctcgcaactggaaagacagcattttgactaaaaacttgatacttaaaatacttgtttcatcaataatcattgtttgtgggactttgtttgtcttctggcgtgagctacgagacaatgtgattacacctcgagacacaacaatgaccttcacatgctttgtgttttttgacatgttcaatgcactaagttccagatcccagaccaagtctgtgtttgagattggactctgcagtaatagaatgttttgctatgcagttcttggatccatcatgggacaattactagttatttactttcctccgcttcagaaggtttttcagactgagagcctaagcatactggatctgttgtttcttttgggtctcacctcatcagtgtgcatagtggcagaaattataaagaaggttgaaaggagcagggaaaagatccagaagcatgtctggctctgggagaggagtggacagcagctggttgagatacatccccatctggagacaggactgccactgacagaagatgtgagctgtgtctaagtccagtcttgtgcccagccgtgtctgcgccttcactctttggaactctgcatacaacatcttagcaccatcttcctgcagctcttccttacctaaataaagaaacagcccaagggcagtatttctaaaagcactgtaacagcttttcattttctccacatatactacaaattctataaagaaagaaattaatttaaaaaaactaagatgtttttctcttctggcttcataaatgccttgctgtataaattgaaatattgatactgaactgtctttttaatgatgacctaactttattcaacccatcggaatttactttttccctgaaataagatcttttccactggtctactacctgaccataaacatgtctgcatttgaattctctaaaccctaaatctgtgtctatgaaaaatacaaatgactattaaatatta

SEQ ID NO: 2756 - DNA, 540 bp, Homo sapiens
  source 1..540: mol_type = unassigned DNA
gactgactaagaggagtagttaaaatggagaaagcttagctgtactttgtcttgcatgttaaacgtaatgagtttagaggattatgattatttgtaatcatcaggatctgctagacaggacatctgttttactttttactcttatgttggtggagaaatagcgtgcttttcattcaatgtgaaaattttgtgttctagctgggcaccgatggcttagtttttgaaatgtaatttcttgagaagtagcatgtggttgcacgttttcaaaaaatacctaatggtgaaaatgagacaatgattcctgtattgacatcaaaaaaagcaagtgaattaccagtcagtgaagttgcaagcattctccaagctgatcttcagaatggtctaaacaaatgtgaagttagtcataggcgagcctttcatggctggaatgagtttgatattagtgaagatgagccactgtggaagaagtatatttctcagtttaaaaatccccttattatgctgcttctggcttctgcagtcatcagtgttttaatgcat

SEQ ID NO: 2757 - DNA, 4969 bp, Homo sapiens
  source 1..4969: mol_type = unassigned DNA
caaagctgggttcgcggctggcccaggagtgcggggcgcgactgggcggccggcggcggggaggggcggagcgcaggagtcggaggcgggagcagaccagcacggcctcgcggagccggcccggcggaccgtgacgggtcccctcacctcctcttctctcccctccccgcccgccctctctccctcccttcctccctcccgctcgcttcttctcacgccgggagcaggctcccgcctcgcaccgctgccccgcgagcagctcctcttctcccgaggcgcgcggggcgcccccgcgagccccgcggctgagaccccgcagcctggaggagggctgtccggggctttggtgtggccgtggctgacactaaagactttgtagccatcaacccgagtgcagtttcgatggaaaatgaaggttgcacgttttcaaaaaatacctaatggtgaaaatgagacaatgattcctgtattgacatcaaaaaaagcaagtgaattaccagtcagtgaagttgcaagcattctccaagctgatcttcagaatggtctaaacaaatgtgaagttagtcataggcgagcctttcatggctggaatgagtttgatattagtgaagatgagccactgtggaagaagtatatttctcagtttaaaaatccccttattatgctgcttctggcttctgcagtcatcagtgttttaatgcatcagtttgatgatgccgtcagtatcactgtggcaatacttatcgttgttacagttgcctttgttcaggaatatcgttcagaaaaatctcttgaagaattgagtaaacttgtgccaccagaatgccattgtgtgcgtgaaggaaaattggagcatacacttgcccgagacttggttccaggtgatacagtttgcctttctgttggggatagagttcctgctgacttacgcttgtttgaggctgtggatctttccattgatgagtccagcttgacaggtgagacaacgccttgttctaaggtgacagctcctcagccagctgcaactaatggagatcttgcatcgagaagtaacattgcctttatgggaacactggtcagatgtggcaaagcaaagggtgttgtcattggaacaggagaaaattctgaatttggggaggtttttaaaatgatgcaagcagaagaggcaccaaaaacccctctgcagaagagcatggacctcttaggaaaacaactttccttttactcctttggtataataggaatcatcatgttggttggctggttactgggaaaagatatcctggaaatgtttactattagtgtaagtttggctgtagcagcaattcctgaaggtctccccattgtggtcacagtgacgctagctcttggtgttatgagaatggtgaagaaaagggccattgtgaaaaagctgcctattgttgaaactctgggctgctgtaatgtgatttgttcagataaaactggaacactgacgaagaatgaaatgactgttactcacatatttacttcagatggtctgcatgctgaggttactggagttggctataatcaatttggggaagtgattgttgatggtgatgttgttcatggattctataacccagctgttagcagaattgttgaggcgggctgtgtgtgcaatgatgctgtaattagaaacaatactctaatggggaagccaacagaaggggccttaattgctcttgcaatgaagatgggtcttgatggacttcaacaagactacatcagaaaagctgaatacccttttagctctgagcaaaagtggatggctgttaagtgtgtacaccgaacacagcaggacagaccagagatttgttttatgaaaggtgcttacgaacaagtaattaagtactgtactacataccagagcaaagggcagaccttgacacttactcagcagcagagagatgtgtaccaacaagagaaggcacgcatgggctcagcgggactcagagttcttgctttggcttctggtcctgaactgggacagctgacatttcttggcttggtgggaatcattgatccacctagaactggtgtgaaagaagctgttacaacactcattgcctcaggagtatcaataaaaatgattactggagattcacaggagactgcagttgcaatcgccagtcgtctgggattgtattccaaaacttcccagtcagtctcaggagaagaaatagatgcaatggatgttcagcagctttcacaaatagtaccaaaggttgcagtattttacagagctagcccaaggcacaagatgaaaattattaagtcgctacagaagaacggttcagttgtagccatgacaggagatggagtaaatgatgcagttgctctgaaggctgcagacattggagttgcgatgggccagactggtacagatgtttgcaaagaggcagcagacatgatcctagtggatgatgattttcaaaccataatgtctgcaatcgaagagggtaaagggatttataataacattaaaaatttcgttagattccagctgagcacgagtatagcagcattaactttaatctcattggctacattaatgaactttcctaatcctctcaatgccatgcagattttgtggatcaatattattatggatggacccccagctcagagccttggagtagaaccagtggataaagatgtcattcgtaaacctcctcgcaactggaaagacagcattttgactaaaaacttgatacttaaaatacttgtttcatcaataatcattgtttgtgggactttgtttgtcttctggcgtgagctacgagacaatgtgattacacctcgagacacaacaatgaccttcacatgctttgtgttttttgacatgttcaatgcactaagttccagatcccagaccaagtctgtgtttgagattggactctgcagtaatagaatgttttgctatgcagttcttggatccatcatgggacaattactagttatttactttcctccgcttcagaaggtttttcagactgagagcctaagcatactggatctgttgtttcttttgggtctcacctcatcagtgtgcatagtggcagaaattataaagaaggttgaaaggagcagggaaaagatccagaagcatgttagttcgacatcatcatcttttcttgaagtatgatgcatattgcattattttatttgcaaactaggaattgcagtctgaggatcatttagaagggcaagttcaagaggatatgaagatttgagaactttttaactattcattgactaaaaatgaacattaatgttaaagacttaagactttaacctgctggcagtcccaaatgaaattatgcaactttgatatcatattccttgatttaaattggcttttgtgattgagtgaaactttataaagcatatggtcagttatttaattaaaaaggcaaaacctgaaccaccttctgcacttaaagaagtctaacagtacaaatacactatctatcttagatagatatatttttttttatttttaaatattgtactatttatggtggtggggctttcttactaatacacaaataaatttaatcatttcaaaggcattctatttggtttagaagttgattcccaggagtgccatatttcagctactgtatttcctttttcttgtaatgtaagcagctcagataccatgtgctatcatttttgtatcaagttttttgcacaggatgtgaccactgtcagatcactgttcttttctttctttttgtgattgaaaagcctatactacaatttgaagtaaatttttgtttttcttagtaagtgtaaatggttgctttatttttattttaaaaaggtatgtctttggtttggcagaattcatgcagggctatcaagtggtgttctagggtaacagtgtccataattaacgcttagtcatagagtcaaaaacatttaagactgattgggttgaagtttataataaattatattaacatgtcttcctttttgaggtaaagatatatactttgtcaaatatcattttgtcatcctctaaatataaatccaaatacctcagctaagtaattctattttattatttttactgttatgtatgtttttaatcatatttcttaggaagtataggctactggacttagaataaaaagtccccaaacccaaacaaatggtttatgaaccagagtatatgtggaagattctttgctggtcttgctctgtgtgcatctgaagcttctttggcctagattttagcacaaacctgagtatatctcttctactttcatcatgtgttctgtaccttctttttgtttcattgggcatgctagggaaataggtggattttgtgtgtaatgccatcagtttttatgaaagcttgatgaggtataggtcatttgttttgagtatgtgggccagaaatttaaaattagaaatttgtttttctgttgagtatataaacaaaaattggtcccaattctaacaggtttaatccttcttgaagccaataagttttatcttttataatctgtcaggatgaaccactccttagcttttatccaatattaaactgcaagtgttagcactgaaatattgtcattgatagggaaaatatctattctttgagtcattgttactgaggcagttgagtgtaaggagctggctgcagtttattctacttaaccctttaaggctgaattgtcaaatgtacattgttccatgtcgttagatggaacatggaagccattgtctaatcaactctatcattagtgacttgatgtctcataccttaattttgtaatgatttttattctctgttacaaagacttgaaatacgtattaaatgcacgttaatgttttgctttgcattttaggttcagattatgacttgattgaaataaatgtgcctatacattcatttgctttgtactataaaaataaaaatgatttcttaagttaa

SEQ ID NO: 2758 - DNA, 559 bp, Homo sapiens
  source 1..559: mol_type = unassigned DNA
aggttctgaaggaaggggaggttcgggtatcccctggatgggggggcatctctagggcgccgccccgctggcatgctgctgctaggggtggtgggagcagccgtgggacgcgtggccgggagcgggggtgacagcctgggattccgggggcttctcttccttgtcctcctcctctcctctctattcccagtgtggccgtggctgacactaaagactttgtagccatcaacccgagtgcagtttcgatggaaaatgaaggttgcacgttttcaaaaaatacctaatggtgaaaatgagacaatgattcctgtattgacatcaaaaaaagcaagtgaattaccagtcagtgaagttgcaagcattctccaagctgatcttcagaatggtctaaacaaatgtgaagttagtcataggcgagcctttcatggctggaatgagtttgatattagtgaagatgagccactgtggaagaagtatatttctcagtttaaaaatccccttattatgctgcttctggcttctgcagtcatcagtgttttaatgcatcagtttgatgatg

SEQ ID NO: 2759 - DNA, 5067 bp, Homo sapiens
  source 1..5067: mol_type = unassigned DNA
tctctcagcggaagtaatagtgacaaagctgggttcgcggctggcccaggagtgcggggcgcgactgggcggccggcggcggggaggggcggagcgcaggagtcggaggcgggagcagaccagcacggcctcgcggagccggcccggcggaccgtgacgggtcccctcacctcctcttctctcccctccccgcccgccctctctccctcccttcctccctcccgctcgcttcttctcacgccgggagcaggctcccgcctcgcaccgctgccccgcgagcagctcctcttctcccgaggcgcgcggggcgcccccgcgagccccgcggctgagaccccgcagcctggaggagggctgtccggggctttggatgctgctgctaggggtggtgggagcagccgtgggacgcgtggccgggagcgggggtgacagcctgggattccgggggcttctcttccttgtcctcctcctctcctctctattcccagtgtggccgtggctgacactaaagactttgtagccatcaacccgagtgcagtttcgatggaaaatgaaggttgcacgttttcaaaaaatacctaatggtgaaaatgagacaatgattcctgtattgacatcaaaaaaagcaagtgaattaccagtcagtgaagttgcaagcattctccaagctgatcttcagaatggtctaaacaaatgtgaagttagtcataggcgagcctttcatggctggaatgagtttgatattagtgaagatgagccactgtggaagaagtatatttctcagtttaaaaatccccttattatgctgcttctggcttctgcagtcatcagtgttttaatgcatcagtttgatgatgccgtcagtatcactgtggcaatacttatcgttgttacagttgcctttgttcaggaatatcgttcagaaaaatctcttgaagaattgagtaaacttgtgccaccagaatgccattgtgtgcgtgaaggaaaattggagcatacacttgcccgagacttggttccaggtgatacagtttgcctttctgttggggatagagttcctgctgacttacgcttgtttgaggctgtggatctttccattgatgagtccagcttgacaggtgagacaacgccttgttctaaggtgacagctcctcagccagctgcaactaatggagatcttgcatcgagaagtaacattgcctttatgggaacactggtcagatgtggcaaagcaaagggtgttgtcattggaacaggagaaaattctgaatttggggaggtttttaaaatgatgcaagcagaagaggcaccaaaaacccctctgcagaagagcatggacctcttaggaaaacaactttccttttactcctttggtataataggaatcatcatgttggttggctggttactgggaaaagatatcctggaaatgtttactattagtgtaagtttggctgtagcagcaattcctgaaggtctccccattgtggtcacagtgacgctagctcttggtgttatgagaatggtgaagaaaagggccattgtgaaaaagctgcctattgttgaaactctgggctgctgtaatgtgatttgttcagataaaactggaacactgacgaagaatgaaatgactgttactcacatatttacttcagatggtctgcatgctgaggttactggagttggctataatcaatttggggaagtgattgttgatggtgatgttgttcatggattctataacccagctgttagcagaattgttgaggcgggctgtgtgtgcaatgatgctgtaattagaaacaatactctaatggggaagccaacagaaggggccttaattgctcttgcaatgaagatgggtcttgatggacttcaacaagactacatcagaaaagctgaatacccttttagctctgagcaaaagtggatggctgttaagtgtgtacaccgaacacagcaggacagaccagagatttgttttatgaaaggtgcttacgaacaagtaattaagtactgtactacataccagagcaaagggcagaccttgacacttactcagcagcagagagatgtgtaccaacaagagaaggcacgcatgggctcagcgggactcagagttcttgctttggcttctggtcctgaactgggacagctgacatttcttggcttggtgggaatcattgatccacctagaactggtgtgaaagaagctgttacaacactcattgcctcaggagtatcaataaaaatgattactggagattcacaggagactgcagttgcaatcgccagtcgtctgggattgtattccaaaacttcccagtcagtctcaggagaagaaatagatgcaatggatgttcagcagctttcacaaatagtaccaaaggttgcagtattttacagagctagcccaaggcacaagatgaaaattattaagtcgctacagaagaacggttcagttgtagccatgacaggagatggagtaaatgatgcagttgctctgaaggctgcagacattggagttgcgatgggccagactggtacagatgtttgcaaagaggcagcagacatgatcctagtggatgatgattttcaaaccataatgtctgcaatcgaagagggtaaagggatttataataacattaaaaatttcgttagattccagctgagcacgagtatagcagcattaactttaatctcattggctacattaatgaactttcctaatcctctcaatgccatgcagattttgtggatcaatattattatggatggacccccagctcagagccttggagtagaaccagtggataaagatgtcattcgtaaacctcctcgcaactggaaagacagcattttgactaaaaacttgatacttaaaatacttgtttcatcaataatcattgtttgtgggactttgtttgtcttctggcgtgagctacgagacaatgtgattacacctcgagacacaacaatgaccttcacatgctttgtgttttttgacatgttcaatgcactaagttccagatcccagaccaagtctgtgtttgagattggactctgcagtaatagaatgttttgctatgcagttcttggatccatcatgggacaattactagttatttactttcctccgcttcagaaggtttttcagactgagagcctaagcatactggatctgttgtttcttttgggtctcacctcatcagtgtgcatagtggcagaaattataaagaaggttgaaaggagcagggaaaagatccagaagcatgttagttcgacatcatcatcttttcttgaagtatgatgcatattgcattattttatttgcaaactaggaattgcagtctgaggatcatttagaagggcaagttcaagaggatatgaagatttgagaactttttaactattcattgactaaaaatgaacattaatgttaaagacttaagactttaacctgctggcagtcccaaatgaaattatgcaactttgatatcatattccttgatttaaattggcttttgtgattgagtgaaactttataaagcatatggtcagttatttaattaaaaaggcaaaacctgaaccaccttctgcacttaaagaagtctaacagtacaaatacactatctatcttagatagatatatttttttttatttttaaatattgtactatttatggtggtggggctttcttactaatacacaaataaatttaatcatttcaaaggcattctatttggtttagaagttgattcccaggagtgccatatttcagctactgtatttcctttttcttgtaatgtaagcagctcagataccatgtgctatcatttttgtatcaagttttttgcacaggatgtgaccactgtcagatcactgttcttttctttctttttgtgattgaaaagcctatactacaatttgaagtaaatttttgtttttcttagtaagtgtaaatggttgctttatttttattttaaaaaggtatgtctttggtttggcagaattcatgcagggctatcaagtggtgttctagggtaacagtgtccataattaacgcttagtcatagagtcaaaaacatttaagactgattgggttgaagtttataataaattatattaacatgtcttcctttttgaggtaaagatatatactttgtcaaatatcattttgtcatcctctaaatataaatccaaatacctcagctaagtaattctattttattatttttactgttatgtatgtttttaatcatatttcttaggaagtataggctactggacttagaataaaaagtccccaaacccaaacaaatggtttatgaaccagagtatatgtggaagattctttgctggtcttgctctgtgtgcatctgaagcttctttggcctagattttagcacaaacctgagtatatctcttctactttcatcatgtgttctgtaccttctttttgtttcattgggcatgctagggaaataggtggattttgtgtgtaatgccatcagtttttatgaaagcttgatgaggtataggtcatttgttttgagtatgtgggccagaaatttaaaattagaaatttgtttttctgttgagtatataaacaaaaattggtcccaattctaacaggtttaatccttcttgaagccaataagttttatcttttataatctgtcaggatgaaccactccttagcttttatccaatattaaactgcaagtgttagcactgaaatattgtcattgatagggaaaatatctattctttgagtcattgttactgaggcagttgagtgtaaggagctggctgcagtttattctacttaaccctttaaggctgaattgtcaaatgtacattgttccatgtcgttagatggaacatggaagccattgtctaatcaactctatcattagtgacttgatgtctcataccttaattttgtaatgatttttattctctgttacaaagacttgaaatacgtattaaatgcacgttaatgttttgctttgcattttaggttcagattatgacttgattgaaataaatgtgcctatacattc

SEQ ID NO: 2760 - DNA, 3439 bp, Homo sapiens
  source 1..3439: mol_type = unassigned DNA
cttcctccctcccgctcgcttcttctcacgccgggagcaggctcccgcctcgcaccgctgccccgcgagcagctcctcttctcccgaggcgcgcggggcgcccccgcgagccccgcggctgagaccccgcagcctggaggagggctgtccggggctttgggttgcacgttttcaaaaaatacctaatggtgaaaatgagacaatgattcctgtattgacatcaaaaaaagcaagtgaattaccagtcagtgaagttgcaagcattctccaagctgatcttcagaatggtctaaacaaatgtgaagttagtcataggcgagcctttcatggctggaatgagtttgatattagtgaagatgagccactgtggaagaagtatatttctcagtttaaaaatccccttattatgctgcttctggcttctgcagtcatcagtgttttaatgcatcagtttgatgatgccgtcagtatcactgtggcaatacttatcgttgttacagttgcctttgttcaggaatatcgttcagaaaaatctcttgaagaattgagtaaacttgtgccaccagaatgccattgtgtgcgtgaaggaaaattggagcatacacttgcccgagacttggttccaggtgatacagtttgcctttctgttggggatagagttcctgctgacttacgcttgtttgaggctgtggatctttccattgatgagtccagcttgacaggtgagacaacgccttgttctaaggtgacagctcctcagccagctgcaactaatggagatcttgcatcgagaagtaacattgcctttatgggaacactggtcagatgtggcaaagcaaagggtgttgtcattggaacaggagaaaattctgaatttggggaggtttttaaaatgatgcaagcagaagaggcaccaaaaacccctctgcagaagagcatggacctcttaggaaaacaactttccttttactcctttggtataataggaatcatcatgttggttggctggttactgggaaaagatatcctggaaatgtttactattagtgtaagtttggctgtagcagcaattcctgaaggtctccccattgtggtcacagtgacgctagctcttggtgttatgagaatggtgaagaaaagggccattgtgaaaaagctgcctattgttgaaactctgggctgctgtaatgtgatttgttcagataaaactggaacactgacgaagaatgaaatgactgttactcacatatttacttcagatggtctgcatgctgaggttactggagttggctataatcaatttggggaagtgattgttgatggtgatgttgttcatggattctataacccagctgttagcagaattgttgaggcgggctgtgtgtgcaatgatgctgtaattagaaacaatactctaatggggaagccaacagaaggggccttaattgctcttgcaatgaagatgggtcttgatggacttcaacaagactacatcagaaaagctgaatacccttttagctctgagcaaaagtggatggctgttaagtgtgtacaccgaacacagcaggacagaccagagatttgttttatgaaaggtgcttacgaacaagtaattaagtactgtactacataccagagcaaagggcagaccttgacacttactcagcagcagagagatgtgtaccaacaagagaaggcacgcatgggctcagcgggactcagagttcttgctttggcttctggtcctgaactgggacagctgacatttcttggcttggtgggaatcattgatccacctagaactggtgtgaaagaagctgttacaacactcattgcctcaggagtatcaataaaaatgattactggagattcacaggagactgcagttgcaatcgccagtcgtctgggattgtattccaaaacttcccagtcagtctcaggagaagaaatagatgcaatggatgttcagcagctttcacaaatagtaccaaaggttgcagtattttacagagctagcccaaggcacaagatgaaaattattaagtcgctacagaagaacggttcagttgtagccatgacaggagatggagtaaatgatgcagttgctctgaaggctgcagacattggagttgcgatgggccagactggtacagatgtttgcaaagaggcagcagacatgatcctagtggatgatgattttcaaaccataatgtctgcaatcgaagagggtaaagggatttataataacattaaaaatttcgttagattccagctgagcacgagtatagcagcattaactttaatctcattggctacattaatgaactttcctaatcctctcaatgccatgcagattttgtggatcaatattattatggatggacccccagctcagagccttggagtagaaccagtggataaagatgtcattcgtaaacctcctcgcaactggaaagacagcattttgactaaaaacttgatacttaaaatacttgtttcatcaataatcattgtttgtgggactttgtttgtcttctggcgtgagctacgagacaatgtgattacacctcgagacacaacaatgaccttcacatgctttgtgttttttgacatgttcaatgcactaagttccagatcccagaccaagtctgtgtttgagattggactctgcagtaatagaatgttttgctatgcagttcttggatccatcatgggacaattactagttatttactttcctccgcttcagaaggtttttcagactgagagcctaagcatactggatctgttgtttcttttgggtctcacctcatcagtgtgcatagtggcagaaattataaagaaggttgaaaggagcagggaaaagatccagaagcatgtctggctctgggagaggagtggacagcagctggttgagatacatccccatctggagacaggactgccactgacagaagatgtgagctgtgtctaagtccagtcttgtgcccagccgtgtctgcgccttcactctttggaactctgcatacaacatcttagcaccatcttcctgcagctcttccttacctaaataaagaaacagcccaagggcagtatttctaaaagcactgtaacagcttttcattttctccacatatactacaaattctataaagaaagaaattaatttaaaaaaactaagatgtttttctcttctggcttcataaatgccttgctgtataaattgaaatattgatactgaactgtctttttaatgatgacctaactttattcaacccatcggaatttactttttccctgaaataagatcttttccactggtctactacctgaccataaacatgtctgcatttgaattctctaaaccctaaatctgtgtctatgaaaaatacaaatgactattaaatattattctctttactgttctctttcaccgaaa

SEQ ID NO: 2761 - DNA, 3277 bp, Homo sapiens
  source 1..3277: mol_type = unassigned DNA
atatggttgctgacaaggaggtgcagacaaggaccctcttgctttcctcactatggatagtctgttgcctccatctagattctcttatttcaaaaaatatcctctccatgcaattaggagatatttatcgacgctgagaaaccaaagagccgaagaacaggttgcacgttttcaaaaaatacctaatggtgaaaatgagacaatgattcctgtattgacatcaaaaaaagcaagtgaattaccagtcagtgaagttgcaagcattctccaatttaaaaatccccttattatgctgcttctggcttctgcagtcatcagtgttttaatgcatcagtttgatgatgccgtcagtatcactgtggcaatacttatcgttgttacagttgcctttgttcaggaatatcgttcagaaaaatctcttgaagaattgagtaaacttgtgccaccagaatgccattgtgtgcgtgaaggaaaattggagcatacacttgcccgagacttggttccaggtgatacagtttgcctttctgttggggatagagttcctgctgacttacgcttgtttgaggctgtggatctttccattgatgagtccagcttgacaggtgagacaacgccttgttctaaggtgacagctcctcagccagctgcaactaatggagatcttgcatcgagaagtaacattgcctttatgggaacactggtcagatgtggcaaagcaaagggtgttgtcattggaacaggagaaaattctgaatttggggaggtttttaaaatgatgcaagcagaagaggcaccaaaaacccctctgcagaagagcatggacctcttaggaaaacaactttccttttactcctttggtataataggaatcatcatgttggttggctggttactgggaaaagatatcctggaaatgtttactattagtgtaagtttggctgtagcagcaattcctgaaggtctccccattgtggtcacagtgacgctagctcttggtgttatgagaatggtgaagaaaagggccattgtgaaaaagctgcctattgttgaaactctgggctgctgtaatgtgatttgttcagataaaactggaacactgacgaagaatgaaatgactgttactcacatatttacttcagatggtctgcatgctgaggttactggagttggctataatcaatttggggaagtgattgttgatggtgatgttgttcatggattctataacccagctgttagcagaattgttgaggcgggctgtgtgtgcaatgatgctgtaattagaaacaatactctaatggggaagccaacagaaggggccttaattgctcttgcaatgaagatgggtcttgatggacttcaacaagactacatcagaaaagctgaatacccttttagctctgagcaaaagtggatggctgttaagtgtgtacaccgaacacagcaggacagaccagagatttgttttatgaaaggtgcttacgaacaagtaattaagtactgtactacataccagagcaaagggcagaccttgacacttactcagcagcagagagatgtgtaccaacaagagaaggcacgcatgggctcagcgggactcagagttcttgctttggcttctggtcctgaactgggacagctgacatttcttggcttggtgggaatcattgatccacctagaactggtgtgaaagaagctgttacaacactcattgcctcaggagtatcaataaaaatgattactggagattcacaggagactgcagttgcaatcgccagtcgtctgggattgtattccaaaacttcccagtcagtctcaggagaagaaatagatgcaatggatgttcagcagctttcacaaatagtaccaaaggttgcagtattttacagagctagcccaaggcacaagatgaaaattattaagtcgctacagaagaacggttcagttgtagccatgacaggagatggagtaaatgatgcagttgctctgaaggctgcagacattggagttgcgatgggccagactggtacagatgtttgcaaagaggcagcagacatgatcctagtggatgatgattttcaaaccataatgtctgcaatcgaagagggtaaagggatttataataacattaaaaatttcgttagattccagctgagcacgagtatagcagcattaactttaatctcattggctacattaatgaactttcctaatcctctcaatgccatgcagattttgtggatcaatattattatggatggacccccagctcagagccttggagtagaaccagtggataaagatgtcattcgtaaacctcctcgcaactggaaagacagcattttgactaaaaacttgatacttaaaatacttgtttcatcaataatcattgtttgtgggactttgtttgtcttctggcgtgagctacgagacaatgtgattacacctcgagacacaacaatgaccttcacatgctttgtgttttttgacatgttcaatgcactaagttccagatcccagaccaagtctgtgtttgagattggactctgcagtaatagaatgttttgctatgcagttcttggatccatcatgggacaattactagttatttactttcctccgcttcagaaggtttttcagactgagagcctaagcatactggatctgttgtttcttttgggtctcacctcatcagtgtgcatagtggcagaaattataaagaaggttgaaaggagcagggaaaagatccagaagcatgttagttcgacatcatcatcttttcttgaagtctggctctgggagaggagtggacagcagctggttgagatacatccccatctggagacaggactgccactgacagaagatgtgagctgtgtctaagtccagtcttgtgcccagccgtgtctgcgccttcactctttggaactctgcatacaacatcttagcaccatcttcctgcagctcttccttacctaaataaagaaacagcccaagggcagtatttctaaaagcactgtaacagcttttcattttctccacatatactacaaattctataaagaaagaaattaatttaaaaaaactaagatgtttttctcttctggcttcataaatgccttgctgtataaattgaaatattgatactgaactgtctttttaatgatgacctaactttattcaacccatcggaatttactttttccctgaaataagatcttttccactggtctactacctgaccataaacatgtctgcatttgaattctctaa

SEQ ID NO: 2762 - DNA, 3384 bp, Homo sapiens
  source 1..3384: mol_type = unassigned DNA
gggtccggcccaggaggcttgggcgcgcgcagccatcccgggcctcgccggggacctagggacgcaggcaacgcctgcgcccgctcaccatggtcgagggacgcgtctccgagttcctgaagaaactcggcttctcgggcgggggccgccagtaccaggcgctggagaaggacgaagaggaagccttgattgatgaacagagtgagctgaaagccatcgagaaagagaagaaggtgacagccctgccccccaaggaagcgtgcaaatgccagaaagaggatttggccagagcgttttgtgtggacttacacactgggctgtcggagttctcggtgacgcagcgccggctggcccatggctggaatgagtttgttgctgacaacagcgaacctgtgtggaagaaatacctggatcagtttaagaaccccctgatcctgctgctgctgggctctgccctggtgagtgtcctcaccaaggagtatgaggacgccgtcagcatcgccacggcagtgcttgtcgtggtcactgtcgccttcatccaggagtacaggtcggagaaatctctggaagagctgaccaagatggttcctccagaatgtaactgcctaagagaaggaaaactccagcacctgcttgctcgagaactggttcctggtgatgtcgtatctctctcgatcggagaccggatccctgcagacatccgactcactgaggtcacggacctcttggtggatgaatccagtttcaccggggaagccgagccatgtagtaaaacagacagccccttgacaggcggtggggacctcaccaccctcagcaacatcgtcttcatggggaccctggtgcagtatgggaggggccagggggtcgtgattggaacaggggaaagctctcagttcggagaagtgtttaagatgatgcaggctgaagagacacctaaaactcctttgcagaaaagcatggacaggctaggaaagcaactgacactcttctcctttggcataatcggtctcatcatgctcattggctggtcgcaagggaaacaactcctgagtatgttcacgatcggggtcagcctggctgtggcggccattccagagggtctgcccatcgtcgtcatggtgacgctggtcctgggagtgctgcggatggccaagaagcgggtcatcgtgaagaagttacccatcgtggagactttaggttgctgcagcgttctctgttctgacaagacggggactctgactgccaatgaaatgacagtgacccagcttgtaacgtcagatgggcttcgtgccgaggtcagcggagttgggtatgacggtcaagggactgtgtgtcttctaccatccaaggaagtcattaaggaattttccaatgtctcagtgggaaagttagtggaggcgggctgtgttgccaacaatgcggtcatcagaaagaacgccgtgatggggcagcccaccgagggtgcattgatggccctggcgatgaagatggacttaagtgatattaaaaattcatatataagaaaaaaagagattccattcagttcagagcagaagtggatggcggtgaaatgcagtctgaagactgaggatcaggaagacatttacttcatgaaaggggccttggaagaggtgatccgctactgcaccatgtacaacaacgggggcatccccctgccgctgacgccccagcagaggtcattctgcctgcaggaagagaagaggatggggtcgctcggtttgcgggtgctggccctggcttctgggcccgagctggggcggctgacgtttctcggtcttgtgggcatcattgaccccccgagagttggcgtgaaggaagcagtccaggttctctccgagtctggtgtgtctgtgaagatgataacgggggatgccctggagacggccttggccataggaagaaacatcggcctgtgcaacgggaagctgcaagccatgtccggggaggaggtggacagcgtggagaagggcgagctggccgaccgcgtggggaaggtgtccgtgttcttcaggaccagcccaaagcacaagctcaaaatcatcaaggctctgcaggagtcaggggcgatcgtggccatgactggggatggggtgaacgacgcagtggccctgaagtctgcagacattgggatcgccatggggcagacagggacggacgtcagcaaagaggccgccaacatgatcctggtggatgatgacttctcagccatcatgaatgcagtggaggaaggcaagggtattttttacaacatcaaaaactttgtccgattccagctgagcacgagcatctccgccctgagtctcatcactctgtccaccgtgttcaacctgcccagccccctcaacgccatgcagatcctatggatcaacatcatcatggatgggccaccggcgcagagcttgggggtagagcccgttgacaaagacgccttcaggcagccaccacggagtgtgcgggacaccatcctcagcagagccctcatcctgaagatcctcatgtccgcggccatcatcatcagcgggaccctctttatcttctggaaggagatgcctgaagacagagcaagcactccccgcaccacgacgatgacgttcacttgttttgtgtttttcgatctcttcaacgccttgacctgccgctctcagaccaagctgatatttgagatcggctttctcaggaaccacatgttcctctactccgtcctggggtccatcctggggcagctggcggtcatttacatccccccgctgcagagggtcttccagacggagaacctgggagcgcttgatttgctgtttttaactggattggcctcatccgtcttcattttgtcagagctcctcaaactatgtgaaaaatactgttgcagccccaagagagtccagatgcaccctgaagatgtgtagtggaccgcactccgcggcaccttccctaatcatctcgatctggttgtgactgtggcccctgccgtgtctcctcgtcaggggagacttttaggaggccgcagccttccatcaccggatcagtttttcctcttaggaaagctgcaggaacctcgtgggctccagggacccaggcccacatccatccagcgttcccgctggctgtgggacagacagggaggggcctgtacagaaacaccacactgtttattaaatcacaatgatttttattaaccatgtctaactacgtatctgtgccacagcttgcagtgaggcaggccactcgtggcagatacaaggggctcctgagaggcagtgggtaggatggtcacactctgcccattgccctcctggaggccccatttcctcatcataaaatgagggacttttaaataaagtgctatgccgggggataatt

SEQ ID NO: 2763 - DNA, 3471 bp, Homo sapiens
  source 1..3471: mol_type = unassigned DNA
gggtccggcccaggaggcttgggcgcgcgcagccatcccgggcctcgccggggacctagggacgcaggcaacgcctgcgcccgctcaccatggtcgagggacgcgtctccgagttcctgaagaaactcggcttctcgggcgggggccgccagtaccaggcgctggagaaggacgaagaggaagccttgattgatgaacagagtgagctgaaagccatcgagaaagagaagaaggtgacagccctgccccccaaggaagcgtgcaaatgccagaaagaggatttggccagagcgttttgtgtggacttacacactgggctgtcggagttctcggtgacgcagcgccggctggcccatggctggaatgagtttgttgctgacaacagcgaacctgtgtggaagaaatacctggatcagtttaagaaccccctgatcctgctgctgctgggctctgccctggtgagtgtcctcaccaaggagtatgaggacgccgtcagcatcgccacggcagtgcttgtcgtggtcactgtcgccttcatccaggagtacaggtcggagaaatctctggaagagctgaccaagatggttcctccagaatgtaactgcctaagagaaggaaaactccagcacctgcttgctcgagaactggttcctggtgatgtcgtatctctctcgatcggagaccggatccctgcagacatccgactcactgaggtcacggacctcttggtggatgaatccagtttcaccggggaagccgagccatgtagtaaaacagacagccccttgacaggcggtggggacctcaccaccctcagcaacatcgtcttcatggggaccctggtgcagtatgggaggggccagggggtcgtgattggaacaggggaaagctctcagttcggagaagtgtttaagatgatgcaggctgaagagacacctaaaactcctttgcagaaaagcatggacaggctaggaaagcaactgacactcttctcctttggcataatcggtctcatcatgctcattggctggtcgcaagggaaacaactcctgagtatgttcacgatcggggtcagcctggctgtggcggccattccagagggtctgcccatcgtcgtcatggtgacgctggtcctgggagtgctgcggatggccaagaagcgggtcatcgtgaagaagttacccatcgtggagactttaggttgctgcagcgttctctgttctgacaagacggggactctgactgccaatgaaatgacagtgacccagcttgtaacgtcagatgggcttcgtgccgaggtcagcggagttgggtatgacggtcaagggactgtgtgtcttctaccatccaaggaagtcattaaggaattttccaatgtctcagtgggaaagttagtggaggcgggctgtgttgccaacaatgcggtcatcagaaagaacgccgtgatggggcagcccaccgagggtgcattgatggccctggcgatgaagatggacttaagtgatattaaaaattcatatataagaaaaaaagagattccattcagttcagagcagaagtggatggcggtgaaatgcagtctgaagactgaggatcaggaagacatttacttcatgaaaggggccttggaagaggtgatccgctactgcaccatgtacaacaacgggggcatccccctgccgctgacgccccagcagaggtcattctgcctgcaggaagagaagaggatggggtcgctcggtttgcgggtgctggccctggcttctgggcccgagctggggcggctgacgtttctcggtcttgtgggcatcattgaccccccgagagttggcgtgaaggaagcagtccaggttctctccgagtctggtgtgtctgtgaagatgataacgggggatgccctggagacggccttggccataggaagaaacatcggcctgtgcaacgggaagctgcaagccatgtccggggaggaggtggacagcgtggagaagggcgagctggccgaccgcgtggggaaggtgtccgtgttcttcaggaccagcccaaagcacaagctcaaaatcatcaaggctctgcaggagtcaggggcgatcgtggccatgactggggatggggtgaacgacgcagtggccctgaagtctgcagacattgggatcgccatggggcagacagggacggacgtcagcaaagaggccgccaacatgatcctggtggatgatgacttctcagccatcatgaatgcagtggaggaaggcaagggtattttttacaacatcaaaaactttgtccgattccagctgagcacgagcatctccgccctgagtctcatcactctgtccaccgtgttcaacctgcccagccccctcaacgccatgcagatcctatggatcaacatcatcatggatgggccaccggcgcagaggagttcccagaaaactgaagtgtgttgcactgcagtgagactgggagtagaaggcagaggagaaagtacctgggccggcagagctggcttgggggtagagcccgttgacaaagacgccttcaggcagccaccacggagtgtgcgggacaccatcctcagcagagccctcatcctgaagatcctcatgtccgcggccatcatcatcagcgggaccctctttatcttctggaaggagatgcctgaagacagagcaagcactccccgcaccacgacgatgacgttcacttgttttgtgtttttcgatctcttcaacgccttgacctgccgctctcagaccaagctgatatttgagatcggctttctcaggaaccacatgttcctctactccgtcctggggtccatcctggggcagctggcggtcatttacatccccccgctgcagagggtcttccagacggagaacctgggagcgcttgatttgctgtttttaactggattggcctcatccgtcttcattttgtcagagctcctcaaactatgtgaaaaatactgttgcagccccaagagagtccagatgcaccctgaagatgtgtagtggaccgcactccgcggcaccttccctaatcatctcgatctggttgtgactgtggcccctgccgtgtctcctcgtcaggggagacttttaggaggccgcagccttccatcaccggatcagtttttcctcttaggaaagctgcaggaacctcgtgggctccagggacccaggcccacatccatccagcgttcccgctggctgtgggacagacagggaggggcctgtacagaaacaccacactgtttattaaatcacaatgatttttattaaccatgtctaactacgtatctgtgccacagcttgcagtgaggcaggccactcgtggcagatacaaggggctcctgagaggcagtgggtaggatggtcacactctgcccattgccctcctggaggccccatttcctcatcataaaatgagggacttttaaataaagtgctatgccgggggataatt

SEQ ID NO: 2764 - DNA, 2782 bp, Homo sapiens
  source 1..2782: mol_type = unassigned DNA
agttctcagtgttctgggaatgttattcatcgatgcgttttggcagcaaaataggcttctggtttaagaaccccctgatcctgctgctgctgggctctgccctggtgagtgtcctcaccaaggagtatgaggacgccgtcagcatcgccacggcagtgcttgtcgtggtcactgtcgccttcatccagcctaagagaaggaaaactccagcacctgcttgctcgagaactggttcctggtgatgtcgtatctctctcgatcggagaccggatccctgcagacatccgactcactgaggtcacggacctcttggtggatgaatccagtttcaccggggaagccgagccatgtagtaaaacagacagccccttgacaggcggtggggacctcaccaccctcagcaacatcgtcttcatggggaccctggtgcagtatgggaggggccagggggtcgtgattggaacaggggaaagctctcagttcggagaagtgtttaagatgatgcaggctgaagagacacctaaaactcctttgcagaaaagcatggacaggctaggaaagcaactgacactcttctcctttggcataatcggtctcatcatgctcattggctggtcgcaagggaaacaactcctgagtatgttcacgatcggggtcagcctggctgtggcggccattccagagggtctgcccatcgtcgtcatggtgacgctggtcctgggagtgctgcggatggccaagaagcgggtcatcgtgaagaagttacccatcgtggagactttaggttgctgcagcgttctctgttctgacaagacggggactctgactgccaatgaaatgacagtgacccagcttgtaacgtcagatgggcttcgtgccgaggtcagcggagttgggtatgacggtcaagggactgtgtgtcttctaccatccaaggaagtcattaaggaattttccaatgtctcagtgggaaagttagtggaggcgggctgtgttgccaacaatgcggtcatcagaaagaacgccgtgatggggcagcccaccgagggtgcattgatggccctggcgatgaagatggacttaagtgatattaaaaattcatatataagaaaaaaagagattccattcagttcagagcagaagtggatggcggtgaaatgcagtctgaagactgaggatcaggaagacatttacttcatgaaaggggccttggaagaggtgatccgctactgcaccatgtacaacaacgggggcatccccctgccgctgacgccccagcagaggtcattctgcctgcaggaagagaagaggatggggtcgctcggtttgcgggtgctggccctggcttctgggcccgagctggggcggctgacgtttctcggtcttgtgggcatcattgaccccccgagagttggcgtgaaggaagcagtccaggttctctccgagtctggtgtgtctgtgaagatgataacgggggatgccctggagacggccttggccataggaagaaacatcggcctgtgcaacgggaagctgcaagccatgtccggggaggaggtggacagcgtggagaagggcgagctggccgaccgcgtggggaaggtgtccgtgttcttcaggaccagcccaaagcacaagctcaaaatcatcaaggctctgcaggagtcaggggcgatcgtggccatgactggggatggggtgaacgacgcagtggccctgaagtctgcagacattgggatcgccatggggcagacagggacggacgtcagcaaagaggccgccaacatgatcctggtggatgatgacttctcagccatcatgaatgcagtggaggaaggcaagggtattttttacaacatcaaaaactttgtccgattccagctgagcacgagcatctccgccctgagtctcatcactctgtccaccgtgttcaacctgcccagccccctcaacgccatgcagatcctatggatcaacatcatcatggatgggccaccggcgcagagcttgggggtagagcccgttgacaaagacgccttcaggcagccaccacggagtgtgcgggacaccatcctcagcagagccctcatcctgaagatcctcatgtccgcggccatcatcatcagcgggaccctctttatcttctggaaggagatgcctgaagacagagcaagcactccccgcaccacgacgatgacgttcacttgttttgtgtttttcgatctcttcaacgccttgacctgccgctctcagaccaagctgatatttgagatcggctttctcaggaaccacatgttcctctactccgtcctggggtccatcctggggcagctggcggtcatttacatccccccgctgcagagggtcttccagacggagaacctgggagcgcttgatttgctgtttttaactggattggcctcatccgtcttcattttgtcagagctcctcaaactatgtgaaaaatactgttgcagccccaagagagtccagatgcaccctgaagatgtgtagtggaccgcactccgcggcaccttccctaatcatctcgatctggttgtgactgtggcccctgccgtgtctcctcgtcaggggagacttttaggaggccgcagccttccatcaccggatcagtttttcctcttaggaaagctgcaggaacctcgtgggctccagggacccaggcccacatccatccagcgttcccgctggctgtgggacagacagggaggggcctgtacagaaacaccacactgtttattaaatcacaatgatttttatt

SEQ ID NO: 2765 - DNA, 4799 bp, Homo sapiens
  source 1..4799: mol_type = unassigned DNA
ccgccgccactgccgtcgggtaaggtcccagcacggacatggcctcgcgcggcgcccgcccgggcccgagtcccccgcgccccgctttgtagccccccggcggagaggcggcctcgacggtgcggacggcgcagacggccgggcgggcggcatggaggcggcgcatctgctcccggccgccgacgtgctgcgccacttctcggtgacagccgagggcggcctgagcccggcgcaggtgaccggcgcgcgggagcgctacggccccaacgagctcccgagtgaggaagggaagtccctgtgggagctggtgctggaacagtttgaggacctcctggtgcgcatcctgctgctggctgcccttgtctcctttgtcctggcctggttcgaggagggcgaggagaccacgaccgccttcgtggagcccctggtcatcatgctgatcctcgtggccaacgccattgtgggcgtgtggcaggaacgcaacgccgagagtgccatcgaggccctgaaggagtatgagcctgagatgggcaaggtgatccgctcggaccgcaagggcgtgcagaggatccgtgcccgggacatcgtcccaggggacattgtagaagtggcagtgggggacaaagtgcctgctgacctccgcctcatcgagatcaagtccaccacgctgcgagtggaccagtccatcctgacgggtgaatctgtgtccgtgaccaagcacacagaggccatcccagaccccagagctgtgaaccaggacaagaagaacatgctgttttctggcaccaatatcacatcgggcaaagcggtgggtgtggccgtggccaccggcctgcacacggagctgggcaagatccggagccagatggcggcagtcgagcccgagcggacgccgctgcagcgcaagctggacgagtttggacggcagctgtcccacgccatctctgtgatctgcgtggccgtgtgggtcatcaacatcggccacttcgccgacccggcccacggtggctcctggctgcgtggcgctgtctactacttcaagatcgccgtggccctggcggtggcggccatccccgagggcctcccggctgtcatcactacatgcctggcactgggcacgcggcgcatggcacgcaagaacgccatcgtgcgaagcctgccgtccgtggagaccctgggctgcacctcagtcatctgctccgacaagacgggcacgctcaccaccaatcagatgtctgtctgccggatgttcgtggtagccgaggccgatgcgggctcctgccttttgcacgagttcaccatctcgggtaccacgtatacccccgagggcgaagtgcggcagggggatcagcctgtgcgctgcggccagttcgacgggctggtggagctggcgaccatctgcgccctgtgcaacgactcggctctggactacaacgaggccaagggtgtgtatgagaaggtgggagaggccacggagacagctctgacttgcctggtggagaagatgaacgtgttcgacaccgacctgcaggctctgtcccgggtggagcgagctggcgcctgtaacacggtcatcaagcagctgatgcggaaggagttcaccctggagttctcccgagaccggaaatccatgtccgtgtactgcacgcccacccgccctcaccctactggccagggcagcaagatgtttgtgaagggggctcctgagagtgtgatcgagcgctgtagctcagtccgcgtggggagccgcacagcacccctgacccccacctccagggagcagatcctggcaaagatccgggattggggctcaggctcagacacgctgcgctgcctggcactggccacccgggacgcgcccccaaggaaggaggacatggagctggacgactgcagcaagtttgtgcagtacgagacggacctgaccttcgtgggctgcgtaggcatgctggacccgccgcgacctgaggtggctgcctgcatcacacgctgctaccaggcgggcatccgcgtggtcatgatcacgggggataacaaaggcactgccgtggccatctgccgcaggcttggcatctttggggacacggaagacgtggcgggcaaggcctacacgggccgcgagtttgatgacctcagccccgagcagcagcgccaggcctgccgcaccgcccgctgcttcgcccgcgtggagcccgcacacaagtcccgcatcgtggagaacctgcagtcctttaacgagatcactgctatgactggcgatggagtgaacgacgcaccagccctgaagaaagcagagatcggcatcgccatgggctcaggcacggccgtggccaagtcggcggcagagatggtgctgtcagatgacaactttgcctccatcgtggctgcggtggaggagggccgggccatctacagcaacatgaagcaattcatccgctacctcatctcctccaatgttggcgaggtcgtctgcatcttcctcacggcaattctgggcctgcccgaagccctgatccctgtgcagctgctctgggtgaacctggtgacagacggcctacctgccacggctctgggcttcaacccgccagacctggacatcatggagaagctgccccggagcccccgagaagccctcatcagtggctggctcttcttccgatacctggctatcggagtgtacgtaggcctggccacagtggctgccgccacctggtggtttgtgtatgacgccgagggacctcacatcaacttctaccagctgaggaacttcctgaagtgctccgaagacaacccgctctttgccggcatcgactgtgaggtgttcgagtcacgcttccccaccaccatggccttgtccgtgctcgtgaccattgaaatgtgcaatgccctcaacagcgtctcggagaaccagtcgctgctgcggatgccgccctggatgaacccctggctgctggtggctgtggccatgtccatggccctgcacttcctcatcctgctcgtgccgcccctgcctctcattttccaggtgaccccactgagcgggcgccagtgggtggtggtgctccagatatctctgcctgtcatcctgctggatgaggccctcaagtacctgtcccggaaccacatgcacgcctgtctttatccaggccttctcaggacagtctcgcaggcctggagtaggcagccgctgaccacctcttggaccccagaccacaccgggttggcctctttgaagaaatgagccagaagtgagcgctgggaacagagtggagtctccggtgtgtacctcagactgatggtgcccatgtgttcgcctccgccccccacccttgccaccacactcgcccacttgcccaccgggtcccgccggataaatgacaggcccgaggtcagaatggccatccccgggccccgtcctggggtctctgtccccacttccttctggcctgggaggtctgtaattcctgtctcctggactctcctgggaagttccctgctctgcagctctggcccaggagctgcaggctgggagggggcagccaagaagccggagctggcagcatacccagagatccggggcccccccacccccaaatcacgagtgcagctggagcttgctcccccttgttcggaagctggacgttcacttggtgactggtgcctctgcactgacggaggactctgggggtccttcttaccggctctgacctctctcttcgtgcctggtctgggactgggtcagccctgggggatcagaaggggccatctgggcccagctgtgtacagcgagggtgggcagccccctccactccactctgcttccacaaagtcggctcccgagagctcgaggctgcttctgtttatatgtgcagggcccgggcgggtgaagggtcagagagacggacacaaggagccggcaggagggcggagcgaggatgtcctttcccgggagacaagtcgggaaagcctggctggactgcctcagccccgcgcgcctcctggactcagggttccccgtcctgagctcgggagatgttcagagtcacactgccgcccggtctgccacgcagaggtccaacttgccacccgcgtccctggtacctgagaccaccgacatcctcaggttcctgaccgtggcgcccttctacccagcccagtgtgcggccgccgcgctgtctgcacagctgggggcctctgagcctggtgggcttcctggactcttggcctcactccttgccccctccccacgacacccatgagccgaaaggatgtcactaaggatggctgattccccaagggcacccgctctccctccctccctgctggaggaacacgtcatatcagatgagaggaagatggcctctgatggacagaatttttctcttaactcagcttttgctactttggcaaaaactagcgaggggtagcagaaacctgcaccaaggattgtccctatgtcttggccactcctagagcgtgtgcagactgatgattttatatgtaaatcaagactcacatccctttcctagtcccccacatccaaagcccctcagcctgccttgcagaccaatgggctccatgttctgtagccccctcccctacgcctcacccctcctccctctcacaggttctgggcggccagtgagagaaacgcagtgggggaggcagggagtctggtgcctgcagagattctctgcttctttcctggggggaggtggggaggtcttagcaggagcgggccctgtacccacctgctgacctgctgtttggtagagaaataaaggttgtgtgactggggg

SEQ ID NO: 2766 - DNA, 4786 bp, Homo sapiens
  source 1..4786: mol_type = unassigned DNA
ccgccgccactgccgtcgggtaaggtcccagcacggacatggcctcgcgcggcgcccgcccgggcccgagtcccccgcgccccgctttgtagccccccggcggagaggcggcctcgacggtgcggacggcgcagacggccgggcgggcggcatggaggcggcgcatctgctcccggccgccgacgtgctgcgccacttctcggtgacagccgagggcggcctgagcccggcgcaggtgaccggcgcgcgggagcgctacggccccaacgagctcccgagtgaggaagggaagtccctgtgggagctggtgctggaacagtttgaggacctcctggtgcgcatcctgctgctggctgcccttgtctcctttgtcctggcctggttcgaggagggcgaggagaccacgaccgccttcgtggagcccctggtcatcatgctgatcctcgtggccaacgccattgtgggcgtgtggcaggaacgcaacgccgagagtgccatcgaggccctgaaggagtatgagcctgagatgggcaaggtgatccgctcggaccgcaagggcgtgcagaggatccgtgcccgggacatcgtcccaggggacattgtagaagtggcagtgggggacaaagtgcctgctgacctccgcctcatcgagatcaagtccaccacgctgcgagtggaccagtccatcctgacgggtgaatctgtgtccgtgaccaagcacacagaggccatcccagaccccagagctgtgaaccaggacaagaagaacatgctgttttctggcaccaatatcacatcgggcaaagcggtgggtgtggccgtggccaccggcctgcacacggagctgggcaagatccggagccagatggcggcagtcgagcccgagcggacgccgctgcagcgcaagctggacgagtttggacggcagctgtcccacgccatctctgtgatctgcgtggccgtgtgggtcatcaacatcggccacttcgccgacccggcccacggtggctcctggctgcgtggcgctgtctactacttcaagatcgccgtggccctggcggtggcggccatccccgagggcctcccggctgtcatcactacatgcctggcactgggcacgcggcgcatggcacgcaagaacgccatcgtgcgaagcctgccgtccgtggagaccctgggctgcacctcagtcatctgctccgacaagacgggcacgctcaccaccaatcagatgtctgtctgccggatgttcgtggtagccgaggccgatgcgggctcctgccttttgcacgagttcaccatctcgggtaccacgtatacccccgagggcgaagtgcggcagggggatcagcctgtgcgctgcggccagttcgacgggctggtggagctggcgaccatctgcgccctgtgcaacgactcggctctggactacaacgaggccaagggtgtgtatgagaaggtgggagaggccacggagacagctctgacttgcctggtggagaagatgaacgtgttcgacaccgacctgcaggctctgtcccgggtggagcgagctggcgcctgtaacacggtcatcaagcagctgatgcggaaggagttcaccctggagttctcccgagaccggaaatccatgtccgtgtactgcacgcccacccgccctcaccctactggccagggcagcaagatgtttgtgaagggggctcctgagagtgtgatcgagcgctgtagctcagtccgcgtggggagccgcacagcacccctgacccccacctccagggagcagatcctggcaaagatccgggattggggctcaggctcagacacgctgcgctgcctggcactggccacccgggacgcgcccccaaggaaggaggacatggagctggacgactgcagcaagtttgtgcagtacgagacggacctgaccttcgtgggctgcgtaggcatgctggacccgccgcgacctgaggtggctgcctgcatcacacgctgctaccaggcgggcatccgcgtggtcatgatcacgggggataacaaaggcactgccgtggccatctgccgcaggcttggcatctttggggacacggaagacgtggcgggcaaggcctacacgggccgcgagtttgatgacctcagccccgagcagcagcgccaggcctgccgcaccgcccgctgcttcgcccgcgtggagcccgcacacaagtcccgcatcgtggagaacctgcagtcctttaacgagatcactgctatgactggcgatggagtgaacgacgcaccagccctgaagaaagcagagatcggcatcgccatgggctcaggcacggccgtggccaagtcggcggcagagatggtgctgtcagatgacaactttgcctccatcgtggctgcggtggaggagggccgggccatctacagcaacatgaagcaattcatccgctacctcatctcctccaatgttggcgaggtcgtctgcatcttcctcacggcaattctgggcctgcccgaagccctgatccctgtgcagctgctctgggtgaacctggtgacagacggcctacctgccacggctctgggcttcaacccgccagacctggacatcatggagaagctgccccggagcccccgagaagccctcatcagtggctggctcttcttccgatacctggctatcggagtgtacgtaggcctggccacagtggctgccgccacctggtggtttgtgtatgacgccgagggacctcacatcaacttctaccagctgaggaacttcctgaagtgctccgaagacaacccgctctttgccggcatcgactgtgaggtgttcgagtcacgcttccccaccaccatggccttgtccgtgctcgtgaccattgaaatgtgcaatgccctcaacagcgtctcggagaaccagtcgctgctgcggatgccgccctggatgaacccctggctgctggtggctgtggccatgtccatggccctgcacttcctcatcctgctcgtgccgcccctgcctctcattttccaggtgaccccactgagcgggcgccagtgggtggtggtgctccagatatctctgcctgtcatcctgctggatgaggccctcaagtacctgtcccggaaccacatgcacgcctgtctttatccaggccttctcaggacagtctcgcaggcctggagtaggcagccgctgaccacctcttggaccccagaccacaccggaagaaatgagccagaagtgagcgctgggaacagagtggagtctccggtgtgtacctcagactgatggtgcccatgtgttcgcctccgccccccacccttgccaccacactcgcccacttgcccaccgggtcccgccggataaatgacaggcccgaggtcagaatggccatccccgggccccgtcctggggtctctgtccccacttccttctggcctgggaggtctgtaattcctgtctcctggactctcctgggaagttccctgctctgcagctctggcccaggagctgcaggctgggagggggcagccaagaagccggagctggcagcatacccagagatccggggcccccccacccccaaatcacgagtgcagctggagcttgctcccccttgttcggaagctggacgttcacttggtgactggtgcctctgcactgacggaggactctgggggtccttcttaccggctctgacctctctcttcgtgcctggtctgggactgggtcagccctgggggatcagaaggggccatctgggcccagctgtgtacagcgagggtgggcagccccctccactccactctgcttccacaaagtcggctcccgagagctcgaggctgcttctgtttatatgtgcagggcccgggcgggtgaagggtcagagagacggacacaaggagccggcaggagggcggagcgaggatgtcctttcccgggagacaagtcgggaaagcctggctggactgcctcagccccgcgcgcctcctggactcagggttccccgtcctgagctcgggagatgttcagagtcacactgccgcccggtctgccacgcagaggtccaacttgccacccgcgtccctggtacctgagaccaccgacatcctcaggttcctgaccgtggcgcccttctacccagcccagtgtgcggccgccgcgctgtctgcacagctgggggcctctgagcctggtgggcttcctggactcttggcctcactccttgccccctccccacgacacccatgagccgaaaggatgtcactaaggatggctgattccccaagggcacccgctctccctccctccctgctggaggaacacgtcatatcagatgagaggaagatggcctctgatggacagaatttttctcttaactcagcttttgctactttggcaaaaactagcgaggggtagcagaaacctgcaccaaggattgtccctatgtcttggccactcctagagcgtgtgcagactgatgattttatatgtaaatcaagactcacatccctttcctagtcccccacatccaaagcccctcagcctgccttgcagaccaatgggctccatgttctgtagccccctcccctacgcctcacccctcctccctctcacaggttctgggcggccagtgagagaaacgcagtgggggaggcagggagtctggtgcctgcagagattctctgcttctttcctggggggaggtggggaggtcttagcaggagcgggccctgtacccacctgctgacctgctgtttggtagagaaataaaggttgtgtgactggggg

SEQ ID NO: 2767 - DNA, 4857 bp, Homo sapiens
  source 1..4857: mol_type = unassigned DNA
ccgccgccactgccgtcgggtaaggtcccagcacggacatggcctcgcgcggcgcccgcccgggcccgagtcccccgcgccccgctttgtagccccccggcggagaggcggcctcgacggtgcggacggcgcagacggccgggcgggcggcatggaggcggcgcatctgctcccggccgccgacgtgctgcgccacttctcggtgacagccgagggcggcctgagcccggcgcaggtgaccggcgcgcgggagcgctacggccccaacgagctcccgagtgaggaagggaagtccctgtgggagctggtgctggaacagtttgaggacctcctggtgcgcatcctgctgctggctgcccttgtctcctttgtcctggcctggttcgaggagggcgaggagaccacgaccgccttcgtggagcccctggtcatcatgctgatcctcgtggccaacgccattgtgggcgtgtggcaggaacgcaacgccgagagtgccatcgaggccctgaaggagtatgagcctgagatgggcaaggtgatccgctcggaccgcaagggcgtgcagaggatccgtgcccgggacatcgtcccaggggacattgtagaagtggcagtgggggacaaagtgcctgctgacctccgcctcatcgagatcaagtccaccacgctgcgagtggaccagtccatcctgacgggtgaatctgtgtccgtgaccaagcacacagaggccatcccagaccccagagctgtgaaccaggacaagaagaacatgctgttttctggcaccaatatcacatcgggcaaagcggtgggtgtggccgtggccaccggcctgcacacggagctgggcaagatccggagccagatggcggcagtcgagcccgagcggacgccgctgcagcgcaagctggacgagtttggacggcagctgtcccacgccatctctgtgatctgcgtggccgtgtgggtcatcaacatcggccacttcgccgacccggcccacggtggctcctggctgcgtggcgctgtctactacttcaagatcgccgtggccctggcggtggcggccatccccgagggcctcccggctgtcatcactacatgcctggcactgggcacgcggcgcatggcacgcaagaacgccatcgtgcgaagcctgccgtccgtggagaccctgggctgcacctcagtcatctgctccgacaagacgggcacgctcaccaccaatcagatgtctgtctgccggatgttcgtggtagccgaggccgatgcgggctcctgccttttgcacgagttcaccatctcgggtaccacgtatacccccgagggcgaagtgcggcagggggatcagcctgtgcgctgcggccagttcgacgggctggtggagctggcgaccatctgcgccctgtgcaacgactcggctctggactacaacgaggccaagggtgtgtatgagaaggtgggagaggccacggagacagctctgacttgcctggtggagaagatgaacgtgttcgacaccgacctgcaggctctgtcccgggtggagcgagctggcgcctgtaacacggtcatcaagcagctgatgcggaaggagttcaccctggagttctcccgagaccggaaatccatgtccgtgtactgcacgcccacccgccctcaccctactggccagggcagcaagatgtttgtgaagggggctcctgagagtgtgatcgagcgctgtagctcagtccgcgtggggagccgcacagcacccctgacccccacctccagggagcagatcctggcaaagatccgggattggggctcaggctcagacacgctgcgctgcctggcactggccacccgggacgcgcccccaaggaaggaggacatggagctggacgactgcagcaagtttgtgcagtacgagacggacctgaccttcgtgggctgcgtaggcatgctggacccgccgcgacctgaggtggctgcctgcatcacacgctgctaccaggcgggcatccgcgtggtcatgatcacgggggataacaaaggcactgccgtggccatctgccgcaggcttggcatctttggggacacggaagacgtggcgggcaaggcctacacgggccgcgagtttgatgacctcagccccgagcagcagcgccaggcctgccgcaccgcccgctgcttcgcccgcgtggagcccgcacacaagtcccgcatcgtggagaacctgcagtcctttaacgagatcactgctatgactggcgatggagtgaacgacgcaccagccctgaagaaagcagagatcggcatcgccatgggctcaggcacggccgtggccaagtcggcggcagagatggtgctgtcagatgacaactttgcctccatcgtggctgcggtggaggagggccgggccatctacagcaacatgaagcaattcatccgctacctcatctcctccaatgttggcgaggtcgtctgcatcttcctcacggcaattctgggcctgcccgaagccctgatccctgtgcagctgctctgggtgaacctggtgacagacggcctacctgccacggctctgggcttcaacccgccagacctggacatcatggagaagctgccccggagcccccgagaagccctcatcagtggctggctcttcttccgatacctggctatcggagtgtacgtaggcctggccacagtggctgccgccacctggtggtttgtgtatgacgccgagggacctcacatcaacttctaccagctgaggaacttcctgaagtgctccgaagacaacccgctctttgccggcatcgactgtgaggtgttcgagtcacgcttccccaccaccatggccttgtccgtgctcgtgaccattgaaatgtgcaatgccctcaacagcgtctcggagaaccagtcgctgctgcggatgccgccctggatgaacccctggctgctggtggctgtggccatgtccatggccctgcacttcctcatcctgctcgtgccgcccctgcctctcattttccaggtgaccccactgagcgggcgccagtgggtggtggtgctccagatatctctgcctgtcatcctgctggatgaggccctcaagtacctgtcccggaaccacatgcacgcctgtctttatccaggccttctcaggacagtctcgcaggcctggagtaggcagccgctgaccacctcttggaccccagaccacaccgggttggcctctttgggccagggacacagcatcgtctcgctgtcagagctgctcagagagggaggaagcagggaagaaatgagccagaagtgagcgctgggaacagagtggagtctccggtgtgtacctcagactgatggtgcccatgtgttcgcctccgccccccacccttgccaccacactcgcccacttgcccaccgggtcccgccggataaatgacaggcccgaggtcagaatggccatccccgggccccgtcctggggtctctgtccccacttccttctggcctgggaggtctgtaattcctgtctcctggactctcctgggaagttccctgctctgcagctctggcccaggagctgcaggctgggagggggcagccaagaagccggagctggcagcatacccagagatccggggcccccccacccccaaatcacgagtgcagctggagcttgctcccccttgttcggaagctggacgttcacttggtgactggtgcctctgcactgacggaggactctgggggtccttcttaccggctctgacctctctcttcgtgcctggtctgggactgggtcagccctgggggatcagaaggggccatctgggcccagctgtgtacagcgagggtgggcagccccctccactccactctgcttccacaaagtcggctcccgagagctcgaggctgcttctgtttatatgtgcagggcccgggcgggtgaagggtcagagagacggacacaaggagccggcaggagggcggagcgaggatgtcctttcccgggagacaagtcgggaaagcctggctggactgcctcagccccgcgcgcctcctggactcagggttccccgtcctgagctcgggagatgttcagagtcacactgccgcccggtctgccacgcagaggtccaacttgccacccgcgtccctggtacctgagaccaccgacatcctcaggttcctgaccgtggcgcccttctacccagcccagtgtgcggccgccgcgctgtctgcacagctgggggcctctgagcctggtgggcttcctggactcttggcctcactccttgccccctccccacgacacccatgagccgaaaggatgtcactaaggatggctgattccccaagggcacccgctctccctccctccctgctggaggaacacgtcatatcagatgagaggaagatggcctctgatggacagaatttttctcttaactcagcttttgctactttggcaaaaactagcgaggggtagcagaaacctgcaccaaggattgtccctatgtcttggccactcctagagcgtgtgcagactgatgattttatatgtaaatcaagactcacatccctttcctagtcccccacatccaaagcccctcagcctgccttgcagaccaatgggctccatgttctgtagccccctcccctacgcctcacccctcctccctctcacaggttctgggcggccagtgagagaaacgcagtgggggaggcagggagtctggtgcctgcagagattctctgcttctttcctggggggaggtggggaggtcttagcaggagcgggccctgtacccacctgctgacctgctgtttggtagagaaataaaggttgtgtgactggggg

SEQ ID NO: 2768 - DNA, 4205 bp, Homo sapiens
  source 1..4205: mol_type = unassigned DNA
ccgccgccactgccgtcgggtaaggtcccagcacggacatggcctcgcgcggcgcccgcccgggcccgagtcccccgcgccccgctttgtagccccccggcggagaggcggcctcgacggtgcggacggcgcagacggccgggcgggcggcatggaggcggcgcatctgctcccggccgccgacgtgctgcgccacttctcggtgacagccgagggcggcctgagcccggcgcaggtgaccggcgcgcgggagcgctacggccccaacgagctcccgagtgaggaagggaagtccctgtgggagctggtgctggaacagtttgaggacctcctggtgcgcatcctgctgctggctgcccttgtctcctttgtcctggcctggttcgaggagggcgaggagaccacgaccgccttcgtggagcccctggtcatcatgctgatcctcgtggccaacgccattgtgggcgtgtggcaggaacgcaacgccgagagtgccatcgaggccctgaaggagtatgagcctgagatgggcaaggtgatccgctcggaccgcaagggcgtgcagaggatccgtgcccgggacatcgtcccaggggacattgtagaagtggcagtgggggacaaagtgcctgctgacctccgcctcatcgagatcaagtccaccacgctgcgagtggaccagtccatcctgacgggtgaatctgtgtccgtgaccaagcacacagaggccatcccagaccccagagctgtgaaccaggacaagaagaacatgctgttttctggcaccaatatcacatcgggcaaagcggtgggtgtggccgtggccaccggcctgcacacggagctgggcaagatccggagccagatggcggcagtcgagcccgagcggacgccgctgcagcgcaagctggacgagtttggacggcagctgtcccacgccatctctgtgatctgcgtggccgtgtgggtcatcaacatcggccacttcgccgacccggcccacggtggctcctggctgcgtggcgctgtctactacttcaagatcgccgtggccctggcggtggcggccatccccgagggcctcccggctgtcatcactacatgcctggcactgggcacgcggcgcatggcacgcaagaacgccatcgtgcgaagcctgccgtccgtggagaccctgggctgcacctcagtcatctgctccgacaagacgggcacgctcaccaccaatcagatgtctgtctgccggatgttcgtggtagccgaggccgatgcgggctcctgccttttgcacgagttcaccatctcgggtaccacgtatacccccgagggcgaagtgcggcagggggatcagcctgtgcgctgcggccagttcgacgggctggtggagctggcgaccatctgcgccctgtgcaacgactcggctctggactacaacgaggccaagggtgtgtatgagaaggtgggagaggccacggagacagctctgacttgcctggtggagaagatgaacgtgttcgacaccgacctgcaggctctgtcccgggtggagcgagctggcgcctgtaacacggtcatcaagcagctgatgcggaaggagttcaccctggagttctcccgagaccggaaatccatgtccgtgtactgcacgcccacccgccctcaccctactggccagggcagcaagatgtttgtgaagggggctcctgagagtgtgatcgagcgctgtagctcagtccgcgtggggagccgcacagcacccctgacccccacctccagggagcagatcctggcaaagatccgggattggggctcaggctcagacacgctgcgctgcctggcactggccacccgggacgcgcccccaaggaaggaggacatggagctggacgactgcagcaagtttgtgcagtacgagacggacctgaccttcgtgggctgcgtaggcatgctggacccgccgcgacctgaggtggctgcctgcatcacacgctgctaccaggcgggcatccgcgtggtcatgatcacgggggataacaaaggcactgccgtggccatctgccgcaggcttggcatctttggggacacggaagacgtggcgggcaaggcctacacgggccgcgagtttgatgacctcagccccgagcagcagcgccaggcctgccgcaccgcccgctgcttcgcccgcgtggagcccgcacacaagtcccgcatcgtggagaacctgcagtcctttaacgagatcactgctatgactggcgatggagtgaacgacgcaccagccctgaagaaagcagagatcggcatcgccatgggctcaggcacggccgtggccaagtcggcggcagagatggtgctgtcagatgacaactttgcctccatcgtggctgcggtggaggagggccgggccatctacagcaacatgaagcaattcatccgctacctcatctcctccaatgttggcgaggtcgtctgcatcttcctcacggcaattctgggcctgcccgaagccctgatccctgtgcagctgctctgggtgaacctggtgacagacggcctacctgccacggctctgggcttcaacccgccagacctggacatcatggagaagctgccccggagcccccgagaagccctcatcagtggctggctcttcttccgatacctggctatcggagtgtacgtaggcctggccacagtggctgccgccacctggtggtttgtgtatgacgccgagggacctcacatcaacttctaccagctgaggaacttcctgaagtgctccgaagacaacccgctctttgccggcatcgactgtgaggtgttcgagtcacgcttccccaccaccatggccttgtccgtgctcgtgaccattgaaatgtgcaatgccctcaacagcgtctcggagaaccagtcgctgctgcggatgccgccctggatgaacccctggctgctggtggctgtggccatgtccatggccctgcacttcctcatcctgctcgtgccgcccctgcctctcattttccaggtgaccccactgagcgggcgccagtgggtggtggtgctccagatatctctgcctgtcatcctgctggatgaggccctcaagtacctgtcccggaaccacatgcacgcctgtctttatccaggccttctcaggacagtctcgcaggcctggagtaggcagccgctgaccacctcttggaccccagaccacaccgggttggcctctttgaagaaatgagccagaagtgagcgctgggaacagagtggagtctccgggcccgggcgggtgaagggtcagagagacggacacaaggagccggcaggagggcggagcgaggatgtcctttcccgggagacaagtcgggaaagcctggctggactgcctcagccccgcgcgcctcctggactcagggttccccgtcctgagctcgggagatgttcagagtcacactgccgcccggtctgccacgcagaggtccaacttgccacccgcgtccctggtacctgagaccaccgacatcctcaggttcctgaccgtggcgcccttctacccagcccagtgtgcggccgccgcgctgtctgcacagctgggggcctctgagcctggtgggcttcctggactcttggcctcactccttgccccctccccacgacacccatgagccgaaaggatgtcactaaggatggctgattccccaagggcacccgctctccctccctccctgctggaggaacacgtcatatcagatgagaggaagatggcctctgatggacagaatttttctcttaactcagcttttgctactttggcaaaaactagcgaggggtagcagaaacctgcaccaaggattgtccctatgtcttggccactcctagagcgtgtgcagactgatgattttatatgtaaatcaagactcacatccctttcctagtcccccacatccaaagcccctcagcctgccttgcagaccaatgggctccatgttctgtagccccctcccctacgcctcacccctcctccctctcacaggttctgggcggccagtgagagaaacgcagtgggggaggcagggagtctggtgcctgcagagattctctgcttctttcctggggggaggtggggaggtcttagcaggagcgggccctgtacccacctgctgacctgctgtttggtagagaaataaaggttgtgtgactggggg

SEQ ID NO: 2769 - DNA, 4162 bp, Homo sapiens
  source 1..4162: mol_type = unassigned DNA
ccgccgccactgccgtcgggtaaggtcccagcacggacatggcctcgcgcggcgcccgcccgggcccgagtcccccgcgccccgctttgtagccccccggcggagaggcggcctcgacggtgcggacggcgcagacggccgggcgggcggcatggaggcggcgcatctgctcccggccgccgacgtgctgcgccacttctcggtgacagccgagggcggcctgagcccggcgcaggtgaccggcgcgcgggagcgctacggccccaacgagctcccgagtgaggaagggaagtccctgtgggagctggtgctggaacagtttgaggacctcctggtgcgcatcctgctgctggctgcccttgtctcctttgtcctggcctggttcgaggagggcgaggagaccacgaccgccttcgtggagcccctggtcatcatgctgatcctcgtggccaacgccattgtgggcgtgtggcaggaacgcaacgccgagagtgccatcgaggccctgaaggagtatgagcctgagatgggcaaggtgatccgctcggaccgcaagggcgtgcagaggatccgtgcccgggacatcgtcccaggggacattgtagaagtggcagtgggggacaaagtgcctgctgacctccgcctcatcgagatcaagtccaccacgctgcgagtggaccagtccatcctgacgggtgaatctgtgtccgtgaccaagcacacagaggccatcccagaccccagagctgtgaaccaggacaagaagaacatgctgttttctggcaccaatatcacatcgggcaaagcggtgggtgtggccgtggccaccggcctgcacacggagctgggcaagatccggagccagatggcggcagtcgagcccgagcggacgccgctgcagcgcaagctggacgagtttggacggcagctgtcccacgccatctctgtgatctgcgtggccgtgtgggtcatcaacatcggccacttcgccgacccggcccacggtggctcctggctgcgtggcgctgtctactacttcaagatcgccgtggccctggcggtggcggccatccccgagggcctcccggctgtcatcactacatgcctggcactgggcacgcggcgcatggcacgcaagaacgccatcgtgcgaagcctgccgtccgtggagaccctgggctgcacctcagtcatctgctccgacaagacgggcacgctcaccaccaatcagatgtctgtctgccggatgttcgtggtagccgaggccgatgcgggctcctgccttttgcacgagttcaccatctcgggtaccacgtatacccccgagggcgaagtgcggcagggggatcagcctgtgcgctgcggccagttcgacgggctggtggagctggcgaccatctgcgccctgtgcaacgactcggctctggactacaacgaggccaagggtgtgtatgagaaggtgggagaggccacggagacagctctgacttgcctggtggagaagatgaacgtgttcgacaccgacctgcaggctctgtcccgggtggagcgagctggcgcctgtaacacggtcatcaagcagctgatgcggaaggagttcaccctggagttctcccgagaccggaaatccatgtccgtgtactgcacgcccacccgccctcaccctactggccagggcagcaagatgtttgtgaagggggctcctgagagtgtgatcgagcgctgtagctcagtccgcgtggggagccgcacagcacccctgacccccacctccagggagcagatcctggcaaagatccgggattggggctcaggctcagacacgctgcgctgcctggcactggccacccgggacgcgcccccaaggaaggaggacatggagctggacgactgcagcaagtttgtgcagtacgagacggacctgaccttcgtgggctgcgtaggcatgctggacccgccgcgacctgaggtggctgcctgcatcacacgctgctaccaggcgggcatccgcgtggtcatgatcacgggggataacaaaggcactgccgtggccatctgccgcaggcttggcatctttggggacacggaagacgtggcgggcaaggcctacacgggccgcgagtttgatgacctcagccccgagcagcagcgccaggcctgccgcaccgcccgctgcttcgcccgcgtggagcccgcacacaagtcccgcatcgtggagaacctgcagtcctttaacgagatcactgctatgactggcgatggagtgaacgacgcaccagccctgaagaaagcagagatcggcatcgccatgggctcaggcacggccgtggccaagtcggcggcagagatggtgctgtcagatgacaactttgcctccatcgtggctgcggtggaggagggccgggccatctacagcaacatgaagcaattcatccgctacctcatctcctccaatgttggcgaggtcgtctgcatcttcctcacggcaattctgggcctgcccgaagccctgatccctgtgcagctgctctgggtgaacctggtgacagacggcctacctgccacggctctgggcttcaacccgccagacctggacatcatggagaagctgccccggagcccccgagaagccctcatcagtggctggctcttcttccgatacctggctatcggagtgtacgtaggcctggccacagtggctgccgccacctggtggtttgtgtatgacgccgagggacctcacatcaacttctaccagctgaggaacttcctgaagtgctccgaagacaacccgctctttgccggcatcgactgtgaggtgttcgagtcacgcttccccaccaccatggccttgtccgtgctcgtgaccattgaaatgtgcaatgccctcaacagcgtctcggagaaccagtcgctgctgcggatgccgccctggatgaacccctggctgctggtggctgtggccatgtccatggccctgcacttcctcatcctgctcgtgccgcccctgcctctcattttccaggtgaccccactgagcgggcgccagtgggtggtggtgctccagatatctctgcctgtcatcctgctggatgaggccctcaagtacctgtcccggaaccacatgcacgggccagggacacagcatcgtctcgctgtcagagctgctcagagagggaggaagcagggaagaaatgagccagaagtgagcgctgggaacagagtggagtctccgggcccgggcgggtgaagggtcagagagacggacacaaggagccggcaggagggcggagcgaggatgtcctttcccgggagacaagtcgggaaagcctggctggactgcctcagccccgcgcgcctcctggactcagggttccccgtcctgagctcgggagatgttcagagtcacactgccgcccggtctgccacgcagaggtccaacttgccacccgcgtccctggtacctgagaccaccgacatcctcaggttcctgaccgtggcgcccttctacccagcccagtgtgcggccgccgcgctgtctgcacagctgggggcctctgagcctggtgggcttcctggactcttggcctcactccttgccccctccccacgacacccatgagccgaaaggatgtcactaaggatggctgattccccaagggcacccgctctccctccctccctgctggaggaacacgtcatatcagatgagaggaagatggcctctgatggacagaatttttctcttaactcagcttttgctactttggcaaaaactagcgaggggtagcagaaacctgcaccaaggattgtccctatgtcttggccactcctagagcgtgtgcagactgatgattttatatgtaaatcaagactcacatccctttcctagtcccccacatccaaagcccctcagcctgccttgcagaccaatgggctccatgttctgtagccccctcccctacgcctcacccctcctccctctcacaggttctgggcggccagtgagagaaacgcagtgggggaggcagggagtctggtgcctgcagagattctctgcttctttcctggggggaggtggggaggtcttagcaggagcgggccctgtacccacctgctgacctgctgtttggtagagaaataaaggttgtgtgactggggg

SEQ ID NO: 2770 - DNA, 4698 bp, Homo sapiens
  source 1..4698: mol_type = unassigned DNA
ccgccgccactgccgtcgggtaaggtcccagcacggacatggcctcgcgcggcgcccgcccgggcccgagtcccccgcgccccgctttgtagccccccggcggagaggcggcctcgacggtgcggacggcgcagacggccgggcgggcggcatggaggcggcgcatctgctcccggccgccgacgtgctgcgccacttctcggtgacagccgagggcggcctgagcccggcgcaggtgaccggcgcgcgggagcgctacggccccaacgagctcccgagtgaggaagggaagtccctgtgggagctggtgctggaacagtttgaggacctcctggtgcgcatcctgctgctggctgcccttgtctcctttgtcctggcctggttcgaggagggcgaggagaccacgaccgccttcgtggagcccctggtcatcatgctgatcctcgtggccaacgccattgtgggcgtgtggcaggaacgcaacgccgagagtgccatcgaggccctgaaggagtatgagcctgagatgggcaaggtgatccgctcggaccgcaagggcgtgcagaggatccgtgcccgggacatcgtcccaggggacattgtagaagtggcagtgggggacaaagtgcctgctgacctccgcctcatcgagatcaagtccaccacgctgcgagtggaccagtccatcctgacgggtgaatctgtgtccgtgaccaagcacacagaggccatcccagaccccagagctgtgaaccaggacaagaagaacatgctgttttctggcaccaatatcacatcgggcaaagcggtgggtgtggccgtggccaccggcctgcacacggagctgggcaagatccggagccagatggcggcagtcgagcccgagcggacgccgctgcagcgcaagctggacgagtttggacggcagctgtcccacgccatctctgtgatctgcgtggccgtgtgggtcatcaacatcggccacttcgccgacccggcccacggtggctcctggctgcgtggcgctgtctactacttcaagatcgccgtggccctggcggtggcggccatccccgagggcctcccggctgtcatcactacatgcctggcactgggcacgcggcgcatggcacgcaagaacgccatcgtgcgaagcctgccgtccgtggagaccctgggctgcacctcagtcatctgctccgacaagacgggcacgctcaccaccaatcagatgtctgtctgccggatgttcgtggtagccgaggccgatgcgggctcctgccttttgcacgagttcaccatctcgggtaccacgtatacccccgagggcgaagtgcggcagggggatcagcctgtgcgctgcggccagttcgacgggctggtggagctggcgaccatctgcgccctgtgcaacgactcggctctggactacaacgaggccaagggtgtgtatgagaaggtgggagaggccacggagacagctctgacttgcctggtggagaagatgaacgtgttcgacaccgacctgcaggctctgtcccgggtggagcgagctggcgcctgtaacacggtcatcaagcagctgatgcggaaggagttcaccctggagttctcccgagaccggaaatccatgtccgtgtactgcacgcccacccgccctcaccctactggccagggcagcaagatgtttgtgaagggggctcctgagagtgtgatcgagcgctgtagctcagtccgcgtggggagccgcacagcacccctgacccccacctccagggagcagatcctggcaaagatccgggattggggctcaggctcagacacgctgcgctgcctggcactggccacccgggacgcgcccccaaggaaggaggacatggagctggacgactgcagcaagtttgtgcagtacgagacggacctgaccttcgtgggctgcgtaggcatgctggacccgccgcgacctgaggtggctgcctgcatcacacgctgctaccaggcgggcatccgcgtggtcatgatcacgggggataacaaaggcactgccgtggccatctgccgcaggcttggcatctttggggacacggaagacgtggcgggcaaggcctacacgggccgcgagtttgatgacctcagccccgagcagcagcgccaggcctgccgcaccgcccgctgcttcgcccgcgtggagcccgcacacaagtcccgcatcgtggagaacctgcagtcctttaacgagatcactgctatgactggcgatggagtgaacgacgcaccagccctgaagaaagcagagatcggcatcgccatgggctcaggcacggccgtggccaagtcggcggcagagatggtgctgtcagatgacaactttgcctccatcgtggctgcggtggaggagggccgggccatctacagcaacatgaagcaattcatccgctacctcatctcctccaatgttggcgaggtcgtctgcatcttcctcacggcaattctgggcctgcccgaagccctgatccctgtgcagctgctctgggtgaacctggtgacagacggcctacctgccacggctctgggcttcaacccgccagacctggacatcatggagaagctgccccggagcccccgagaagccctcatcagtggctggctcttcttccgatacctggctatcggagtgtacgtaggcctggccacagtggctgccgccacctggtggtttgtgtatgacgccgagggacctcacatcaacttctaccagctgaggaacttcctgaagtgctccgaagacaacccgctctttgccggcatcgactgtgaggtgttcgagtcacgcttccccaccaccatggccttgtccgtgctcgtgaccattgaaatgtgcaatgccctcaacagcgtctcggagaaccagtcgctgctgcggatgccgccctggatgaacccctggctgctggtggctgtggccatgtccatggccctgcacttcctcatcctgctcgtgccgcccctgcctctcattttccaggtgaccccactgagcgggcgccagtgggtggtggtgctccagatatctctgcctgtcatcctgctggatgaggccctcaagtacctgtcccggaaccacatgcacgaagaaatgagccagaagtgagcgctgggaacagagtggagtctccggtgtgtacctcagactgatggtgcccatgtgttcgcctccgccccccacccttgccaccacactcgcccacttgcccaccgggtcccgccggataaatgacaggcccgaggtcagaatggccatccccgggccccgtcctggggtctctgtccccacttccttctggcctgggaggtctgtaattcctgtctcctggactctcctgggaagttccctgctctgcagctctggcccaggagctgcaggctgggagggggcagccaagaagccggagctggcagcatacccagagatccggggcccccccacccccaaatcacgagtgcagctggagcttgctcccccttgttcggaagctggacgttcacttggtgactggtgcctctgcactgacggaggactctgggggtccttcttaccggctctgacctctctcttcgtgcctggtctgggactgggtcagccctgggggatcagaaggggccatctgggcccagctgtgtacagcgagggtgggcagccccctccactccactctgcttccacaaagtcggctcccgagagctcgaggctgcttctgtttatatgtgcagggcccgggcgggtgaagggtcagagagacggacacaaggagccggcaggagggcggagcgaggatgtcctttcccgggagacaagtcgggaaagcctggctggactgcctcagccccgcgcgcctcctggactcagggttccccgtcctgagctcgggagatgttcagagtcacactgccgcccggtctgccacgcagaggtccaacttgccacccgcgtccctggtacctgagaccaccgacatcctcaggttcctgaccgtggcgcccttctacccagcccagtgtgcggccgccgcgctgtctgcacagctgggggcctctgagcctggtgggcttcctggactcttggcctcactccttgccccctccccacgacacccatgagccgaaaggatgtcactaaggatggctgattccccaagggcacccgctctccctccctccctgctggaggaacacgtcatatcagatgagaggaagatggcctctgatggacagaatttttctcttaactcagcttttgctactttggcaaaaactagcgaggggtagcagaaacctgcaccaaggattgtccctatgtcttggccactcctagagcgtgtgcagactgatgattttatatgtaaatcaagactcacatccctttcctagtcccccacatccaaagcccctcagcctgccttgcagaccaatgggctccatgttctgtagccccctcccctacgcctcacccctcctccctctcacaggttctgggcggccagtgagagaaacgcagtgggggaggcagggagtctggtgcctgcagagattctctgcttctttcctggggggaggtggggaggtcttagcaggagcgggccctgtacccacctgctgacctgctgtttggtagagaaataaaggttgtgtgactggggg

SEQ ID NO: 2771 - DNA, 3145 bp, Homo sapiens
  source 1..3145: mol_type = unassigned DNA
ccgccgccactgccgtcgggtaaggtcccagcacggacatggcctcgcgcggcgcccgcccgggcccgagtcccccgcgccccgctttgtagccccccggcggagaggcggcctcgacggtgcggacggcgcagacggccgggcgggcggcatggaggcggcgcatctgctcccggccgccgacgtgctgcgccacttctcggtgacagccgagggcggcctgagcccggcgcaggtgaccggcgcgcgggagcgctacggccccaacgagctcccgagtgaggaagggaagtccctgtgggagctggtgctggaacagtttgaggacctcctggtgcgcatcctgctgctggctgcccttgtctcctttgtcctggcctggttcgaggagggcgaggagaccacgaccgccttcgtggagcccctggtcatcatgctgatcctcgtggccaacgccattgtgggcgtgtggcaggaacgcaacgccgagagtgccatcgaggccctgaaggagtatgagcctgagatgggcaaggtgatccgctcggaccgcaagggcgtgcagaggatccgtgcccgggacatcgtcccaggggacattgtagaagtggcagtgggggacaaagtgcctgctgacctccgcctcatcgagatcaagtccaccacgctgcgagtggaccagtccatcctgacgggtgaatctgtgtccgtgaccaagcacacagaggccatcccagaccccagagctgtgaaccaggacaagaagaacatgctgttttctggcaccaatatcacatcgggcaaagcggtgggtgtggccgtggccaccggcctgcacacggagctgggcaagatccggagccagatggcggcagtcgagcccgagcggacgccgctgcagcgcaagctggacgagtttggacggcagctgtcccacgccatctctgtgatctgcgtggccgtgtgggtcatcaacatcggccacttcgccgacccggcccacggtggctcctggctgcgtggcgctgtctactacttcaagatcgccgtggccctggcggtggcggccatccccgagggcctcccggctgtcatcactacatgcctggcactgggcacgcggcgcatggcacgcaagaacgccatcgtgcgaagcctgccgtccgtggagaccctgggctgcacctcagtcatctgctccgacaagacgggcacgctcaccaccaatcagatgtctgtctgccggatgttcgtggtagccgaggccgatgcgggctcctgccttttgcacgagttcaccatctcgggtaccacgtatacccccgagggcgaagtgcggcagggggatcagcctgtgcgctgcggccagttcgacgggctggtggagctggcgaccatctgcgccctgtgcaacgactcggctctggactacaacgaggccaagggtgtgtatgagaaggtgggagaggccacggagacagctctgacttgcctggtggagaagatgaacgtgttcgacaccgacctgcaggctctgtcccgggtggagcgagctggcgcctgtaacacggtcatcaagcagctgatgcggaaggagttcaccctggagttctcccgagaccggaaatccatgtccgtgtactgcacgcccacccgccctcaccctactggccagggcagcaagatgtttgtgaagggggctcctgagagtgtgatcgagcgctgtagctcagtccgcgtggggagccgcacagcacccctgacccccacctccagggagcagatcctggcaaagatccgggattggggctcaggctcagacacgctgcgctgcctggcactggccacccgggacgcgcccccaaggaaggaggacatggagctggacgactgcagcaagtttgtgcagtacgagacggacctgaccttcgtgggctgcgtaggcatgctggacccgccgcgacctgaggtggctgcctgcatcacacgctgctaccaggcgggcatccgcgtggtcatgatcacgggggataacaaaggcactgccgtggccatctgccgcaggcttggcatctttggggacacggaagacgtggcgggcaaggcctacacgggccgcgagtttgatgacctcagccccgagcagcagcgccaggcctgccgcaccgcccgctgcttcgcccgcgtggagcccgcacacaagtcccgcatcgtggagaacctgcagtcctttaacgagatcactgctatgactggcgatggagtgaacgacgcaccagccctgaagaaagcagagatcggcatcgccatgggctcaggcacggccgtggccaagtcggcggcagagatggtgctgtcagatgacaactttgcctccatcgtggctgcggtggaggagggccgggccatctacagcaacatgaagcaattcatccgctacctcatctcctccaatgttggcgaggtcgtctgcatcttcctcacggcaattctgggcctgcccgaagccctgatccctgtgcagctgctctgggtgaacctggtgacagacggcctacctgccacggctctgggcttcaacccgccagacctggacatcatggagaagctgccccggagcccccgagaagccctcatcagtggctggctcttcttccgatacctggctatcggagtgtacgtaggcctggccacagtggctgccgccacctggtggtttgtgtatgacgccgagggacctcacatcaacttctaccagctgaggaacttcctgaagtgctccgaagacaacccgctctttgccggcatcgactgtgaggtgttcgagtcacgcttccccaccaccatggccttgtccgtgctcgtgaccattgaaatgtgcaatgccctcaacagcgtctcggagaaccagtcgctgctgcggatgccgccctggatgaacccctggctgctggtggctgtggccatgtccatggccctgcacttcctcatcctgctcgtgccgcccctgcctctcattttccaggtgaccccactgagcgggcgccagtgggtggtggtgctccagatatctctgcctgtcatcctgctggatgaggccctcaagtacctgtcccggaaccacatgcacggtcacacccagagt

SEQ ID NO: 2772 - DNA, 4695 bp, Homo sapiens
  source 1..4695: mol_type = unassigned DNA
ccgccgccactgccgtcgggtaaggtcccagcacggacatggcctcgcgcggcgcccgcccgggcccgagtcccccgcgccccgctttgtagccccccggcggagaggcggcctcgacggtgcggacggcgcagacggccgggcgggcggcatggaggcggcgcatctgctcccggccgccgacgtgctgcgccacttctcggtgacagccgagggcggcctgagcccggcgcaggtgaccggcgcgcgggagcgctacggccccaacgagctcccgagtgaggaagggaagtccctgtgggagctggtgctggaacagtttgaggacctcctggtgcgcatcctgctgctggctgcccttgtctcctttgtcctggcctggttcgaggagggcgaggagaccacgaccgccttcgtggagcccctggtcatcatgctgatcctcgtggccaacgccattgtgggcgtgtggcaggaacgcaacgccgagagtgccatcgaggccctgaaggagtatgagcctgagatgggcaaggtgatccgctcggaccgcaagggcgtgcagaggatccgtgcccgggacatcgtcccaggggacattgtagaagtggcagtgggggacaaagtgcctgctgacctccgcctcatcgagatcaagtccaccacgctgcgagtggaccagtccatcctgacgggtgaatctgtgtccgtgaccaagcacacagaggccatcccagaccccagagctgtgaaccaggacaagaagaacatgctgttttctggcaccaatatcacatcgggcaaagcggtgggtgtggccgtggccaccggcctgcacacggagctgggcaagatccggagccagatggcggcagtcgagcccgagcggacgccgctgcagcgcaagctggacgagtttggacggcagctgtcccacgccatctctgtgatctgcgtggccgtgtgggtcatcaacatcggccacttcgccgacccggcccacggtggctcctggctgcgtggcgctgtctactacttcaagatcgccgtggccctggcggtggcggccatccccgagggcctcccggctgtcatcactacatgcctggcactgggcacgcggcgcatggcacgcaagaacgccatcgtgcgaagcctgccgtccgtggagaccctgggctgcacctcagtcatctgctccgacaagacgggcacgctcaccaccaatcagatgtctgtctgccggatgttcgtggtagccgaggccgatgcgggctcctgccttttgcacgagttcaccatctcgggtaccacgtatacccccgagggcgaagtgcggcagggggatcagcctgtgcgctgcggccagttcgacgggctggtggagctggcgaccatctgcgccctgtgcaacgactcggctctggactacaacgaggccaagggtgtgtatgagaaggtgggagaggccacggagacagctctgacttgcctggtggagaagatgaacgtgttcgacaccgacctgcaggctctgtcccgggtggagcgagctggcgcctgtaacacggtcatcaagcagctgatgcggaaggagttcaccctggagttctcccgagaccggaaatccatgtccgtgtactgcacgcccacccgccctcaccctactggccagggcagcaagatgtttgtgaagggggctcctgagagtgtgatcgagcgctgtagctcagtccgcgtggggagccgcacagcacccctgacccccacctccagggagcagatcctggcaaagatccgggattggggctcaggctcagacacgctgcgctgcctggcactggccacccgggacgcgcccccaaggaaggaggacatggagctggacgactgcagcaagtttgtgcagtacgagacggacctgaccttcgtgggctgcgtaggcatgctggacccgccgcgacctgaggtggctgcctgcatcacacgctgctaccaggcgggcatccgcgtggtcatgatcacgggggataacaaaggcactgccgtggccatctgccgcaggcttggcatctttggggacacggaagacgtggcgggcaaggcctacacgggccgcgagtttgatgacctcagccccgagcagcagcgccaggcctgccgcaccgcccgctgcttcgcccgcgtggagcccgcacacaagtcccgcatcgtggagaacctgcagtcctttaacgagatcactgctatgactggcgatggagtgaacgacgcaccagccctgaagaaagcagagatcggcatcgccatgggctcaggcacggccgtggccaagtcggcggcagagatggtgctgtcagatgacaactttgcctccatcgtggctgcggtggaggagggccgggccatctacagcaacatgaagcaattcatccgctacctcatctcctccaatgttggcgaggtcgtctgcatcttcctcacggcaattctgggcctgcccgaagccctgatccctgtgcagctgctctgggtgaacctggtgacagacggcctacctgccacggctctgggcttcaacccgccagacctggacatcatggagaagctgccccggagcccccgagaagccctcatcagtggctggctcttcttccgatacctggctatcggagtgtacgtaggcctggccacagtggctgccgccacctggtggtttgtgtatgacgccgagggacctcacatcaacttctaccagctgaggaacttcctgaagtgctccgaagacaacccgctctttgccggcatcgactgtgaggtgttcgagtcacgcttccccaccaccatggccttgtccgtgctcgtgaccattgaaatgtgcaatgccctcaacagcgtctcggagaaccagtcgctgctgcggatgccgccctggatgaacccctggctgctggtggctgtggccatgtccatggccctgcacttcctcatcctgctcgtgccgcccctgcctctcattttccaggtgaccccactgagcgggcgccagtgggtggtggtgctccagatatctctgcctgtcatcctgctggatgaggccctcaagtacctgtcccggaaccacatgcacgaaatgagccagaagtgagcgctgggaacagagtggagtctccggtgtgtacctcagactgatggtgcccatgtgttcgcctccgccccccacccttgccaccacactcgcccacttgcccaccgggtcccgccggataaatgacaggcccgaggtcagaatggccatccccgggccccgtcctggggtctctgtccccacttccttctggcctgggaggtctgtaattcctgtctcctggactctcctgggaagttccctgctctgcagctctggcccaggagctgcaggctgggagggggcagccaagaagccggagctggcagcatacccagagatccggggcccccccacccccaaatcacgagtgcagctggagcttgctcccccttgttcggaagctggacgttcacttggtgactggtgcctctgcactgacggaggactctgggggtccttcttaccggctctgacctctctcttcgtgcctggtctgggactgggtcagccctgggggatcagaaggggccatctgggcccagctgtgtacagcgagggtgggcagccccctccactccactctgcttccacaaagtcggctcccgagagctcgaggctgcttctgtttatatgtgcagggcccgggcgggtgaagggtcagagagacggacacaaggagccggcaggagggcggagcgaggatgtcctttcccgggagacaagtcgggaaagcctggctggactgcctcagccccgcgcgcctcctggactcagggttccccgtcctgagctcgggagatgttcagagtcacactgccgcccggtctgccacgcagaggtccaacttgccacccgcgtccctggtacctgagaccaccgacatcctcaggttcctgaccgtggcgcccttctacccagcccagtgtgcggccgccgcgctgtctgcacagctgggggcctctgagcctggtgggcttcctggactcttggcctcactccttgccccctccccacgacacccatgagccgaaaggatgtcactaaggatggctgattccccaagggcacccgctctccctccctccctgctggaggaacacgtcatatcagatgagaggaagatggcctctgatggacagaatttttctcttaactcagcttttgctactttggcaaaaactagcgaggggtagcagaaacctgcaccaaggattgtccctatgtcttggccactcctagagcgtgtgcagactgatgattttatatgtaaatcaagactcacatccctttcctagtcccccacatccaaagcccctcagcctgccttgcagaccaatgggctccatgttctgtagccccctcccctacgcctcacccctcctccctctcacaggttctgggcggccagtgagagaaacgcagtgggggaggcagggagtctggtgcctgcagagattctctgcttctttcctggggggaggtggggaggtcttagcaggagcgggccctgtacccacctgctgacctgctgtttggtagagaaataaaggttgtgtgactggggg

SEQ ID NO: 2773 - DNA, 2111 bp, Homo sapiens
  source 1..2111: mol_type = unassigned DNA
agctcgcggtgtccccgagcgccggcggccgggaggatggcctgggctgcgggtggggcgcgcgcccgacggctggggctcccctctgagcggctgcggctcctgcacctccccggggagccgccccgtcgatgccactaaggccaaggacatatagacggtctgccctcccccactcaaaccgggatcatgacggtccccaaggagatgcccgagaagtgggcccgggcccaggcgcctccctcttggagccgaaagaagccctcttgggggacagaagaagaaaggagggcgcgggctaatgaccgagaatacaatgagaaattccagtatgcgagtaactgcatcaagacctccaagtacaatattctcaccttcctgcctgtcaacctctttgagcagttccaggaagttgccaacacttacttcctgttcctcctcattctgcagttgatcccccagatctcttccctgtcctggttcaccaccattgtgcctttggttcttgtcctcaccatcacagctgttaaagatgccactgatgactatttccgccacaagagcgataaccaggtgaataaccgccagtctcaggtgctgatcaatggaatcctccagcaggagcagtggatgaatgtctgtgttggtgatattatcaagctagaaaataaccagtttgtggcggcggatctcctcctcctttccagcagtgagccccatgggctgtgttacatagagacagcagaacttgatggcgagaccaacatgaaagtacgtcaggcgattccagtcacctcagaattgggagacatcagtaagcttgccaagtttgacggtgaagtgatctgtgaacctcccaacaacaaactggacaaattcagcggaaccctctactggaaggaaaataagttccctctgagcaaccagaacatgctgctgcggggctgtgtgctgcgaaacaccgagtggtgcttcgggctggtcatctttgcaggtcccgacactaagctgatgcaaaacagcggcagaacaaagttcaaaagaacgagtatcgatcgcctaatgaataccctggtgctctggatttttggattcctggtttgcatgggggtgatcctggccattggcaatgccatctgggagcacgaggtggggatgcgtttccaggtctacctgccgtgggatgaggcagtggacagtgccttcttctctggcttcctctccttctggtcctacatcatcatcctcaacaccgttgtgcccatttcactctatgtcagtgtggaggtcatccgtctgggccacagctacttcatcaactgggataagaagatgttctgcatgaagaagcggacgcctgcagaagcccgcaccaccaccctaaacgaggagctgggccaggtggagtacatcttctccgacaagacgggcaccctcacccagaacatcatggttttcaacaagtgctccatcaatggccacagctatgttgggtctgaggggcctagaagaaagggtccatcctggccaggcacggtggctcatgcctatagtcatagcactttgggaggctgaggtgggaggattgctcgagcccaggaatgcgagaccagcctgggcaacatagtgagaccacatccctacaaaaaatttaaaaattagccaggtatggtggcatgcacctgtggtctcagctggccagtgactcaggaggctgagatgggaggatcacttgagcctgggaggtcaaggctgcagtgagccatgatcttccactgcactccagcctgggcgacagaatgaggccctgtctctcgagaaaaatccacacacaaagaagaggtccattctgtgtcccatgtcaagaagcagatcctggctgggcgcagtggatcacctgaggtcaagtgttcgagaccagcttggccaacatggtgaaactccgtctctactaaaaatacaaaaaatagctgggcgtggtggcaggtgcctgttttcccagctactcggggggctgaggcaggagaattgcttgaatccaggaggtggaggttacagtgagccgagtttgcgccattgtactccagcctgggcgacaagagtgaaagtct

SEQ ID NO: 2774 - DNA, 1523 bp, Homo sapiens
  source 1..1523: mol_type = unassigned DNA
cacaaagtagcgggccgaggccccgggggagcggggccgcagctgggggggcgggagcccgtggggagccgagccgagcgccccccgccccagcccccggcatgggcagtacggggccgccggggcgggcgccgagcgctgagcgctgagggtctcccatgggattgctgggatcttgctgggtgagatggcagtgtgtgcaaaaaagcgccccccagaagaagaaaggagggcgcgggctaatgaccgagaatacaatgagaaattccagtatgcgagtaactgcatcaagacctccaagtacaatattctcaccttcctgcctgtcaacctctttgagcagttccaggaagttgccaacacttacttcctgttcctcctcattctgcagttgatcccccagatctcttccctgtcctggttcaccaccattgtgcctttggttcttgtcctcaccatcacagctgttaaagatgccactgatgactatttccgccacaagagcgataaccaggtgaataaccgccagtctcaggtgctgatcaatggaatcctccagcaggagcagtggatgaatgtctgtgttggtgatattatcaagctagaaaataaccagtttgtggcggcggatctcctcctcctttccagcagtgagccccatgggctgtgttacatagagacagcagaacttgatggcgagaccaacatgaaagtacgtcaggcgattccagtcacctcagaattgggagacatcagtaagcttgccaagtttgacggtgaagtgatctgtgaacctcccaacaacaaactggacaaattcagcggaaccctctactggaaggaaaataagttccctctgagcaaccagaacatgctgctgcggggctgtgtgctgcgaaacaccgagtggtgcttcgggctggtcatctttgcaggtcccgacactaagctgatgcaaaacagcggcagaacaaagttcaaaagaacgagtatcgatcgcctaatgaataccctggtgctctggatttttggattcctggtttgcatgggggtgatcctggccattggcaatgccatctgggagcacgaggtggggatgcgtttccaggtctacctgccgtgggatgaggcagtggacagtgccttcttctctggcttcctctccttctggtcctacatcatcatcctcaacaccgttgtgcccatttcactctatgtcaggtatgtgccttctctgacctggggtctctccagggagtcaggcggtcccatagaacttttcttttctatgaagatgaagtccttgagaagtaacgagaagtcctcttcttcctgtactgtaaacatttgatgttatctgtttatctttgtgggcagagcaaactttttaccacagtttcctggtacttgggactgtattagagaaaaaaaaatattgatttattcagcacctatttattacatgcctactgtgtacaaagaagtgtgctaggtgccatcacaaataaaagatgaattaggaa

SEQ ID NO: 2775 - DNA, 5861 bp, Homo sapiens
  source 1..5861: mol_type = unassigned DNA
atggataccttgagagctgttccccttttttcaatatctggcctcttctcctttccctacagggtctcccatgggattgctgggatcttgctgggtgagatggcagtgtgtgcaaaaaagcgccccccagaagaagaaaggagggcgcgggctaatgaccgagaatacaatgagaaattccagtatgcgagtaactgcatcaagacctccaagtacaatattctcaccttcctgcctgtcaacctctttgagcagttccaggaagttgccaacacttacttcctgttcctcctcattctgcagttgatcccccagatctcttccctgtcctggttcaccaccattgtgcctttggttcttgtcctcaccatcacagctgttaaagatgccactgatgactatttccgccacaagagcgataaccaggtgaataaccgccagtctcaggtgctgatcaatggaatcctccagcaggagcagtggatgaatgtctgtgttggtgatattatcaagctagaaaataaccagtttgtggcggcggatctcctcctcctttccagcagtgagccccatgggctgtgttacatagagacagcagaacttgatggcgagaccaacatgaaagtacgtcaggcgattccagtcacctcagaattgggagacatcagtaagcttgccaagtttgacggtgaagtgatctgtgaacctcccaacaacaaactggacaaattcagcggaaccctctactggaaggaaaataagttccctctgagcaaccagaacatgctgctgcggggctgtgtgctgcgaaacaccgagtggtgcttcgggctggtcatctttgcaggtcccgacactaagctgatgcaaaacagcggcagaacaaagttcaaaagaacgagtatcgatcgcctaatgaataccctggtgctctggatttttggattcctggtttgcatgggggtgatcctggccattggcaatgccatctgggagcacgaggtggggatgcgtttccaggtctacctgccgtgggatgaggcagtggacagtgccttcttctctggcttcctctccttctggtcctacatcatcatcctcaacaccgttgtgcccatttcactctatgtcagtgtggaggtcatccgtctgggccacagctacttcatcaactgggataagaagatgttctgcatgaagaagcggacgcctgcagaagcccgcaccaccaccctaaacgaggagctgggccaggtggagtacatcttctccgacaagacgggcaccctcacccagaacatcatggttttcaacaagtgctccatcaatggccacagctatggtgatgtgtttgacgtcctgggacacaaagctgaattgggagagaggcctgaacctgttgacttctccttcaatcctctggctgacaagaagttcttattttgggaccccagcctgctggaggctgtcaagatcggggacccccacacgcatgagttcttccgcctcctttccctgtgtcatactgtcatgtcagaagaaaagaacgaaggagagctgtactacaaagctcagtccccagatgagggggccctggtcaccgcagccaggaactttggttttgttttccgctctcgcacccccaaaacaatcaccgtccatgagatgggcacagccatcacctaccagctgctggccatcctggacttcaacaacatccgcaagcggatgtcggtcatagtgcggaatccagaggggaagatccgactctactgcaaaggggctgacactatcctactggacagactgcaccactccactcaagagctgctcaacaccaccatggaccaccttaatgagtacgcaggggaagggctgaggaccctggtgctggcctacaaggatctggatgaagagtactacgaggagtgggctgagcgacgcctccaggccagcctggcccaggacagccgggaggacaggctggctagcatctatgaggaggttgagaacaacatgatgctgctgggtgcaacggccattgaggacaaacttcagcaaggggttccagagaccattgccctcctgacactggccaacatcaagatttgggtgctaaccggagacaagcaagagacggctgtgaacatcggctattcctgcaagatgctgacggatgacatgactgaggttttcatagtcactggccatactgtcctggaggtgcgggaggagctcaggaaagcccgggagaagatgatggactcatcccgctccgtaggcaacggcttcacctatcaggacaagctttcttcttccaagctaacttctgtcctggaggccgttgctggggagtacgccctggtcataaatggtcacagcctggcccacgcactggaggcagacatggagctggagtttctggagacagcgtgtgcctgcaaagctgtcatctgctgccgggtgacccccttgcagaaggcacaggtggtagaactggtcaagaagtacaagaaggctgtgacgcttgccattggagacggagccaatgatgtcagcatgatcaaaacggctcacattggtgtggggatcagtgggcaggaagggatccaggctgtcttggcctccgattactccttctcccagttcaagttcctgcagcgcctcctgctggtgcatgggcgctggtcctacctgcgaatgtgcaagtttctttgctatttcttctacaaaaactttgctttcaccatggtccacttctggtttggcttcttctgtggcttctcagcccagaccgtctatgaccagtatttcatcaccctgtataacatcgtgtacacctccctgccagtcctggctatgggggtctttgatcaggatgtccccgagcagcggagcatggagtaccctaagctgtatgagccgggccagctgaaccttctcttcaacaagcgggagttcttcatctgcatcgcccagggcatctacacctccgtgctcatgttcttcattccctatggggtgtttgctgatgccacccgggatgatggcactcagctggctgactaccagtcctttgcagtcactgtggccacatccttggtcattgtggttagcgtgcagattgggctcgacacaggctactggacggccatcaaccacttcttcatctggggaagccttgctgtttactttgccatcctctttgccatgcacagcaatgggctcttcgacatgtttcccaaccagttccggtttgtggggaatgcccagaacaccttggcccagcccacggtgtggctgaccattgtgctcaccacagtcgtctgcatcatgcccgtggttgccttccgattcctcaggctcaacctgaagccggatctctccgacacggtccgctacacacagctcgtgaggaagaagcagaaggcccagcaccgctgcatgcggcgggttggccgcactggctcccggcgctccggctatgccttctcccatcaggagggcttcggggagctcatcatgtctggcaagaacatgcggctgagctctctcgcgctctccagcttcaccacccgctccagctccagctggattgagagcctgcgcaggaagaagagtgacagtgccagtagccccagtggcggtgccgacaagcccctcaagggctgaaggccgaggatggatgccctgtgccagtgaccagagcacccagggctggccagtcactgagggaacagcgtctcggaactgctggtcctcattccttgcttcccgtccccccggtagactctgtcctgctggtcccaccacacatggctgggacatctgttcccagctgtaggcccttccaccagctggggagctagagggagcaggcccaagggcagagcagaggctgaggcacggggagccagccccactcggggaccagaagtggaaccaaaaacaagaaaaaactgtgagagattgtgtctgcccctgccctgcctgggacccacagggagactataatctccttatttttttactcctactccccagaggggccctagtgcctctgttcctgaattacataagaatgtaccatgccgggaagccagagacctgcaggggcctcggcccctcacatcgtgtatgtctctccttgatttgtgttgtgtccagtttggttttgtctttttttatttggcaagtggaggaggcttttatgtgacttttatgttgtggttggtgtcttaactctcctgggaaaaggaggctggcacacactgggatgccgcagcctggccggctgtggggtggtttgggaggatccatgtcggctctgcctgcagtgaccagtgctctgtggggcagaggagctgaccagggagggaggtacccatgagcagagggtagtgggagagtgtaaaggagggtttggtcctgtctgcttcctcaccttgagagtaaagtgctgccctctgcccccaacacacacacatatcaattcctggattccttagtcctgctggccttgggctggagcctaggaaagtggcccccaaatccttagtgagctaaagctgggtctgaaatttggtcagtggggaggggtagttttcttttcttttttctttttctttttttctttttttttttgagatggagtctcactcttgtcacctaggcaagagtgcaatggcacaatctcagctcactgcaacctccacctcctgggttcaagcgattctcctgcctcagcctcctgagtagctgggattacaggcacacaccaccacgcttggttaatttttgtatttttagtagagatgtttcaccatgttggccaggctagtcttgaattcctgacctcctgacctgcccacctcaacctcccaaagtgctgagattacaggcgtgagccaccacacccagctcagggaggcgtagttttctttaattttaaatttaaacccaagtttattggcagactcccttttgacctccctttgcctccccatctggtgctttcttgcatctacaccccagggccctgtggtggggctgcagggggaagctgtgcacctgagatgaggctggaacgggaattggcctctctgctcccttcttcagtaagcaaggagccccgcccctcaggcccagcctctggcaagaggtggtggaatccttgtgccgggtagtagaggaggataagggcaaaaccaggcccaggccagtgcctggcttggtctggatgggacactgtcagagtttggccacagcctgtcctttacttcatccacacctatgaagctattccctaaataaggcatttcccaagttagtcgctacctaatcagccttgagaagaatcctttcctcttctttgatagtgggtcgggggattcttcaggaatggtttggagctgggagtgggtagggggattttaaatgttccatatgggagccccaaaggaactggatgggctgcagtgaggtgggggcgggtgggcagggaatgggagaggggaagtcttggcagggaaatcccttttggccacacagtttacaaacccagtatcatgtctgtctgtgtgtctctcaaggtgagagtctgatttttataccaaagaggaaatgattttttttcatattttgtttgtctatattatataaatatatatatacagttatatatatatatattattttttggttctctctcgttttttagggagggaagaaagtaccaagttgcattgagctgtaattaaggaacattataatttatgacacatttctatacttgcaaaaattatatcattttatggatataagagaaaaatgcctttttataaaatttcaatttctgagaa

SEQ ID NO: 2776 - DNA, 3457 bp, Homo sapiens
  source 1..3457: mol_type = unassigned DNA
ggtcggaacatggcggaccagatcccgctttacccggtgcgtagcgcagcggcggccgcagccaaccgcaaacgcgcggcctactacagcgccgcggggcccaggccgggagccgaccggcacagcaggtaccagctggaggatgagtctgcgcatttggatgaaatgccactaatgatgtctgaagaaggctttgagaatgaggaaagtgattaccacaccttaccacgagccaggataatgcaaaggaaaagaggactggagtggtttgtctgtgatggctggaagttcctctgtaccagttgctgtggttggctgataaatatttgtcgaagaaagaaagagctgaaagctcgcacagtatggcttggatgtcctgaaaagtgtgaagaaaaacatcccaggaattctataaaaaatcaaaaatacaatgtgtttacctttatacctggggttttgtatgaacaattcaagtttttcttgaatctctattttctagtaatatcctgctcacagtttgtaccagcattgaaaataggctatctctacacctactgggctcctctgggatttgtcttggctgttactatgacacgggaagcaattgatgaatttcggcgttttcagcgtgacaaggaagtgaattcacaactatatagcaagcttacagtaagaggtaaagtgcaagttaagagttcagacatacaagttggagacctcatcatagtggaaaagaatcaaagaattccatcggacatggtgtttcttaggacttcagaaaaagcaggttcgtgttttattcgaactgatcaactagatggtgaaactgactggaagctgaaggtggcagtgagctgcacgcaacagctgccggctctgggggaccttttttctatcagtgcttatgtttatgctcagaaaccacaaatggacattcacagtttcgaaggcacatttaccagggaagacagtgacccgcccattcatgaaagtctcagcatagaaaatacattgtgggcaagcaccattgttgcatcaggtactgtaataggtgttgtcatttataccggaaaagagactcgaagtgtaatgaacacatccaatccaaaaaataaggttggtttgttggaccttgaactcaatcggctgacgaaagcgctatttttggctttagttgctctttccattgttatggtaaccttacaaggatttgtgggtccatggtaccgcaatctttttcggttccttctcctcttttcttacatcattcccataagtttgcgtgtgaacttggacatgggcaaagcggtgtatggatggatgatgatgaaagatgagaacatccctggcacggtcgttcggaccagcactatcccagaggaacttgggcgcctggtgtatttattgacagacaaaacaggaaccctcacccagaatgaaatgatatttaagcggctgcacctgggcaccgtgtcctatggcgccgacacgatggatgagatccagagccatgtcagggactcctactcacagatgcagtctcaagctggtggaaacaatactggttcaactccactaagaaaagcccaatcttcagctcccaaagttaggaaaagtgtcagtagtcgaatccatgaagccgtgaaagccatcgtgctgtgtcacaacgtgacccccgtgtatgagtctcgggccggcgttactgaggagactgagttcgcagaggctgaccaagacttcagtgatgagaatcgcacctaccaggcttccagcccggatgaggtcgctctggtgcagtggacagagagtgtgggcctcacgctggtcagcagggacctcacctccatgcagctgaagacccccagtggccaggtcctcagcttctgcattctgcagctgtttcccttcacctccgagagcaagcggatgggcgtcatcgtcagggatgaatccacggcagaaatcacattctacatgaagggcgctgacgtggccatgtctcctatcgtgcagtataatgactggctggaagaggagtgcggaaacatggctcgcgaaggactgcggaccctcgtggttgcaaagaaggcgttgacagaggagcagtaccaggactttgagagccgatacactcaagccaagctgagcatgcacgacaggtccctcaaggtggccgcggtagtcgagagcctggagagggagatggaactgctgtgcctcaccggcgtggaggaccagctgcaggcagacgtgcggcccacgctggagatgctgcgcaacgccgggatcaagatatggatgctaacaggcgataaactcgagacagctacctgcattgccaaaagttcacatctcgtgtctagaacacaagatattcatattttcagacaggtaaccagtcggggagaggcacatttggagctgaatgcatttcgaaggaagcatgattgtgcactagtcatatctggggactctctggaggtttgtctaaagtactacgagcatgaatttgtggagctggcctgccagtgccctgccgtggtttgctgccgctgctcacccacccagaaggcccgcattgtgacactgctgcagcagcacacagggagacgcacctgcgccatcggtgatggaggaaatgatgtcagcatgattcaggcagcagactgtgggattgggattgagggaaaggagggtaaacaggcctcgctggcggccgacttctccatcacgcagttccggcacataggcaggctgctcatggtgcacgggcggaacagctacaagaggtcggcggcactcggccagttcgtcatgcacaggggccttatcatctccaccatgcaggctgtgttttcctcagtcttctacttcgcatccgtccctttgtatcagggcttcctcatggtggggtatgccaccatatacaccatgttcccagtgttctccttagtgctggaccaggacgtgaagccagagatggcgatgctctacccggagctgtacaaggacctcaccaagggaagatccttgtccttcaaaaccttcctcatctgggttttaataagtatttaccaaggcggcatcctcatgtatggggccctggtgctcttcgagtctgagttcgtccacgtggtggccatctccttcaccgcactgatcctgaccgagctgctgatggtggcgctgaccgtccgcacgtggcactggctgatggtggtggccgagttcctcagcttaggctgctacgtgtcctcactcgcttttctcaatgaatattttggtataggcagagtgtcttttggagctttcttagatgttgcctttatcaccaccgtgaccttcctgtggaaagtgtcggcgatcaccgtggtcagctgcctcccgctgtatgtcctcaagtacctgaggcgcaagctctctcctcccagctactgcaagctggcctcctaagggg

SEQ ID NO: 2777 - DNA, 3660 bp, Homo sapiens
  source 1..3660: mol_type = unassigned DNA
ggggcggtcggaacatggcggaccagatcccgctttacccggtgcgtagcgcagcggcggccgcagccaaccgcaaacgcgcggcctactacagcgccgcggggcccaggccgggagccgaccggcacagcaggtaccagctggaggatgagtctgcgcatttggatgaaatgccactaatgatgtctgaagaaggctttgagaatgaggaaagtgattaccacaccttaccacgagccaggataatgcaaaggaaaagaggactggagtggtttgtctgtgatggctggaagttcctctgtaccagttgctgtggttggctgataaatatttgtcgaagaaagaaagagctgaaagctcgcacagtatggcttggatgtcctgaaaagtgtgaagaaaaacatcccaggaattctataaaaaatcaaaaatacaatgtgtttacctttatacctggggttttgtatgaacaattcaagtttttcttgaatctctattttctagtaatatcctgctcacagtttgtaccagcattgaaaataggctatctctacacctactgggctcctctgggatttgtcttggctgttactatgacacgggaagcaattgatgaatttcggcgttttcagcgtgacaaggaagtgaattcacaactatatagcaagcttacagtaagaggtaaagtgcaagttaagagttcagacatacaagttggagacctcatcatagtggaaaagaatcaaagaattccatcggacatggtgtttcttaggacttcagaaaaagcaggttcgtgttttattcgaactgatcaactagatggtgaaactgactggaagctgaaggtggcagtgagctgcacgcaacagctgccggctctgggggaccttttttctatcagtgcttatgtttatgctcagaaaccacaaatggacattcacagtttcgaaggcacatttaccagggaagacagtgacccgcccattcatgaaagtctcagcatagaaaatacattgtgggcaagcaccattgttgcatcaggtactgtaataggtgttgtcatttataccggaaaagagactcgaagtgtaatgaacacatccaatccaaaaaataaggttggtttgttggaccttgaactcaatcggctgacgaaagcgctatttttggctttagttgctctttccattgttatggtaaccttacaaggatttgtgggtccatggtaccgcaatctttttcggttccttctcctcttttcttacatcattcccataagtttgcgtgtgaacttggacatgggcaaagcggtgtatggatggatgatgatgaaagatgagaacatccctggcacggtcgttcggaccagcactatcccagaggaacttgggcgcctggtgtatttattgacagacaaaacaggaaccctcacccagaatgaaatgatatttaagcggctgcacctgggcaccgtgtcctatggcgccgacacgatggatgagatccagagccatgtcagggactcctactcacagatgcagtctcaagctggtggaaacaatactggttcaactccactaagaaaagcccaatcttcagctcccaaagttaggaaaagtgtcagtagtcgaatccatgaagccgtgaaagccatcgtgctgtgtcacaacgtgacccccgtgtatgagtctcgggccggcgttactgaggagactgagttcgcagaggctgaccaagacttcagtgatgagaatcgcacctaccaggcttccagcccggatgaggtcgctctggtgcagtggacagagagtgtgggcctcacgctggtcagcagggacctcacctccatgcagctgaagacccccagtggccaggtcctcagcttctgcattctgcagctgtttcccttcacctccgagagcaagcggatgggcgtcatcgtcagggatgaatccacggcagaaatcacattctacatgaagggcgctgacgtggccatgtctcctatcgtgcagtataatgactggctggaagaggagtgcggaaacatggctcgcgaaggactgcggaccctcgtggttgcaaagaaggcgttgacagaggagcagtaccaggactttgagagccgatacactcaagccaagctgagcatgcacgacaggtccctcaaggtggccgcggtagtcgagagcctggagagggagatggaactgctgtgcctcaccggcgtggaggaccagctgcaggcagacgtgcggcccacgctggagatgctgcgcaacgccgggatcaagatatggatgctaacaggcgataaactcgagacagctacctgcattgccaaaagttcacatctcgtgtctagaacacaagatattcatattttcagacaggtaaccagtcggggagaggcacatttggagctgaatgcatttcgaaggaagcatgattgtgcactagtcatatctggggactctctggaggtttgtctaaagtactacgagcatgaatttgtggagctggcctgccagtgccctgccgtggtttgctgccgctgctcacccacccagaaggcccgcattgtgacactgctgcagcagcacacagggagacgcacctgcgccatcggtgatggaggaaatgatgtcagcatgattcaggcagcagactgtgggattgggattgagggaaaggagggtaaacaggcctcgctggcggccgacttctccatcacgcagttccggcacataggcaggctgctcatggtgcacgggcggaacagctacaagaggtcggcggcactcggccagttcgtcatgcacaggggccttatcatctccaccatgcaggctgtgttttcctcagtcttctacttcgcatccgtccctttgtatcagggcttcctcatggtggggtatgccaccatatacaccatgttcccagtgttctccttagtgctggaccaggacgtgaagccagagatggcgatgctctacccggagctgtacaaggacctcaccaagagccaacaagacggcaggtcaaacagaagacaacatgaacgtctaacctcaggcaccagtggacacgtgtgggacccaggcagcttcttcaggattcgggtgtcaggaaaaggcgcccgaaatgctgggaagatccttgtccttcaaaaccttcctcatctgggttttaataagtatttaccaaggcggcatcctcatgtatggggccctggtgctcttcgagtctgagttcgtccacgtggtggccatctccttcaccgcactgatcctgaccgagctgctgatggtggcgctgaccgtccgcacgtggcactggctgatggtggtggccgagttcctcagcttaggctgctacgtgtcctcactcgcttttctcaatgaatattttgatgttgcctttatcaccaccgtgaccttcctgtggaaagtgtcggcgatcaccgtggtcagctgcctcccgctgtatgtcctcaagtacctgaggcgcaagctctctcctcccagctactgcaagctggcctcctaaggggctgtgcacccccagcgggctggccccagcaccttctgcccttcccagcaccttgtgcccttgccagtgaacgcagggtttgccattgctaccaagcaagcacca

SEQ ID NO: 2778 - DNA, 4320 bp, Homo sapiens
  source 1..4320: mol_type = unassigned DNA
ggggcggtcggaacatggcggaccagatcccgctttacccggtgcgtagcgcagcggcggccgcagccaaccgcaaacgcgcggcctactacagcgccgcggggcccaggccgggagccgaccggcacagcaggtaccagctggaggatgagtctgcgcatttggatgaaatgccactaatgatgtctgaagaaggctttgagaatgaggaaagtgattaccacaccttaccacgagccaggataatgcaaaggaaaagaggactggagtggtttgtctgtgatggctggaagttcctctgtaccagttgctgtggttggctgataaatatttgtcgaagaaagaaagagctgaaagctcgcacagtatggcttggatgtcctgaaaagtgtgaagaaaaacatcccaggaattctataaaaaatcaaaaatacaatgtgtttacctttatacctggggttttgtatgaacaattcaagtttttcttgaatctctattttctagtaatatcctgctcacagtttgtaccagcattgaaaataggctatctctacacctactgggctcctctgggatttgtcttggctgttactatgacacgggaagcaattgatgaatttcggcgttttcagcgtgacaaggaagtgaattcacaactatatagcaagcttacagtaagaggtaaagtgcaagttaagagttcagacatacaagttggagacctcatcatagtggaaaagaatcaaagaattccatcggacatggtgtttcttaggacttcagaaaaagcaggttcgtgttttattcgaactgatcaactagatggtgaaactgactggaagctgaaggtggcagtgagctgcacgcaacagctgccggctctgggggaccttttttctatcagtgcttatgtttatgctcagaaaccacaaatggacattcacagtttcgaaggcacatttaccagggaagacagtgacccgcccattcatgaaagtctcagcatagaaaatacattgtgggcaagcaccattgttgcatcaggtactgtaataggtgttgtcatttataccggaaaagagactcgaagtgtaatgaacacatccaatccaaaaaataaggttggtttgttggaccttgaactcaatcggctgacgaaagcgctatttttggctttagttgctctttccattgttatggtaaccttacaaggatttgtgggtccatggtaccgcaatctttttcggttccttctcctcttttcttacatcattcccataagtttgcgtgtgaacttggacatgggcaaagcggtgtatggatggatgatgatgaaagatgagaacatccctggcacggtcgttcggaccagcactatcccagaggaacttgggcgcctggtgtatttattgacagacaaaacaggaaccctcacccagaatgaaatgatatttaagcggctgcacctgggcaccgtgtcctatggcgccgacacgatggatgagatccagagccatgtcagggactcctactcacagatgcagtctcaagctggtggaaacaatactggttcaactccactaagaaaagcccaatcttcagctcccaaagttaggaaaagtgtcagtagtcgaatccatgaagccgtgaaagccatcgtgctgtgtcacaacgtgacccccgtgtatgagtctcgggccggcgttactgaggagactgagttcgcagaggctgaccaagacttcagtgatgagaatcgcacctaccaggcttccagcccggatgaggtcgctctggtgcagtggacagagagtgtgggcctcacgctggtcagcagggacctcacctccatgcagctgaagacccccagtggccaggtcctcagcttctgcattctgcagctgtttcccttcacctccgagagcaagcggatgggcgtcatcgtcagggatgaatccacggcagaaatcacattctacatgaagggcgctgacgtggccatgtctcctatcgtgcagtataatgactggctggaagaggagtgcggaaacatggctcgcgaaggactgcggaccctcgtggttgcaaagaaggcgttgacagaggagcagtaccaggactttgagagccgatacactcaagccaagctgagcatgcacgacaggtccctcaaggtggccgcggtagtcgagagcctggagagggagatggaactgctgtgcctcaccggcgtggaggaccagctgcaggcagacgtgcggcccacgctggagatgctgcgcaacgccgggatcaagatatggatgctaacaggcgataaactcgagacagctacctgcattgccaaaagttcacatctcgtgtctagaacacaagatattcatattttcagacaggtaaccagtcggggagaggcacatttggagctgaatgcatttcgaaggaagcatgattgtgcactagtcatatctggggactctctggaggtttgtctaaagtactacgagcatgaatttgtggagctggcctgccagtgccctgccgtggtttgctgccgctgctcacccacccagaaggcccgcattgtgacactgctgcagcagcacacagggagacgcacctgcgccatcggtgatggaggaaatgatgtcagcatgattcaggcagcagactgtgggattgggattgagggaaaggagggtaaacaggcctcgctggcggccgacttctccatcacgcagttccggcacataggcaggctgctcatggtgcacgggcggaacagctacaagaggtcggcggcactcggccagttcgtcatgcacaggggccttatcatctccaccatgcaggctgtgttttcctcagtcttctacttcgcatccgtccctttgtatcagggcttcctcatggtggggtatgccaccatatacaccatgttcccagtgttctccttagtgctggaccaggacgtgaagccagagatggcgatgctctacccggagctgtacaaggacctcaccaagggaagatccttgtccttcaaaaccttcctcatctgggttttaataagtatttaccaaggcggcatcctcatgtatggggccctggtgctcttcgagtctgagttcgtccacgtggtggccatctccttcaccgcactgatcctgaccgagctgctgatggtggcgctgaccgtccgcacgtggcactggctgatggtggtggccgagttcctcagcttaggctgctacgtgtcctcactcgcttttctcaatgaatattttgatgttgcctttatcaccaccgtgaccttcctgtggaaagtgtcggcgatcaccgtggtcagctgcctcccgctgtatgtcctcaagtacctgaggcgcaagctctctcctcccagctactgcaagctggcctcctaaggggctgtgcacccccagcgggctggccccagcaccttctgcccttcccagcaccttgtgcccttgccagtgaacgcagggtttgccattgctaccaagcaagcaccacaagaaagggagggtacgccaggcgagcccagggcacagatgctgagacagcctctccttctcagtgcagggacgtcacccctgccaggcaagcccagggcacagatgccaggatggcttctccctctcagtgcgaggcttcacccctgccaggcaagcccagggcatagatgctgagacagcctctccctctcagtgcagggacgtcacccctgccaggcaagcccagggcacagaggccgggacggcctctccctctcagtgtgaggcttcacccatgctaggcaagcccagggcacagatgccgggatggcccctccctctcagtgcgggaacgtcacccctgccaggcaagcccagggcacagatgctgcgatggcctcttcctcttaagtgtggggcctcacccctgcttttctttctttttttgtattgtcaaaattgtatttccatattgaagcagcttgagtttctactgaaaatgagcccgaattatttcactattactgtaaagggttcatcttactctggcattctgagaattagactgaaagtttaatttctgcagttccctcatattcagattctttctttgatgttataacacaaagtcattcctactcaaatgtaataaaattgaggctccacggaggcccgtgtccacatcagctgcagctcccactcagacagacggcctgccccacagcctgccctttgctgaagataccctcgctttatacttgcatttcgcttttcagtaaaaacagtcaagttactgagttctcac

SEQ ID NO: 2779 - DNA, 1556 bp, Homo sapiens
  source 1..1556: mol_type = unassigned DNA
gcgccgcggggcccaggccgggagccgaccggcacagcaggtaccagctggaggatgagtctgcgcatttggatgaaatgccactaatgatgtctgaagaaggctttgagaatgaggaaagtgattaccacaccttaccacgagccaggataatgcaaaggaaaagaggactggagtggtttgtctgtgatggctggaagttcctctgtaccagttgctgtggttggctgataaatatttgtcgaagaaagaaagagctgaaagctcgcacagtatggcttggatgtcctgaaaagtgtgaagaaaaacatcccaggaattctataaaaaatcaaaaatacaatgtgtttacctttatacctggggttttgtatgaacaattcaagtttttcttgaatctctattttctagtaatatcctgctcacagtttgtaccagcattgaaaataggctatctctacacctactgggctcctctgatgacatgattgtttatctagaaaaccccatcgtctcagcccaaaatctccttaagctgataagcaacttcagcaaagtctcaggatacaaaatcaatgtacaaaaatcacaagcattcttatacaccaacaacagacaaacagagagccaaatcatgaatgaactcccattcacaattgcttcaaagagaataaaatacctaggaatccaacttacaagggatgtgaaggacctcttcaaggagaactacaaaccactgctcaaggaaataaaagaggacacaaacaaatggaagaacattccatgctcatgggtaggaagaatcaatatcgtgaaaatggccatactgcccaaggtaatttacagattcaatgccatccccatcaagctaccaatgactttcttcacagaattggaaaaaactactttacagttcatatggaaccaaaaaagagtctgcatcgccaaatcaatcctaagccaaaagaacaaagctggaggcatcacactacctgacttcaaactatactacaaggctacagtaaccaaaacagcatggtactggtaccaaaacagagatatagatcaatggaacagaagagagccctcagaaataatgccgcatatctacaactatctgatctttgacaaacctgagaaaaacaagcaatggggaaaggattccctatttaataaatggtgctgggaaaactggctagccatatgtagaaagctgaaactggatcccttccttacaccttatacaaaaatcaattcaagatggattaaagatttaaacgttagacctaaaaccataaaaaccctagaagaaaacctaggcaataccattcaggacataggcatgggcaaggacttcatgtccaaaacaccaaaagcaatggcaacaaaagccaaaattgacaaatgggatctaattaaactcaagagcttctgcacagcaaaagaaactaccatcagagtgaacaggcaacctacaacatgggagaaaattttcgcaacctactcatctgacaaagggctaatatccagaatctacaatgaactcaaacaaattt

SEQ ID NO: 2780 - DNA, 854 bp, Homo sapiens
  source 1..854: mol_type = unassigned DNA
aaaggggcggtcggaacatggcggaccagatcccgctttacccggtgcgtagcgcagcggcggccgcagccaaccgcaaacgcgcggcctactacagcgccgcggggcccaggccgggagccgaccggcacagcaggtaccagctggaggatgagtctgcgcatttggatgaaatgccactaatgatgtctgaagaaggctttgagaatgaggaaagtgattaccacaccttaccacgagccaggataatgcaaaggaaaagaggactggagtggtttgtctgtgatggctggaagttcctctgtaccagttgctgtggttggctgataaatatttgtcgaagaaagaaagagctgaaagctcgcacagtatggcttggatgtcctgaaaagtgtgaagaaaaacatcccaggaattctataaaaaatcaaaaatacaatgtgtttacctttatacctggggttttgtatgaacaattcaagtttttcttgaatctctattttctagtaatatcctgctcacagtttgtaccagcattgaaaataggctatctctacacctactgggctcctctgggatttgtcttggctgttactatgacacgggaagcaattgatgaatttcggcgttttcagcgtgacaaggaagtgaattcacaactatatagcaagcttacagtaagaggtaaagtgcaagttaagagttcagacatacaagttggagacctcatcatagtggaaaagaatcaaagaattccatcggacatggtgtttcttaggacttcagaaaaagcagtatcaaacaatcttgattactgcagccatctggttttattcattttctgttttttaaat

SEQ ID NO: 2781 - DNA, 2035 bp, Homo sapiens
  source 1..2035: mol_type = unassigned DNA
gtataatgactggctggaagaggagtgcggaaacatggctcgcgaaggactgcggaccctcgtggttgcaaagaaggcgttgacagaggagcagtaccaggactttgagagccgatacactcaagccaagctgagcatgcacgacaggtccctcaaggtggccgcggtagtcgagagcctggagagggagatggaactgctgtgcctcaccggcgtggaggaccagctgcaggcagacgtgcggcccacgctggagatgctgcgcaacgccgggatcaagatatggatgctaacaggcgataaactcgagacagctacctgcattgccaaaagttcacatctcgtgtctagaacacaagatattcatattttcagacaggtaaccagtcggggagaggcacatttggagctgaatgcatttcgaaggaagcatgattgtgcactagtcatatctggggactctctggaggtttgtctaaagtactacgagcatgaatttgtggagctggcctgccagtgccctgccgtggtttgctgccgctgctcacccacccagaaggcccgcattgtgacactgctgcagcagcacacagggagacgcacctgcgccatcggtgatggaggaaatgatgtcagcatgattcaggcagcagactgtgggattgggattgagggaaaggagggtaaacaggcctcgctggcggccgacttctccatcacgcagttccggcacataggcaggctgctcatggtgcacgggcggaacagctacaagaggtcggcggcactcggccagttcgtcatgcacaggggccttatcatctccaccatgcaggctgtgttttcctcagtcttctacttcgcatccgtccctttgtatcagggcttcctcatggtggggtatgccaccatatacaccatgttcccagtgttctccttagtgctggaccaggacgtgaagccagagatggcgatgctctacccggagctgtacaaggacctcaccaagggaagatccttgtccttcaaaaccttcctcatctgggttttaataagtatttaccaaggcggcatcctcatgtatggggccctggtgctcttcgagtctgagttcgtccacgtggtggccatctccttcaccgcactgatcctgaccgagctgctgatggtggcgctgaccgtccgcacgtggcactggctgatggtggtggccgagttcctcagcttaggctgctacgtgtcctcactcgcttttctcaatgaatattttgatgttgcctttatcaccaccgtgaccttcctgtggaaagtgtcggcgatcaccgtggtcagctgcctcccgctgtatgtcctcaagtacctgaggcgcaagctctctcctcccagctactgcaagctggcctcctaaggggctgtgcacccccagcgggctggccccagcaccttctgcccttcccagcaccttgtgcccttgccagtgaacgcagggtttgccattgctaccaagcaagcaccacaagaaagggagggtacgccaggcgagcccagggcacagatgctgagacagcctctccttctcagtgcagggacgtcacccctgccaggcaagcccagggcacagatgccaggatggcttctccctctcagtgcgaggcttcacccatgctaggcaagcccagggcacagatgccgggatggcccctccctctcagtgcgggaacgtcacccctgccaggcaagcccagggcacagatgctgcgatggcctcttcctcttaagtgtggggcctcacccctgcttttctttctttttttgtattgtcaaaattgtatttccatattgaagcagcttgagtttctactgaaaatgagcccgaattatttcactattactgtaaagggttcatcttactctggcattctgagaattagactgaaagtttaatttctgcagttccctcatattcagattctttctttgatgttataacacaaagtcattcctactcaaatgtaataaaattgaggctccacgg

SEQ ID NO: 2782 - DNA, 6680 bp, Homo sapiens
  source 1..6680: mol_type = unassigned DNA
ccgcaggcggggagctcgcaccgccgcgcccgggccgcgagtgatgataacctaagaggccggcgcgggcgggcgtgagcggcggaggagccgggcgcggcgacacgcggccatggagcgggagccggcggggaccgaggagcccgggcctccgggacggcggaggcgccgagagggcaggacgcgcacggtgcgctccaacctgctgccgcccccgggcgccgaggaccctgcggctggcgcggccaagggcgagcggcgacggcggcgcgggtgtgcccagcacctggccgacaaccggctcaagactaccaagtacacgctgctgtccttcctgcccaagaacctgttcgagcagttccaccgcccggccaacgtgtactttgtcttcatcgcgctgctcaacttcgtgccggcggtgaacgccttccagcccggcctggcactggcgccggtgctcttcatcctggccatcacggccttcagggacctgtgggaggactacagccgccaccgctccgaccacaagatcaaccacctgggctgcctggtcttcagcagggaagaaaagaaatacgtgaaccgattctggaaagaaatccacgtgggagactttgtgcgtcttcgctgcaacgaaatcttccctgcggacattctgctgctctcctccagtgaccccgacgggctatgccacatcgagaccgccaacctggatggagagaccaacctgaagcggcggcaggtggtccgcggcttctcggagcttgtctccgaattcaatcctttgacgttcaccagcgtgatcgaatgcgagaagccaaacaacgacctgagtaggtttcgcggctgcatcatacatgacaacgggaaaaaggccgggctgtataaagaaaacctgctgctgaggggctgcacccttaggaacacggacgcagtcgtcggcattgtcatctacgcaggacatgaaaccaaggctctgctgaacaacagtgggccccgctacaagcgcagcaagctggagaggcagatgaactgcgacgtgctctggtgtgtcctgctccttgtttgcatgtctctgttttcagcagtcggacatggactgtggatatggcggtatcaagagaagaagtcattattttatgtccccaagtctgatggaagctccttatccccagtcacagctgcagtttactcatttttaacaatgataatagttctgcaggttttgatcccaatttccttatacgtttccattgaaattgttaaagcatgccaagtgtacttcattaaccaggacatgcagttgtatgacgaagaaacagactcgcagctgcagtgccgagctctgaacatcacggaagacttaggacagatacagtacattttctcagataaaactggcactttgacagagaataagatggttttccgaagatgcactgtgtctggtgtagaatattctcatgatgcaaatgcgcagcgtctggccaggtaccaagaggcagactcggaggaggaggaggtggtgcccagagggggctcggtgtcccagcgcggcagcatcggcagccaccagagtgtccgggtggtgcacagaacccagagcaccaagtcccaccggcgcacgggcagccgggccgaggccaagagggccagcatgctgtccaagcacacggccttcagcagccccatggagaaggatatcacgcccgacccaaagctgctggagaaggtgagtgagtgtgacaagagcctagccgtggcgaggcatcaggagcacctgctggcccacctctcgcctgagctgtctgacgtctttgatttcttcatcgcactcaccatctgcaacacagtcgtcgtcacgtccccggatcagccacgaacaaaggtgagggtgaggtttgagctgaagtccccggtgaagacgatagaagacttcctgcggaggttcacacccagctgcctgacctcaggctgcagcagcatcgggagcctggccgccaacaagtccagccacaagttgggctccagcttcccgtccaccccgtccagcgacggcatgcttctcaggctggaggagaggctgggccagcccacctcggccatcgccagcaacggctacagcagccaggcggacaactgggcctcggagcttgctcaggagcaggagtcagagcgcgagctgcggtacgaggcggagagcccggatgaggccgcactggtgtatgcggccagagcctacaactgcgtgcttgtggagcggctgcacgaccaagtgtcagtggagctgccccacctgggcaggctcaccttcgagctcctgcacacactgggtttcgattccgtccgcaagaggatgtcagtggtgatccggcacccgcttaccgatgagatcaacgtctacaccaagggggccgactcagtggtcatggatctcctgcagccctgctcttcagttgacgccagagggaggcatcaaaaaaagattcggagcaaaactcagaattacctcaacgtgtatgcggcggaaggcctgcgcaccttgtgcatcgccaagagagttctgagtaaagaagagtatgcctgctggttgcaaagccacctagaagccgaatcctccctggaaaacagcgaggagctcctcttccagtctgccattcgcctggagaccaacctgcacttgttaggtgccactgggattgaagaccgcctgcaggacggagtccctgaaactatttctaaattgcgtcaagcgggcctgcagatttgggttctcactggtgacaaacaagaaacagctgtcaacattgcatatgcctgcaaactgctggaccacgacgaggaggtcatcaccctgaatgccacctcccaggaggcgtgtgcagccctgctagaccagtgcctatgctacgtgcagtccagaggcctccagagagcccctgagaagaccaagggcaaagtgagcatgaggttctcctctctctgcccaccctccacgtccactgcctctggccgcagacccagcctcgtgatcgatgggagaagcctggcctacgctctcgagaaaaacctggaggacaaattcctcttccttgccaagcagtgccgctccgtcctctgctgtcggtcgacgcctctgcagaagagcatggtggtgaagctggtgcggagcaagctcaaggccatgaccctggccataggtgatggagccaatgatgtcagcatgatccaggtggcagatgtgggtgtgggaatctccggccaggagggtatgcaggcagtgatggccagcgactttgcagtgccgaaattccgatacctggagaggctcttgattcttcacgggcattggtgctactcccgacttgccaacatggtgctgtacttcttctacaaaaacacaatgttcgtgggcctcctgttttggttccagtttttctgtggcttctctgcatctaccatgattgaccagtggtatctaatcttctttaatctgctcttctcgtcacttcccccgctcgtgactggggtgctggacagggatgtgccagccaatgtgctgctgaccaacccgcagctctacaagagtggccagaacatggaggaataccggccacgaacgttctggtttaacatggccgacgccgccttccagagcctggtttgcttttccattccttacctggcctactatgactcgaacgtggacctgtttacctgggggacccctattgtgacaatcgcgctgctcactttcctgctccacctgggcattgaaaccaaaacctggacctggctcaactggataacgtgtggcttcagtgtccttttgtttttcaccgtggctttgatttacaatgcgtcttgtgccacgtgctatcctccgtccaacccttactggactatgcaagccttactgggtgacccagtgttttacttgacttgcctgatgacgcctgtcgctgcactgctgcccagattgtttttcagatccctccaggggagggttttccccacacaacttcagctggcacgtcagttgaccaggaagtcccccaggagatgcagtgctcccaaagagacctttgctcagggacgcctcccgaaggactcgggaaccgagcactcatcagggaggacagtcaagacctctgtgcccctgtcccagccttcttggcacacacagcagccggtctgctccctggaggccagcggggagcccagcacagtggacatgagcatgccagtgagggagcacaccctgctggaggggctgagcgcaccggcccccatgtcctctgcgccaggggaggctgtcctgaggagtccaggagggtgtcctgaggagtccaaggtgagagctgccagcaccggcagggtgacccccctgtcttccctcttcagcctgcctaccttcagcttactcaactggatttcctcctggtcgctggtcagcaggctggggagtgtcttacagttctcccggacggagcagcttgcagatggacaagcgggacgtggacttcctgtccagccccactcaggccgatcaggacttcaagggccagaccacagactacttataggagcatcttcaaggcggtcacagtgaaaaccttgaaatggccttttttaatatatataaataaatgttaatattatttatgtttattatttgcacagaagagttctagggagatgtatttctaaatgtttcccaggctaatacaggaaacaagaggtaccaaaaaagaaagtttattttttaaaattctaagtagagtatattgaaaagaaaaagaagagccttaacatatataaaagtttaaagaagagtaacacttgaaaagtgtgtttagatttattttttcatctcatttttaagaacaagcagtacgatttgttttcttcaacatgtgtgactgcgcactgagtacaaatgtgtgactgctcatggttaatgcaggcaggtgtgaacatgggggaacaatgagcagagatggcagagggcagagcacatggcccccagaggcttccagtctcactgacacaggagggctgggctccacttcatccagatgaaggaaaggaagacctcaagaaaaattcacagttgagtgcatcccagcattctgttccgggcaggcatttcaggaagaccgccttgtaggtattacatccctggtgtcgtattttgcctgttaaatcgtaacaagcaataaacaactttcactttgcaaagacagtgtgtccagttaccactggtgtatgaaatgattaatacctgacctcacagagtatgatctcagggcacttccgtaaggcaagtccttttagaggctatgaagaaaacagctgcatggcacataccaaagctgctgcacagctggccaccatggcaccctgcaccaggccatcagcaccacgtgccaaggagctcagcggtcttcaggcatttttgtaatgagccattagttctgtccctctaaaactagaaaaggaagggcaggaaatgataacaacccaaggcaatgatatggcatgtcatcttccgagcccttctttctactttgtcaaacagttcttagttgctggctctgctcggcaccgggactgtgaagggtgtactccctgctgtgtgggagggacctagggcctctttggatgctgtcttcgaggacagcaatgcagagagggcataggatctgaggacaaggaaattcctcagcatggcgtatcaggaaagcatggctcattctgcaatgagccatgagtgtgggccatcgcaagtcacagaaaatgcacctcattccagtcaagcagaaaaacaggcacaggctcagtgtaggtcccaagagagggtgcctggactcagcaactcagacctgggcttttctcccagctttcagggacagctttgtcctgagtctgcctctgttcacggggatgcttggctggagtcacccccaggacttatccatgcatcactattcagaagacacagagggcccctctctccacattccaaacagagtcctggtttcctcagcctcaccctgcatagcttgcacaacatcctcagaaccattcactggcaaatggaggggaacgtgctgactgggactcccagctggagctgggaggagaggtccacttcccttagaacacctgagctgctgcatgagtggacgtcagaagaatctctatgccctgttaaatggggagacaaaggggtggtgggggcttcagccagtgatttcggaccgaaggtgacagccgtcccaaccctgcccagcctgatgccacctcctctgttcttggaacaacgcataggaaaagaatctcctttggaaggtgacactgctccctgaattaaggtaatggttgcgagcaccaagtacaaggactagacgcatatttacctgcgtatctgagagttccagattcccagcttccagatgatccttgcacagacaacctaccttctttccagaggatgtctttctcctctggagagtagatgcttgctcttgggaaacggaatgaccttggcgctggcttcaggaatatgcatcccacagccagtttagagaaatacatgttgtaaatggcattgacagctgctctttaggatggggagtattatggaaatccacaataacaatctatggcaagcaact

SEQ ID NO: 2783 - DNA, 3493 bp, Homo sapiens
  source 1..3493: mol_type = unassigned DNA
gcggccgcactagtaccccggagcccatgggcgcgccgagccgggcgcgggggcgctgaacggcggagcgggagcggccggaggagccatggactgcagcctcgtgcggacgctcgtgcacagatactgtgcaggagaagagaattgggtggacagcaggaccatctacgtgggacacagggagccacctccgggcgcagaggcctacatcccacagagatacccagacaacaggatcgtctcgtccaagtacacattttggaactttatacccaagaatttatttgaacaattcagaagagtagccaacttttatttccttatcatatttctggtgcagttgattattgatacacccacaagtccagtgacaagcggacttccactcttctttgtcattactgtgacggctatcaaacagggttatgaagactggcttcgacataaagcagacaatgccatgaaccagtgtcctgttcatttcattcagcacggcaagctcgttcggaaacaaagtcgaaagctgcgagttggggacattgtcatggttaaggaggacgagacctttccctgcgacttgatcttcctttccagcaaccggggagatgggacgtgccacgtcaccaccgccagcttggatggagaatccagccataaaacgcattacgcggtccaggacaccaaaggcttccacacagaggaggatatcggcggacttcacgccaccatcgagtgtgagcagccccagcccgacctctacaagttcgtgggtcgcatcaacgtttacagtgacctgaatgaccccgtggtgaggcccttaggatcggaaaacctgctgcttagaggagctacactgaagaacactgagaaaatctttggtgtggctatttacacgggaatggaaaccaagatggcattaaattatcaatcaaaatctcagaagcgatctgccgtggaaaaatcgatgaatgcgttcctcattgtgtatctctgcattctgatcagcaaagccctgataaacactgtgctgaaatacatgtggcagagtgagccctttcgggatgagccgtggtataatcagaaaacggagtcggaaaggcagaggaatctgttcctcaaggcattcacggacttcctggccttcatggtcctctttaactacatcatccctgtgtccatgtacgtcacggtcgagatgcagaagttcctcggctcttacttcatcacctgggacgaagacatgtttgacgaggagactggcgaggggcctctggtgaacacgtcggacctcaatgaagagctgggacaggtggagtacatcttcacagacaagaccggcaccctcacggaaaacaacatggagttcaaggagtgctgcatcgaaggccatgtctacgtgccccacgtcatctgcaacgggcaggtcctcccagagtcgtcaggaatcgacatgattgactcgtcccccagcgtcaacgggagggagcgcgaggagctgtttttccgggccctctgtctctgccacaccgtccaggtgaaagacgatgacagcgtagacggccccaggaaatcgccggacggggggaaatcctgtgtgtacatctcatcctcgcccgacgaggtggcgctggtcgaaggtgtccagagacttggctttacctacctaaggctgaaggacaattacatggagatattaaacagggagaaccacatcgaaaggtttgaattgctggaaattttgagttttgactcagtcagaaggagaatgagtgtaattgtaaaatctgctacaggagaaatttatctgttttgcaaaggagcagattcttcgatattcccccgagtgatagaaggcaaagttgaccagatccgagccagagtggagcgtaacgcagtggaggggctccgaactttgtgtgttgcttataaaaggctgatccaagaagaatatgaaggcatttgtaagctgctgcaggctgccaaagtggcccttcaagatcgagagaaaaagttagcagaagcctatgagcaaatagagaaagatcttactctgcttggtgctacagctgttgaggaccggctgcaggagaaagctgcagacaccatcgaggccctgcagaaggccgggatcaaagtctgggttctcacgggagacaagatggagacggccgcggccacgtgctacgcctgcaagctcttccgcaggaacacgcagctgctggagctgaccaccaagaggatcgaggagcagagcctgcacgacgtcctgttcgagctgagcaagacggtcctgcgccacagcgggagcctgaccagagacaacctgtccggactttcagcagatatgcaggactacggtttaattatcgacggagctgcactgtctctgataatgaagcctcgagaagacgggagttccggcaactacagggagctcttcctggaaatctgccggagctgcagcgcggtgctctgctgccgcatggcgcccttgcagaaggctcagattgttaaattaatcaaattttcaaaagagcacccaatcacgttagcaattggcgatggtgcaaatgatgtcagcatgattctggaagcgcacgtgggcataggtgtcatcggcaaggaaggccgccaggctgccaggaacagcgactatgcaatcccaaagtttaagcatttgaagaagatgctgcttgttcacgggcatttttattacattaggatctctgagctcgtgcagtacttcttctataagaacgtctgcttcatcttccctcagtttttataccagttcttctgtgggttttcacaacagactttgtacgacaccgcgtatctgaccctctacaacatcagcttcacctccctccccatcctcctgtacagcctcatggagcagcatgttggcattgacgtgctcaagagagacccgaccctgtacagggacgtcgccaagaatgccctgctgcgctggcgcgtgttcatctactggacgctcctgggactgtttgacgcactggtgttcttctttggtgcttatttcgtgtttgaaaatacaactgtgacaagcaacgggcagatatttggaaactggacgtttggaacgctggtattcaccgtgatggtgttcacagttacactaaagcttgcattggacacacactactggacttggatcaaccattttgtcatctgggggtcgctgctgttctacgttgtcttttcgcttctctggggaggagtgatctggccgttcctcaactaccagaggatgtactacgtgttcatccagatgctgtccagcgggcccgcctggctggccatcgtgctgctggtgaccatcagcctccttcccgacgtcctcaagaaagtcctgtgccggcagctgtggccaacagcaacagagagagtccagactaagagccagtgcctttctgtcgagcagtcaaccatctttatgctttctcagacttccagcagcctgagtttctga

SEQ ID NO: 2784 - DNA, 8768 bp, Homo sapiens
  source 1..8768: mol_type = unassigned DNA
gcggccgcactagtaccccggagcccatgggcgcgccgagccgggcgcgggggcgctgaacggcggagcgggagcggccggaggagccatggactgcagcctcgtgcggacgctcgtgcacagatactgtgcaggagaagagaattgggtggacagcaggaccatctacgtgggacacagggagccacctccgggcgcagaggcctacatcccacagagatacccagacaacaggatcgtctcgtccaagtacacattttggaactttatacccaagaatttatttgaacaattcagaagagtagccaacttttatttccttatcatatttctggtgcagttgattattgatacacccacaagtccagtgacaagcggacttccactcttctttgtcattactgtgacggctatcaaacagggttatgaagactggcttcgacataaagcagacaatgccatgaaccagtgtcctgttcatttcattcagcacggcaagctcgttcggaaacaaagtcgaaagctgcgagttggggacattgtcatggttaaggaggacgagacctttccctgcgacttgatcttcctttccagcaaccggggagatgggacgtgccacgtcaccaccgccagcttggatggagaatccagccataaaacgcattacgcggtccaggacaccaaaggcttccacacagaggaggatatcggcggacttcacgccaccatcgagtgtgagcagccccagcccgacctctacaagttcgtgggtcgcatcaacgtttacagtgacctgaatgaccccgtggtgaggcccttaggatcggaaaacctgctgcttagaggagctacactgaagaacactgagaaaatctttggtgtggctatttacacgggaatggaaaccaagatggcattaaattatcaatcaaaatctcagaagcgatctgccgtggaaaaatcgatgaatgcgttcctcattgtgtatctctgcattctgatcagcaaagccctgataaacactgtgctgaaatacatgtggcagagtgagccctttcgggatgagccgtggtataatcagaaaacggagtcggaaaggcagaggaatctgttcctcaaggcattcacggacttcctggccttcatggtcctctttaactacatcatccctgtgtccatgtacgtcacggtcgagatgcagaagttcctcggctcttacttcatcacctgggacgaagacatgtttgacgaggagactggcgaggggcctctggtgaacacgtcggacctcaatgaagagctgggacaggtggagtacatcttcacagacaagaccggcaccctcacggaaaacaacatggagttcaaggagtgctgcatcgaaggccatgtctacgtgccccacgtcatctgcaacgggcaggtcctcccagagtcgtcaggaatcgacatgattgactcgtcccccagcgtcaacgggagggagcgcgaggagctgtttttccgggccctctgtctctgccacaccgtccaggtgaaagacgatgacagcgtagacggccccaggaaatcgccggacggggggaaatcctgtgtgtacatctcatcctcgcccgacgaggtggcgctggtcgaaggtgtccagagacttggctttacctacctaaggctgaaggacaattacatggagatattaaacagggagaaccacatcgaaaggtttgaattgctggaaattttgagttttgactcagtcagaaggagaatgagtgtaattgtaaaatctgctacaggagaaatttatctgttttgcaaaggagcagattcttcgatattcccccgagtgatagaaggcaaagttgaccagatccgagccagagtggagcgtaacgcagtggaggggctccgaactttgtgtgttgcttataaaaggctgatccaagaagaatatgaaggcatttgtaagctgctgcaggctgccaaagtggcccttcaagatcgagagaaaaagttagcagaagcctatgagcaaatagagaaagatcttactctgcttggtgctacagctgttgaggaccggctgcaggagaaagctgcagacaccatcgaggccctgcagaaggccgggatcaaagtctgggttctcacgggagacaagatggagacggccgcggccacgtgctacgcctgcaagctcttccgcaggaacacgcagctgctggagctgaccaccaagaggatcgaggagcagagcctgcacgacgtcctgttcgagctgagcaagacggtcctgcgccacagcgggagcctgaccagagacaacctgtccggactttcagcagatatgcaggactacggtttaattatcgacggagctgcactgtctctgataatgaagcctcgagaagacgggagttccggcaactacagggagctcttcctggaaatctgccggagctgcagcgcggtgctctgctgccgcatggcgcccttgcagaaggctcagattgttaaattaatcaaattttcaaaagagcacccaatcacgttagcaattggcgatggtgcaaatgatgtcagcatgattctggaagcgcacgtgggcataggtgtcatcggcaaggaaggccgccaggctgccaggaacagcgactatgcaatcccaaagtttaagcatttgaagaagatgctgcttgttcacgggcatttttattacattaggatctctgagctcgtgcagtacttcttctataagaacgtctgcttcatcttccctcagtttttataccagttcttctgtgggttttcacaacagactttgtacgacaccgcgtatctgaccctctacaacatcagcttcacctccctccccatcctcctgtacagcctcatggagcagcatgttggcattgacgtgctcaagagagacccgaccctgtacagggacgtcgccaagaatgccctgctgcgctggcgcgtgttcatctactggacgctcctgggactgtttgacgcactggtgttcttctttggtgcttatttcgtgtttgaaaatacaactgtgacaagcaacgggcagatatttggaaactggacgtttggaacgctggtattcaccgtgatggtgttcacagttacactaaagcttgcattggacacacactactggacttggatcaaccattttgtcatctgggggtcgctgctgttctacgttgtcttttcgcttctctggggaggagtgatctggccgttcctcaactaccagaggatgtactacgtgttcatccagatgctgtccagcgggcccgcctggctggccatcgtgctgctggtgaccatcagcctccttcccgacgtcctcaagaaagtcctgtgccggcagctgtggccaacagcaacagagagagtccagaatgggtgcgcacagcctcgggaccgcgactcagaattcacccctcttgcctctctgcagagcccaggctaccagagcacctgtccctcggccgcctggtacagctcccactctcagcaggtgacactcgcggcctggaaggagaaggtgtccacggagcccccacccatcctcggcggttcccatcaccactgcagttccatcccaagtcacagctgccctaggtcccgtgtgggaatgctcgtgtgatggatggtcctaagcctgtggagactgtgcacgtgcctcttcctggcccccagcaggcaaggaggggggtcacaggccttgccctcgagcatggcaccctggccgcctggacccagcactgtggttgttgagccacaccagtggcctctgggcattcggctcaacgcaggagggacattctgctggcccaccctgcgcgctgtcatgcagaggccattcccccaggcctgtgtcttcacccacctgccatcattggcctttgctgtcactgggagagaagagccgtccagggacccatggtggcccacatgtggatgccacatgctgctgtttcctgcttgcccggccaccacccatgccctccatagggtgaggtggagccatggtggtgcgtcctttactcaacaaccctccaatccggatgctgtgggaagggccgggtcactcggataccatcatccctgcggatgcaccgccgtaccctgctcatctgggagtggtttccctgcggttacgtccaagcccgcctgccctgtgtgttggggctggctgagtttcggtctccccatcaccggccgcctcgtggagaaggcagtgccacgtgggaggacaaggccacgccggcagcttccagccctgccgcagaagtgccaggatgtccatcagccactcgccagggcacggagccgtcagtccactgttacgggagaatgttgatttcgcgggtgcgagggccgggagacagatacttggctgtgatgagcagacatcctctgtccccgtggaggggtcaacaccaaggtggtgttcgtgcaccagaacctgtctcgggctgacgggggtggcacacaggacacgggtggatcccaacaggcagcaccgcacctctgcccgcctcccgcactgcagctccgcccgccgggctctgcgtccccacgtcccctcgtcccatccccacgtcccctcatcccgtcacctcgtccccacatccccttgccccgtcacctcgtcctcatgtccccttgtcctgtcacctcgtccccacgtcccctcgtctcctcatccccacgtcctctcgtccccttgtcccgtccccacataccctcgtccccatgtccccacgcagggctctccttcgtcttaggatctgtccagcgctgctctgggtgggttagcaaccccagggctgctgtgataggaagtccctgttgttctccgtactggcatttctatttctagaaataatatttgacatagccttaatggtccttaaagaagacatttcagtgtgagattcagacttcagacgctgaaactgctgcctttcaggaaagcaccaccaacgctggaggaggagccggccctcacgcccgccccgcgccacgctgtggaacggggctccggcaagtgaaacccagagggtgtttccgaggtgctcgacagtaggtatttttggaagctcagatttcaccatttgattgtataatcttttacctataaaatatttatttgaagtagagggtaaatcagcggtaagaacagtgaacacagtggttgggataaaataaggtgacaaacatcacaccaaagatgagggtagcgagcaactggcttgagcagacagaacggggaagactccactctgtcccgaggggccagccgcaggcgtccccagggccaccctgccctgaggtccttgtgtggccgccctggcttggcagccctgcccacgctgcccccgcaaacaatggtgtgtgcgtttttacagccctttttaggaacccaatatgggcataaatgtaacacctgtagcgggggcagattctctgtatgttcagttaacaaattatttgtaatgtatttttttagaaatcttaaaattgcctttgcactgaagtattttcatagctgtttatatctcttttattcatttatttaacatactgtctaattttaaaaataggtttttaaagctttcatttttaagtttatgaaattttggccactttacatttagattctggtgagagttttgactgaatgttccaatctctgatgaatgcgaattttcagatttgattttattctctacacacacctcttcttttcttggtatttctggtggcagtgattagttgaacagcacatttaaggcacgataatttgctacactttttctttacaatttgttgcaatttcatctgctttctatgtttcattgttaattgccatccttcagccttaaaaatagaagattctcacgtgaaggtttagtaagttgggtcccagctctgcctgtgtggagatagtcaccatgtacctctgacaacaagttttagtgtgaaagtcactaaacttttacacactcccaaacgtctttttaaaaattgcttgggaaattattaaatgaatgtgcctgatgatttgaaatagacaaggggcacgagataaaaaagaaaaggatgagaagatcctcagtgaatgacgttgcagggtcttcatgcaattttccacctcgcagtagttagtatttacttgccttaaactaactttgaagcaagtaatgtcaactttgagcactttgttgagttttgaaaaatcttatttgttgctgcacaggttaataaattatcaatttgtaattcagcatgttggtcagagacacggtcactgattcacacccagtccctgccacagaccgtctcagacacgcacagtgggcctgctgcatgattcacacccagtccctgccacagaccgtctcagacacgcacagtgggcctgctgcatgattcacacccagtccctgccacagaccgtctcagacacgcacagtgggcctgctgcatgcgtgttacctggcttttggctccacgctcactcatagccatgtccacatgggggcttgcacacaggatcactcacatatgtacatgtacccaccacaaacgtgcaagctcctgcacacatgcatgcacacaaacgtgtacacaagtgtgagctcctacacgcatacacacacacacgtgtacatgcaccaaagcatgtgtgacctacagacatgcagaacatgcacgtgtacacataccacagacacgcgtgtgcatgctcctacacaatacatatgcacatatcatgaacagcgtaagttcctacacacggacgtgtgatacacacatgcatgtacaggtaagcacacatgtacaagctcctacaggcttgctctcacacacgtgtatgcacagcagagagacgtatgagcttctactgcacacatgcacacacacacgcacacgtacattcactacaaacgtgcagcctcctgcacacgtgcacattcatgtgtacaccacaaatgagttcccagacgtgtaaacacacgtgcacacatcgtacacatgtgagctcccacacgtacacacagatgcacatggacacaccccaaacacgcacaggctcctacacacatgcacacacgtgtacaccacaaacgagctcccagacatgtaaacacacgtctcccacacgtgagctcccacacgtacacatgcacatgtacgcaccacaaacacatgcgcaggctcctgcaggcgtgaatacacacatgcacacacatatacacacatgtgccacaaacaagtgcacactgtcctggtgtcctgcactgcatcctgcctccttgctgaggggcccctgtgagaggcctctggatgggcatgggaagatgggctccctggcccccagcccatgcctccctgggatgaagagtccccctcctggcagaatgtctgggctttgcagagcaggccccgggggtgaagtcgcagcttcacttacaccagctgctctgtgagcaaggcttggtgccctggacaaggcccttcccctttagggaggtccagcctcgcaagctgaaacctcccctcggctcagccctataccaggcggccacagcaggactggccacacccacgccgcacctcatccgtgcacgcgtcggagcacggccagccttccgccacgagccagctgggaagggccgcggccgcctaaagccccagtcaacccagcctgtgtctgagcagacagggcgaacaagcaggccacaccgtctcgagggaggaggccagatgcggccagcgtctccaacagggtgaccatccgctcggcttgctgagcgtttaaacaaatgtttagacaggctgtggggactcccctgagttgagccttggccaggggtccggtgctgtcgcgggaaacctccagccttgttcttcaaaccactcagctcatgtgttttgcactgactagtactgaataatacaaccactcttatttaatgttagtattatttatttgacaactcagtgtctaacagcttgatatgcaggtccttgcatcctacatttctttaggaagttacccatttgtaactttaaaaacaggaaaaatatcagttggcaaatgcaatcttttttttttttaagctaaaggtgggtgaactggaatgaaaatctttctgatgttgtgtctataagcagccttgatgggatatgttagaagtgtcatgaaagtgtgattctacttttgcagaaaaatctaaagatcaatttatatagctttattttttactttatcaaagtatacagaattttaatatgcatatattgtgtctgacttaaaattataatgtctgcgtcaccatttaaaatgtctgttcattatgtaatgtaataaaagaaggtcttcaaaaatgtatttaacatgaatggtatccatagttgtcatcatcataaatactggagtttatttttaaattattaaacatagtaggtgcattaacataaatcagtctccacacagtaacatttaactgataattcattaatcagctttgaaaaattaaattgttaattaaaccaatctaacatttcagtaaagtttattttgtatgcttctgtttttaacttttatttctgtagataaactgactggataatattatattggacttttctctagattatctaagcaggagacctgaatctgcttgcaataaagaataaaagtctgcttcagtttctttataaagaaactcacacaa

SEQ ID NO: 2785 - DNA, 8795 bp, Homo sapiens
  source 1..8795: mol_type = unassigned DNA
gcggccgcactagtaccccggagcccatgggcgcgccgagccgggcgcgggggcgctgaacggcggagcgggagcggccggaggagccatggactgcagcctcgtgcggacgctcgtgcacagatactgtgcaggagaagagaattgggtggacagcaggaccatctacgtgggacacagggagccacctccgggcgcagaggcctacatcccacagagatacccagacaacaggatcgtctcgtccaagtacacattttggaactttatacccaagaatttatttgaacaattcagaagagtagccaacttttatttccttatcatatttctggtgcagttgattattgatacacccacaagtccagtgacaagcggacttccactcttctttgtcattactgtgacggctatcaaacagggttatgaagactggcttcgacataaagcagacaatgccatgaaccagtgtcctgttcatttcattcagcacggcaagctcgttcggaaacaaagtcgaaagctgcgagttggggacattgtcatggttaaggaggacgagacctttccctgcgacttgatcttcctttccagcaaccggggagatgggacgtgccacgtcaccaccgccagcttggatggagaatccagccataaaacgcattacgcggtccaggacaccaaaggcttccacacagaggaggatatcggcggacttcacgccaccatcgagtgtgagcagccccagcccgacctctacaagttcgtgggtcgcatcaacgtttacagtgacctgaatgaccccgtggtgaggcccttaggatcggaaaacctgctgcttagaggagctacactgaagaacactgagaaaatctttggtgtggctatttacacgggaatggaaaccaagatggcattaaattatcaatcaaaatctcagaagcgatctgccgtggaaaaatcgatgaatgcgttcctcattgtgtatctctgcattctgatcagcaaagccctgataaacactgtgctgaaatacatgtggcagagtgagccctttcgggatgagccgtggtataatcagaaaacggagtcggaaaggcagaggaatctgttcctcaaggcattcacggacttcctggccttcatggtcctctttaactacatcatccctgtgtccatgtacgtcacggtcgagatgcagaagttcctcggctcttacttcatcacctgggacgaagacatgtttgacgaggagactggcgaggggcctctggtgaacacgtcggacctcaatgaagagctgggacaggtggagtacatcttcacagacaagaccggcaccctcacggaaaacaacatggagttcaaggagtgctgcatcgaaggccatgtctacgtgccccacgtcatctgcaacgggcaggtcctcccagagtcgtcaggaatcgacatgattgactcgtcccccagcgtcaacgggagggagcgcgaggagctgtttttccgggccctctgtctctgccacaccgtccaggtgaaagacgatgacagcgtagacggccccaggaaatcgccggacggggggaaatcctgtgtgtacatctcatcctcgcccgacgaggtggcgctggtcgaaggtgtccagagacttggctttacctacctaaggctgaaggacaattacatggagatattaaacagggagaaccacatcgaaaggtttgaattgctggaaattttgagttttgactcagtcagaaggagaatgagtgtaattgtaaaatctgctacaggagaaatttatctgttttgcaaaggagcagattcttcgatattcccccgagtgatagaaggcaaagttgaccagatccgagccagagtggagcgtaacgcagtggaggggctccgaactttgtgtgttgcttataaaaggctgatccaagaagaatatgaaggcatttgtaagctgctgcaggctgccaaagtggcccttcaagatcgagagaaaaagttagcagaagcctatgagcaaatagagaaagatcttactctgcttggtgctacagctgttgaggaccggctgcaggagaaagctgcagacaccatcgaggccctgcagaaggccgggatcaaagtctgggttctcacgggagacaagatggagacggccgcggccacgtgctacgcctgcaagctcttccgcaggaacacgcagctgctggagctgaccaccaagaggatcgaggagcagagcctgcacgacgtcctgttcgagctgagcaagacggtcctgcgccacagcgggagcctgaccagagacaacctgtccggactttcagcagatatgcaggactacggtttaattatcgacggagctgcactgtctctgataatgaagcctcgagaagacgggagttccggcaactacagggagctcttcctggaaatctgccggagctgcagcgcggtgctctgctgccgcatggcgcccttgcagaaggctcagattgttaaattaatcaaattttcaaaagagcacccaatcacgttagcaattggcgatggtgcaaatgatgtcagcatgattctggaagcgcacgtgggcataggtgtcatcggcaaggaaggccgccaggctgccaggaacagcgactatgcaatcccaaagtttaagcatttgaagaagatgctgcttgttcacgggcatttttattacattaggatctctgagctcgtgcagtacttcttctataagaacgtctgcttcatcttccctcagtttttataccagttcttctgtgggttttcacaacagactttgtacgacaccgcgtatctgaccctctacaacatcagcttcacctccctccccatcctcctgtacagcctcatggagcagcatgttggcattgacgtgctcaagagagacccgaccctgtacagggacgtcgccaagaatgccctgctgcgctggcgcgtgttcatctactggacgctcctgggactgtttgacgcactggtgttcttctttggtgcttatttcgtgtttgaaaatacaactgtgacaagcaacgggcagatatttggaaactggacgtttggaacgctggtattcaccgtgatggtgttcacagttacactaaagcttgcattggacacacactactggacttggatcaaccattttgtcatctgggggtcgctgctgttctacgttgtcttttcgcttctctggggaggagtgatctggccgttcctcaactaccagaggatgtactacgtgttcatccagatgctgtccagcgggcccgcctggctggccatcgtgctgctggtgaccatcagcctccttcccgacgtcctcaagaaagtcctgtgccggcagctgtggccaacagcaacagagagagtccagactaagagccagtgcctttctgtcgagcagtcaaccatctttatgctttctcagacttccagcagcctgagtttctgatggaacaagagcccaggctaccagagcacctgtccctcggccgcctggtacagctcccactctcagcaggtgacactcgcggcctggaaggagaaggtgtccacggagcccccacccatcctcggcggttcccatcaccactgcagttccatcccaagtcacagctgccctaggtcccgtgtgggaatgctcgtgtgatggatggtcctaagcctgtggagactgtgcacgtgcctcttcctggcccccagcaggcaaggaggggggtcacaggccttgccctcgagcatggcaccctggccgcctggacccagcactgtggttgttgagccacaccagtggcctctgggcattcggctcaacgcaggagggacattctgctggcccaccctgcgcgctgtcatgcagaggccattcccccaggcctgtgtcttcacccacctgccatcattggcctttgctgtcactgggagagaagagccgtccagggacccatggtggcccacatgtggatgccacatgctgctgtttcctgcttgcccggccaccacccatgccctccatagggtgaggtggagccatggtggtgcgtcctttactcaacaaccctccaatccggatgctgtgggaagggccgggtcactcggataccatcatccctgcggatgcaccgccgtaccctgctcatctgggagtggtttccctgcggttacgtccaagcccgcctgccctgtgtgttggggctggctgagtttcggtctccccatcaccggccgcctcgtggagaaggcagtgccacgtgggaggacaaggccacgccggcagcttccagccctgccgcagaagtgccaggatgtccatcagccactcgccagggcacggagccgtcagtccactgttacgggagaatgttgatttcgcgggtgcgagggccgggagacagatacttggctgtgatgagcagacatcctctgtccccgtggaggggtcaacaccaaggtggtgttcgtgcaccagaacctgtctcgggctgacgggggtggcacacaggacacgggtggatcccaacaggcagcaccgcacctctgcccgcctcccgcactgcagctccgcccgccgggctctgcgtccccacgtcccctcgtcccatccccacgtcccctcatcccgtcacctcgtccccacatccccttgccccgtcacctcgtcctcatgtccccttgtcctgtcacctcgtccccacgtcccctcgtctcctcatccccacgtcctctcgtccccttgtcccgtccccacataccctcgtccccatgtccccacgcagggctctccttcgtcttaggatctgtccagcgctgctctgggtgggttagcaaccccagggctgctgtgataggaagtccctgttgttctccgtactggcatttctatttctagaaataatatttgacatagccttaatggtccttaaagaagacatttcagtgtgagattcagacttcagacgctgaaactgctgcctttcaggaaagcaccaccaacgctggaggaggagccggccctcacgcccgccccgcgccacgctgtggaacggggctccggcaagtgaaacccagagggtgtttccgaggtgctcgacagtaggtatttttggaagctcagatttcaccatttgattgtataatcttttacctataaaatatttatttgaagtagagggtaaatcagcggtaagaacagtgaacacagtggttgggataaaataaggtgacaaacatcacaccaaagatgagggtagcgagcaactggcttgagcagacagaacggggaagactccactctgtcccgaggggccagccgcaggcgtccccagggccaccctgccctgaggtccttgtgtggccgccctggcttggcagccctgcccacgctgcccccgcaaacaatggtgtgtgcgtttttacagccctttttaggaacccaatatgggcataaatgtaacacctgtagcgggggcagattctctgtatgttcagttaacaaattatttgtaatgtatttttttagaaatcttaaaattgcctttgcactgaagtattttcatagctgtttatatctcttttattcatttatttaacatactgtctaattttaaaaataggtttttaaagctttcatttttaagtttatgaaattttggccactttacatttagattctggtgagagttttgactgaatgttccaatctctgatgaatgcgaattttcagatttgattttattctctacacacacctcttcttttcttggtatttctggtggcagtgattagttgaacagcacatttaaggcacgataatttgctacactttttctttacaatttgttgcaatttcatctgctttctatgtttcattgttaattgccatccttcagccttaaaaatagaagattctcacgtgaaggtttagtaagttgggtcccagctctgcctgtgtggagatagtcaccatgtacctctgacaacaagttttagtgtgaaagtcactaaacttttacacactcccaaacgtctttttaaaaattgcttgggaaattattaaatgaatgtgcctgatgatttgaaatagacaaggggcacgagataaaaaagaaaaggatgagaagatcctcagtgaatgacgttgcagggtcttcatgcaattttccacctcgcagtagttagtatttacttgccttaaactaactttgaagcaagtaatgtcaactttgagcactttgttgagttttgaaaaatcttatttgttgctgcacaggttaataaattatcaatttgtaattcagcatgttggtcagagacacggtcactgattcacacccagtccctgccacagaccgtctcagacacgcacagtgggcctgctgcatgattcacacccagtccctgccacagaccgtctcagacacgcacagtgggcctgctgcatgattcacacccagtccctgccacagaccgtctcagacacgcacagtgggcctgctgcatgcgtgttacctggcttttggctccacgctcactcatagccatgtccacatgggggcttgcacacaggatcactcacatatgtacatgtacccaccacaaacgtgcaagctcctgcacacatgcatgcacacaaacgtgtacacaagtgtgagctcctacacgcatacacacacacacgtgtacatgcaccaaagcatgtgtgacctacagacatgcagaacatgcacgtgtacacataccacagacacgcgtgtgcatgctcctacacaatacatatgcacatatcatgaacagcgtaagttcctacacacggacgtgtgatacacacatgcatgtacaggtaagcacacatgtacaagctcctacaggcttgctctcacacacgtgtatgcacagcagagagacgtatgagcttctactgcacacatgcacacacacacgcacacgtacattcactacaaacgtgcagcctcctgcacacgtgcacattcatgtgtacaccacaaatgagttcccagacgtgtaaacacacgtgcacacatcgtacacatgtgagctcccacacgtacacacagatgcacatggacacaccccaaacacgcacaggctcctacacacatgcacacacgtgtacaccacaaacgagctcccagacatgtaaacacacgtctcccacacgtgagctcccacacgtacacatgcacatgtacgcaccacaaacacatgcgcaggctcctgcaggcgtgaatacacacatgcacacacatatacacacatgtgccacaaacaagtgcacactgtcctggtgtcctgcactgcatcctgcctccttgctgaggggcccctgtgagaggcctctggatgggcatgggaagatgggctccctggcccccagcccatgcctccctgggatgaagagtccccctcctggcagaatgtctgggctttgcagagcaggccccgggggtgaagtcgcagcttcacttacaccagctgctctgtgagcaaggcttggtgccctggacaaggcccttcccctttagggaggtccagcctcgcaagctgaaacctcccctcggctcagccctataccaggcggccacagcaggactggccacacccacgccgcacctcatccgtgcacgcgtcggagcacggccagccttccgccacgagccagctgggaagggccgcggccgcctaaagccccagtcaacccagcctgtgtctgagcagacagggcgaacaagcaggccacaccgtctcgagggaggaggccagatgcggccagcgtctccaacagggtgaccatccgctcggcttgctgagcgtttaaacaaatgtttagacaggctgtggggactcccctgagttgagccttggccaggggtccggtgctgtcgcgggaaacctccagccttgttcttcaaaccactcagctcatgtgttttgcactgactagtactgaataatacaaccactcttatttaatgttagtattatttatttgacaactcagtgtctaacagcttgatatgcaggtccttgcatcctacatttctttaggaagttacccatttgtaactttaaaaacaggaaaaatatcagttggcaaatgcaatcttttttttttttaagctaaaggtgggtgaactggaatgaaaatctttctgatgttgtgtctataagcagccttgatgggatatgttagaagtgtcatgaaagtgtgattctacttttgcagaaaaatctaaagatcaatttatatagctttattttttactttatcaaagtatacagaattttaatatgcatatattgtgtctgacttaaaattataatgtctgcgtcaccatttaaaatgtctgttcattatgtaatgtaataaaagaaggtcttcaaaaatgtatttaacatgaatggtatccatagttgtcatcatcataaatactggagtttatttttaaattattaaacatagtaggtgcattaacataaatcagtctccacacagtaacatttaactgataattcattaatcagctttgaaaaattaaattgttaattaaaccaatctaacatttcagtaaagtttattttgtatgcttctgtttttaacttttatttctgtagataaactgactggataatattatattggacttttctctagattatctaagcaggagacctgaatctgcttgcaataaagaataaaagtctgcttcagtttctttataaagaaactcacacaa

SEQ ID NO: 2786 - DNA, 3163 bp, Homo sapiens
  source 1..3163: mol_type = unassigned DNA
tctacgtgggacacagggagccacctccgggcgcagaggcctacatcccacagagatacccagacaacaggatcgtctcgtccaagtacacattttggaactttatacccaagaatttatttgaacaattcagaagagtagccaacttttatttccttatcatatttctggtgcagttgattattgatacacccacaagtccagtgacaagcggacttccactcttctttgtcattactgtgacggctatcaaacagggttatgaagactggcttcgacataaagcagacaatgccatgaaccagtgtcctgttcatttcattcagcacggcaagctcgttcggaaacaaagtcgaaagctgcgagttggggacattgtcatggttaaggaggacgagacctttccctgcgacttgatcttcctttccagcaaccggggagatgggacgtgccacgtcaccaccgccagcttggatggagaatccagccataaaacgcattacgcggtccaggacaccaaaggcttccacacagaggaggatatcggcggacttcacgccaccatcgagtgtgagcagccccagcccgacctctacaagttcgtgggtcgcatcaacgtttacagtgacctgaatgaccccgtggtgaggcccttaggatcggaaaacctgctgcttagaggagctacactgaagaacactgagaaaatctttggtgtggctatttacacgggaatggaaaccaagatggcattaaattatcaatcaaaatctcagaagcgatctgccgtggaaaaatcgatgaatgcgttcctcattgtgtatctctgcattctgatcagcaaagccctgataaacactgtgctgaaatacatgtggcagagtgagccctttcgggatgagccgtggtataatcagaaaacggagtcggaaaggcagaggaatctgttcctcaaggcattcacggacttcctggccttcatggtcctctttaactacatcatccctgtgtccatgtacgtcacggtcgagatgcagaagttcctcggctcttacttcatcacctgggacgaagacatgtttgacgaggagactggcgaggggcctctggtgaacacgtcggacctcaatgaagagctgggacaggtggagtacatcttcacagacaagaccggcaccctcacggaaaacaacatggagttcaaggagtgctgcatcgaaggccatgtctacgtgccccacgtcatctgcaacgggcaggtcctcccagagtcgtcaggaatcgacatgattgactcgtcccccagcgtcaacgggagggagcgcgaggagctgtttttccgggccctctgtctctgccacaccgtccaggtgaaagacgatgacagcgtagacggccccaggaaatcgccggacggggggaaatcctgtgtgtacatctcatcctcgcccgacgaggtggcgctggtcgaaggtgtccagagacttggctttacctacctaaggctgaaggacaattacatggagatattaaacagggagaaccacatcgaaaggtttgaattgctggaaattttgagttttgactcagtcagaaggagaatgagtgtaattgtaaaatctgctacaggagaaatttatctgttttgcaaaggagcagattcttcgatattcccccgagtgatagaaggcaaagttgaccagatccgagccagagtggagcgtaacgcagtggaggggctccgaactttgtgtgttgcttataaaaggctgatccaagaagaatatgaaggcatttgtaagctgctgcaggctgccaaagtggcccttcaagatcgagagaaaaagttagcagaagcctatgagcaaatagagaaagatcttactctgcttggtgctacagctgttgaggaccggctgcaggagaaagctgcagacaccatcgaggccctgcagaaggccgggatcaaagtctgggttctcacgggagacaagatggagacggccgcggccacgtgctacgcctgcaagctcttccgcaggaacacgcagctgctggagctgaccaccaagaggatcgaggagcagagcctgcacgacgtcctgttcgagctgagcaagacggtcctgcgccacagcgggagcctgaccagagacaacctgtccggactttcagcagatatgcaggactacggtttaattatcgacggagctgcactgtctctgataatgaagcctcgagaagacgggagttccggcaactacagggagctcttcctggaaatctgccggagctgcagcgcggtgctctgctgccgcatggcgcccttgcagaaggctcagattgttaaattaatcaaattttcaaaagagcacccaatcacgttagcaattggcgatggtgcaaatgatgtcagcatgattctggaagcgcacgtgggcataggtgtcatcggcaaggaaggccgccaggctgccaggaacagcgactatgcaatcccaaagtttaagcatttgaagaagatgctgcttgttcacgggcatttttattacattaggatctctgagctcgtgcagtacttcttctataagaacgtctgcttcatcttccctcagtttttataccagttcttctgtgggttttcacaacagactttgtacgacaccgcgtatctgaccctctacaacatcagcttcacctccctccccatcctcctgtacagcctcatggagcagcatgttggcattgacgtgctcaagagagacccgaccctgtacaggtaccatcctccaaacagcctctcctgagagcagagagagtaactaggcagcactctggcagttccttccaatagccacctggcagacctcagttgagggccagaagcattcggcatctgctgatattcttgcttgatcaggagcttgtttaaactggaagcaacatagctcaaatggagattcttcaagtcttgctggatggtttatgctgcatttggaacatctgtgtggagccagtttgcactttcctgtgctttctgacagtcctgagggagctggggtacaagcgtcttcctcgttgtgaccctagggaatctgtggcctaagttatcctttaaaaccatgtgtgttccattcagtgagaaaaaacaaaaattaacagc

SEQ ID NO: 2787 - DNA, 2720 bp, Homo sapiens
  source 1..2720: mol_type = unassigned DNA
tctacgtgggacacagggagccacctccgggcgcagaggcctacatcccacagagatacccagacaacaggatcgtctcgtccaagtacacattttggaactttatacccaagaatttatttgaacaattcagaagagtagccaacttttatttccttatcatatttctggtgcagttgattattgatacacccacaagtccagtgacaagcggacttccactcttctttgtcattactgtgacggctatcaaacagggttatgaagactggcttcgacataaagcagacaatgccatgaaccagtgtcctgttcatttcattcagcacggcaagctcgttcggaaacaaagtcgaaagctgcgagttggggacattgtcatggttaaggaggacgagacctttccctgcgacttgatcttcctttccagcaaccggggagatgggacgtgccacgtcaccaccgccagcttggatggagaatccagccataaaacgcattacgcggtccaggacaccaaaggcttccacacagaggaggatatcggcggacttcacgccaccatcgagtgtgagcagccccagcccgacctctacaagttcgtgggtcgcatcaacgtttacagtgacctgaatgaccccgtggtgaggcccttaggatcggaaaacctgctgcttagaggagctacactgaagaacactgagaaaatctttggtgtggctatttacacgggaatggaaaccaagatggcattaaattatcaatcaaaatctcagaagcgatctgccgtggaaaaatcgatgaatgcgttcctcattgtgtatctctgcattctgatcagcaaagccctgataaacactgtgctgaaatacatgtggcagagtgagccctttcgggatgagccgtggtataatcagaaaacggagtcggaaaggcagaggaatctgttcctcaaggcattcacggacttcctggccttcatggtcctctttaactacatcatccctgtgtccatgtacgtcacggtcgagatgcagaagttcctcggctcttacttcatcacctgggacgaagacatgtttgacgaggagactggcgaggggcctctggtgaacacgtcggacctcaatgaagagctgggacaggtggagtacatcttcacagacaagaccggcaccctcacggaaaacaacatggagttcaaggagtgctgcatcgaaggccatgtctacgtgccccacgtcatctgcaacgggcaggtcctcccagagtcgtcaggaatcgacatgattgactcgtcccccagcgtcaacgggagggagcgcgaggagctgtttttccgggccctctgtctctgccacaccgtccaggtgaaagacgatgacagcgtagacggccccaggaaatcgccggacggggggaaatcctgtgtgtacatctcatcctcgcccgacgaggtggcgctggtcgaaggtgtccagagacttggctttacctacctaaggctgaaggacaattacatggagatattaaacagggagaaccacatcgaaaggtttgaattgctggaaattttgagttttgactcagtcagaaggagaatgagtgtaattgtaaaatctgctacaggagaaatttatctgttttgcaaaggagcagattcttcgatattcccccgagtgatagaaggcaaagttgaccagatccgagccagagtggagcgtaacgcagtggaggggctccgaactttgtgtgttgcttataaaaggctgatccaagaagaatatgaaggcatttgtaagctgctgcaggctgccaaagtggcccttcaagatcgagagaaaaagttagcagaagcctatgagcaaatagagaaagatcttactctgcttggtgctacagctgttgaggaccggctgcaggagaaagctgcagacaccatcgaggccctgcagaaggccgggatcaaagtctgggttctcacgggagacaagatggagacggccgcggccacgtgctacgcctgcaagctcttccgcaggaacacgcagctgctggagctgaccaccaagaggatcgaggagcagagcctgcacgacgtcctgttcgagctgagcaagacggtcctgcgccacagcgggagcctgaccagagacaacctgtccggactttcagcagatatgcaggactacggtttaattatcgacggagctgcactgtctctgataatgaagcctcgagaagacgggagttccggcaactacagggagctcttcctggaaatctgccggagctgcagcgcggtgctctgctgccgcatggcgcccttgcagaaggctcagattgttaaattaatcaaattttcaaaagagcacccaatcacgttagcaattggcgatggtgcaaatgatgtcagcatgattctggaagcgcacgtgggcataggtgtcatcggcaaggaaggccgccaggctgccaggaacagcgactatgcaatcccaaagtttaagcatttgaagaagatgctgcttgttcacgggcatttttattacattaggatctctgagctcgtgcagtacttcttctataagaacgtctgcttcatcttccctcagtttttataccagttcttctgtgggttttcacaacagggacgtcgccaagaatgccctgctgcgctggcgcgtgttcatctactggacgctcctgggactgtttga

SEQ ID NO: 2788 - DNA, 5786 bp, Homo sapiens
  source 1..5786: mol_type = unassigned DNA
cttcgatattcccccgagtgatagaaggcaaagttgaccagatccgagccagagtggagcgtaacgcagtggaggggctccgaactttgtgtgttgcttataaaaggctgatccaagaagaatatgaaggcatttgtaagctgctgcaggctgccaaagtggcccttcaagatcgagagaaaaagttagcagaagcctatgagcaaatagagaaagatcttactctgcttggtgctacagctgttgaggaccggctgcaggagaaagctgcagacaccatcgaggccctgcagaaggccgggatcaaagtctgggttctcacgggagacaagatggagacggccgcggccacgtgctacgcctgcaagctcttccgcaggaacacgcagctgctggagctgaccaccaagaggatcgaggagcagagcctgcacgacgtcctgttcgagctgagcaagacggtcctgcgccacagcgggagcctgaccagagacaacctgtccggactttcagcagatatgcaggactacggtttaattatcgacggagctgcactgtctctgataatgaagcctcgagaagacgggagttccggcaactacagggagctcttcctggaaatctgccggagctgcagcgcggtgctctgctgccgcatggcgcccttgcagaaggctcagattgttaaattaatcaaattttcaaaagagcacccaatcacgttagcaattggcgatggtgcaaatgatgtcagcatgattctggaagcgcacgtgggcataggtgtcatcggcaaggaaggccgccaggctgccaggaacagcgactatgcaatcccaaagtttaagcatttgaagaagatgctgcttgttcacgggcatttttattacattaggatctctgagctcgtgcagtacttcttctataagaacgtctgcttcatcttccctcagtttttataccagttcttctgtgggttttcacaacagggacgtcgccaagaatgccctgctgcgctggcgcgtgttcatctactggacgctcctgggactgtttgacgcactggtgttcttctttggtgcttatttcgtgtttgaaaatacaactgtgacaagcaacgggcagatatttggaaactggacgtttggaacgctggtattcaccgtgatggtgttcacagttacactaaagcttgcattggacacacactactggacttggatcaaccattttgtcatctgggggtcgctgctgttctacgttgtcttttcgcttctctggggaggagtgatctggccgttcctcaactaccagaggatgtactacgtgttcatccagatgctgtccagcgggcccgcctggctggccatcgtgctgctggtgaccatcagcctccttcccgacgtcctcaagaaagtcctgtgccggcagctgtggccaacagcaacagagagagtccagactaagagccagtgcctttctgtcgagcagtcaaccatctttatgctttctcagacttccagcagcctgagtttctgatggaacaagagcccaggctaccagagcacctgtccctcggccgcctggtacagctcccactctcagcaggtgacactcgcggcctggaaggagaaggtgtccacggagcccccacccatcctcggcggttcccatcaccactgcagttccatcccaagtcacagctgccctaggtcccgtgtgggaatgctcgtgtgatggatggtcctaagcctgtggagactgtgcacgtgcctcttcctggcccccagcaggcaaggaggggggtcacaggccttgccctcgagcatggcaccctggccgcctggacccagcactgtggttgttgagccacaccagtggcctctgggcattcggctcaacgcaggagggacattctgctggcccaccctgcgcgctgtcatgcagaggccattcccccaggcctgtgtcttcacccacctgccatcattggcctttgctgtcactgggagagaagagccgtccagggacccatggtggcccacatgtggatgccacatgctgctgtttcctgcttgcccggccaccacccatgccctccatagggtgaggtggagccatggtggtgcgtcctttactcaacaaccctccaatccggatgctgtgggaagggccgggtcactcggataccatcatccctgcggatgcaccgccgtaccctgctcatctgggagtggtttccctgcggttacgtccaagcccgcctgccctgtgtgttggggctggctgagtttcggtctccccatcaccggccgcctcgtggagaaggcagtgccacgtgggaggacaaggccacgccggcagcttccagccctgccgcagaagtgccaggatgtccatcagccactcgccagggcacggagccgtcagtccactgttacgggagaatgttgatttcgcgggtgcgagggccgggagacagatacttggctgtgatgagcagacatcctctgtccccgtggaggggtcaacaccaaggtggtgttcgtgcaccagaacctgtctcgggctgacgggggtggcacacaggacacgggtggatcccaacaggcagcaccgcacctctgcccgcctcccgcactgcagctccgcccgccgggctctgcgtccccacgtcccctcgtcccatccccacgtcccctcatcccgtcacctcgtccccacatccccttgccccgtcacctcgtcctcatgtccccttgtcctgtcacctcgtccccacgtcccctcgtctcctcatccccacgtcctctcgtccccttgtcccgtccccacataccctcgtccccatgtccccacgcagggctctccttcgtcttaggatctgtccagcgctgctctgggtgggttagcaaccccagggctgctgtgataggaagtccctgttgttctccgtactggcatttctatttctagaaataatatttgacatagccttaatggtccttaaagaagacatttcagtgtgagattcagacttcagacgctgaaactgctgcctttcaggaaagcaccaccaacgctggaggaggagccggccctcacgcccgccccgcgccacgctgtggaacggggctccggcaagtgaaacccagagggtgtttccgaggtgctcgacagtaggtatttttggaagctcagatttcaccatttgattgtataatcttttacctataaaatatttatttgaagtagagggtaaatcagcggtaagaacagtgaacacagtggttgggataaaataaggtgacaaacatcacaccaaagatgagggtagcgagcaactggcttgagcagacagaacggggaagactccactctgtcccgaggggccagccgcaggcgtccccagggccaccctgccctgaggtccttgtgtggccgccctggcttggcagccctgcccacgctgcccccgcaaacaatggtgtgtgcgtttttacagccctttttaggaacccaatatgggcataaatgtaacacctgtagcgggggcagattctctgtatgttcagttaacaaattatttgtaatgtatttttttagaaatcttaaaattgcctttgcactgaagtattttcatagctgtttatatctcttttattcatttatttaacatactgtctaattttaaaaataggtttttaaagctttcatttttaagtttatgaaattttggccactttacatttagattctggtgagagttttgactgaatgttccaatctctgatgaatgcgaattttcagatttgattttattctctacacacacctcttcttttcttggtatttctggtggcagtgattagttgaacagcacatttaaggcacgataatttgctacactttttctttacaatttgttgcaatttcatctgctttctatgtttcattgttaattgccatccttcagccttaaaaatagaagattctcacgtgaaggtttagtaagttgggtcccagctctgcctgtgtggagatagtcaccatgtacctctgacaacaagttttagtgtgaaagtcactaaacttttacacactcccaaacgtctttttaaaaattgcttgggaaattattaaatgaatgtgcctgatgatttgaaatagacaaggggcacgagataaaaaagaaaaggatgagaagatcctcagtgaatgacgttgcagggtcttcatgcaattttccacctcgcagtagttagtatttacttgccttaaactaactttgaagcaagtaatgtcaactttgagcactttgttgagttttgaaaaatcttatttgttgctgcacaggttaataaattatcaatttgtaattcagcatgttggtcagagacacggtcactgattcacacccagtccctgccacagaccgtctcagacacgcacagtgggcctgctgcatgattcacacccagtccctgccacagaccgtctcagacacgcacagtgggcctgctgcatgattcacacccagtccctgccacagaccgtctcagacacgcacagtgggcctgctgcatgcgtgttacctggcttttggctccacgctcactcatagccatgtccacatgggggcttgcacacaggatcactcacatatgtacatgtacccaccacaaacgtgcaagctcctgcacacatgcatgcacacaaacgtgtacacaagtgtgagctcctacacgcatacacacacacacgtgtacatgcaccaaagcatgtgtgacctacagacatgcagaacatgcacgtgtacacataccacagacacgcgtgtgcatgctcctacacaatacatatgcacatatcatgaacagcgtaagttcctacacacggacgtgtgatacacacatgcatgtacaggtaagcacacatgtacaagctcctacaggcttgctctcacacacgtgtatgcacagcagagagacgtatgagcttctactgcacacatgcacacacacacgcacacgtacattcactacaaacgtgcagcctcctgcacacgtgcacattcatgtgtacaccacaaatgagttcccagacgtgtaaacacacgtgcacacatcgtacacatgtgagctcccacacgtacacacagatgcacatggacacaccccaaacacgcacaggctcctacacacatgcacacacgtgtacaccacaaacgagctcccagacatgtaaacacacgtctcccacacgtgagctcccacacgtacacatgcacatgtacgcaccacaaacacatgcgcaggctcctgcaggcgtgaatacacacatgcacacacatatacacacatgtgccacaaacaagtgcacactgtcctggtgtcctgcactgcatcctgcctccttgctgaggggcccctgtgagaggcctctggatgggcatgggaagatgggctccctggcccccagcccatgcctccctgggatgaagagtccccctcctggcagaatgtctgggctttgcagagcaggccccgggggtgaagtcgcagcttcacttacaccagctgctctgtgagcaaggcttggtgccctggacaaggcccttcccctttagggaggtccagcctcgcaagctgaaacctcccctcggctcagccctataccaggcggccacagcaggactggccacacccacgccgcacctcatccgtgcacgcgtcggagcacggccagccttccgccacgagccagctgggaagggccgcggccgc

SEQ ID NO: 2789 - DNA, 8858 bp, Homo sapiens
  source 1..8858: mol_type = unassigned DNA
gcggccgcactagtaccccggagcccatgggcgcgccgagccgggcgcgggggcgctgaacggcggagcgggagcggccggaggagccatggactgcagcctcgtgcggacgctcgtgcacagatactgtgcaggagaagagaattgggtggacagcaggaccatctacgtgggacacagggagccacctccgggcgcagaggcctacatcccacagagatacccagacaacaggatcgtctcgtccaagtacacattttggaactttatacccaagaatttatttgaacaattcagaagagtagccaacttttatttccttatcatatttctggtgcagttgattattgatacacccacaagtccagtgacaagcggacttccactcttctttgtcattactgtgacggctatcaaacagggttatgaagactggcttcgacataaagcagacaatgccatgaaccagtgtcctgttcatttcattcagcacggcaagctcgttcggaaacaaagtcgaaagctgcgagttggggacattgtcatggttaaggaggacgagacctttccctgcgacttgatcttcctttccagcaaccggggagatgggacgtgccacgtcaccaccgccagcttggatggagaatccagccataaaacgcattacgcggtccaggacaccaaaggcttccacacagaggaggatatcggcggacttcacgccaccatcgagtgtgagcagccccagcccgacctctacaagttcgtgggtcgcatcaacgtttacagtgacctgaatgaccccgtggtgaggcccttaggatcggaaaacctgctgcttagaggagctacactgaagaacactgagaaaatctttggtgtggctatttacacgggaatggaaaccaagatggcattaaattatcaatcaaaatctcagaagcgatctgccgtggaaaaatcgatgaatgcgttcctcattgtgtatctctgcattctgatcagcaaagccctgataaacactgtgctgaaatacatgtggcagagtgagccctttcgggatgagccgtggtataatcagaaaacggagtcggaaaggcagaggaatctgttcctcaaggcattcacggacttcctggccttcatggtcctctttaactacatcatccctgtgtccatgtacgtcacggtcgagatgcagaagttcctcggctcttacttcatcacctgggacgaagacatgtttgacgaggagactggcgaggggcctctggtgaacacgtcggacctcaatgaagagctgggacaggtggagtacatcttcacagacaagaccggcaccctcacggaaaacaacatggagttcaaggagtgctgcatcgaaggccatgtctacgtgccccacgtcatctgcaacgggcaggtcctcccagagtcgtcaggaatcgacatgattgactcgtcccccagcgtcaacgggagggagcgcgaggagctgtttttccgggccctctgtctctgccacaccgtccaggtgaaagacgatgacagcgtagacggccccaggaaatcgccggacggggggaaatcctgtgtgtacatctcatcctcgcccgacgaggtggcgctggtcgaaggtgtccagagacttggctttacctacctaaggctgaaggacaattacatggagatattaaacagggagaaccacatcgaaaggtttgaattgctggaaattttgagttttgactcagtcagaaggagaatgagtgtaattgtaaaatctgctacaggagaaatttatctgttttgcaaaggagcagattcttcgatattcccccgagtgatagaaggcaaagttgaccagatccgagccagagtggagcgtaacgcagtggaggggctccgaactttgtgtgttgcttataaaaggctgatccaagaagaatatgaaggcatttgtaagctgctgcaggctgccaaagtggcccttcaagatcgagagaaaaagttagcagaagcctatgagcaaatagagaaagatcttactctgcttggtgctacagctgttgaggaccggctgcaggagaaagctgcagacaccatcgaggccctgcagaaggccgggatcaaagtctgggttctcacgggagacaagatggagacggccgcggccacgtgctacgcctgcaagctcttccgcaggaacacgcagctgctggagctgaccaccaagaggatcgaggagcagagcctgcacgacgtcctgttcgagctgagcaagacggtcctgcgccacagcgggagcctgaccagagacaacctgtccggactttcagcagatatgcaggactacggtttaattatcgacggagctgcactgtctctgataatgaagcctcgagaagacgggagttccggcaactacagggagctcttcctggaaatctgccggagctgcagcgcggtgctctgctgccgcatggcgcccttgcagaaggctcagattgttaaattaatcaaattttcaaaagagcacccaatcacgttagcaattggcgatggtgcaaatgatgtcagcatgattctggaagcgcacgtgggcataggtgtcatcggcaaggaaggccgccaggctgccaggaacagcgactatgcaatcccaaagtttaagcatttgaagaagatgctgcttgttcacgggcatttttattacattaggatctctgagctcgtgcagtacttcttctataagaacgtctgcttcatcttccctcagtttttataccagttcttctgtgggttttcacaacagactttgtacgacaccgcgtatctgaccctctacaacatcagcttcacctccctccccatcctcctgtacagcctcatggagcagcatgttggcattgacgtgctcaagagagacccgaccctgtacagggacgtcgccaagaatgccctgctgcgctggcgcgtgttcatctactggacgctcctgggactgtttgacgcactggtgttcttctttggtgcttatttcgtgtttgaaaatacaactgtgacaagcaacgggcagatatttggaaactggacgtttggaacgctggtattcaccgtgatggtgttcacagttacactaaagcttgcattggacacacactactggacttggatcaaccattttgtcatctgggggtcgctgctgttctacgttgtcttttcgcttctctggggaggagtgatctggccgttcctcaactaccagaggatgtactacgtgttcatccagatgctgtccagcgggcccgcctggctggccatcgtgctgctggtgaccatcagcctccttcccgacgtcctcaagaaagtcctgtgccggcagctgtggccaacagcaacagagagagtccagactaagagccagtgcctttctgtcgagcagtcaaccatctttatgctttctcagacttccagcagcctgagtttctgatggaacaagcagaatgggtgcgcacagcctcgggaccgcgactcagaattcacccctcttgcctctctgcagagcccaggctaccagagcacctgtccctcggccgcctggtacagctcccactctcagcaggtgacactcgcggcctggaaggagaaggtgtccacggagcccccacccatcctcggcggttcccatcaccactgcagttccatcccaagtcacagctgccctaggtcccgtgtgggaatgctcgtgtgatggatggtcctaagcctgtggagactgtgcacgtgcctcttcctggcccccagcaggcaaggaggggggtcacaggccttgccctcgagcatggcaccctggccgcctggacccagcactgtggttgttgagccacaccagtggcctctgggcattcggctcaacgcaggagggacattctgctggcccaccctgcgcgctgtcatgcagaggccattcccccaggcctgtgtcttcacccacctgccatcattggcctttgctgtcactgggagagaagagccgtccagggacccatggtggcccacatgtggatgccacatgctgctgtttcctgcttgcccggccaccacccatgccctccatagggtgaggtggagccatggtggtgcgtcctttactcaacaaccctccaatccggatgctgtgggaagggccgggtcactcggataccatcatccctgcggatgcaccgccgtaccctgctcatctgggagtggtttccctgcggttacgtccaagcccgcctgccctgtgtgttggggctggctgagtttcggtctccccatcaccggccgcctcgtggagaaggcagtgccacgtgggaggacaaggccacgccggcagcttccagccctgccgcagaagtgccaggatgtccatcagccactcgccagggcacggagccgtcagtccactgttacgggagaatgttgatttcgcgggtgcgagggccgggagacagatacttggctgtgatgagcagacatcctctgtccccgtggaggggtcaacaccaaggtggtgttcgtgcaccagaacctgtctcgggctgacgggggtggcacacaggacacgggtggatcccaacaggcagcaccgcacctctgcccgcctcccgcactgcagctccgcccgccgggctctgcgtccccacgtcccctcgtcccatccccacgtcccctcatcccgtcacctcgtccccacatccccttgccccgtcacctcgtcctcatgtccccttgtcctgtcacctcgtccccacgtcccctcgtctcctcatccccacgtcctctcgtccccttgtcccgtccccacataccctcgtccccatgtccccacgcagggctctccttcgtcttaggatctgtccagcgctgctctgggtgggttagcaaccccagggctgctgtgataggaagtccctgttgttctccgtactggcatttctatttctagaaataatatttgacatagccttaatggtccttaaagaagacatttcagtgtgagattcagacttcagacgctgaaactgctgcctttcaggaaagcaccaccaacgctggaggaggagccggccctcacgcccgccccgcgccacgctgtggaacggggctccggcaagtgaaacccagagggtgtttccgaggtgctcgacagtaggtatttttggaagctcagatttcaccatttgattgtataatcttttacctataaaatatttatttgaagtagagggtaaatcagcggtaagaacagtgaacacagtggttgggataaaataaggtgacaaacatcacaccaaagatgagggtagcgagcaactggcttgagcagacagaacggggaagactccactctgtcccgaggggccagccgcaggcgtccccagggccaccctgccctgaggtccttgtgtggccgccctggcttggcagccctgcccacgctgcccccgcaaacaatggtgtgtgcgtttttacagccctttttaggaacccaatatgggcataaatgtaacacctgtagcgggggcagattctctgtatgttcagttaacaaattatttgtaatgtatttttttagaaatcttaaaattgcctttgcactgaagtattttcatagctgtttatatctcttttattcatttatttaacatactgtctaattttaaaaataggtttttaaagctttcatttttaagtttatgaaattttggccactttacatttagattctggtgagagttttgactgaatgttccaatctctgatgaatgcgaattttcagatttgattttattctctacacacacctcttcttttcttggtatttctggtggcagtgattagttgaacagcacatttaaggcacgataatttgctacactttttctttacaatttgttgcaatttcatctgctttctatgtttcattgttaattgccatccttcagccttaaaaatagaagattctcacgtgaaggtttagtaagttgggtcccagctctgcctgtgtggagatagtcaccatgtacctctgacaacaagttttagtgtgaaagtcactaaacttttacacactcccaaacgtctttttaaaaattgcttgggaaattattaaatgaatgtgcctgatgatttgaaatagacaaggggcacgagataaaaaagaaaaggatgagaagatcctcagtgaatgacgttgcagggtcttcatgcaattttccacctcgcagtagttagtatttacttgccttaaactaactttgaagcaagtaatgtcaactttgagcactttgttgagttttgaaaaatcttatttgttgctgcacaggttaataaattatcaatttgtaattcagcatgttggtcagagacacggtcactgattcacacccagtccctgccacagaccgtctcagacacgcacagtgggcctgctgcatgattcacacccagtccctgccacagaccgtctcagacacgcacagtgggcctgctgcatgattcacacccagtccctgccacagaccgtctcagacacgcacagtgggcctgctgcatgcgtgttacctggcttttggctccacgctcactcatagccatgtccacatgggggcttgcacacaggatcactcacatatgtacatgtacccaccacaaacgtgcaagctcctgcacacatgcatgcacacaaacgtgtacacaagtgtgagctcctacacgcatacacacacacacgtgtacatgcaccaaagcatgtgtgacctacagacatgcagaacatgcacgtgtacacataccacagacacgcgtgtgcatgctcctacacaatacatatgcacatatcatgaacagcgtaagttcctacacacggacgtgtgatacacacatgcatgtacaggtaagcacacatgtacaagctcctacaggcttgctctcacacacgtgtatgcacagcagagagacgtatgagcttctactgcacacatgcacacacacacgcacacgtacattcactacaaacgtgcagcctcctgcacacgtgcacattcatgtgtacaccacaaatgagttcccagacgtgtaaacacacgtgcacacatcgtacacatgtgagctcccacacgtacacacagatgcacatggacacaccccaaacacgcacaggctcctacacacatgcacacacgtgtacaccacaaacgagctcccagacatgtaaacacacgtctcccacacgtgagctcccacacgtacacatgcacatgtacgcaccacaaacacatgcgcaggctcctgcaggcgtgaatacacacatgcacacacatatacacacatgtgccacaaacaagtgcacactgtcctggtgtcctgcactgcatcctgcctccttgctgaggggcccctgtgagaggcctctggatgggcatgggaagatgggctccctggcccccagcccatgcctccctgggatgaagagtccccctcctggcagaatgtctgggctttgcagagcaggccccgggggtgaagtcgcagcttcacttacaccagctgctctgtgagcaaggcttggtgccctggacaaggcccttcccctttagggaggtccagcctcgcaagctgaaacctcccctcggctcagccctataccaggcggccacagcaggactggccacacccacgccgcacctcatccgtgcacgcgtcggagcacggccagccttccgccacgagccagctgggaagggccgcggccgcctaaagccccagtcaacccagcctgtgtctgagcagacagggcgaacaagcaggccacaccgtctcgagggaggaggccagatgcggccagcgtctccaacagggtgaccatccgctcggcttgctgagcgtttaaacaaatgtttagacaggctgtggggactcccctgagttgagccttggccaggggtccggtgctgtcgcgggaaacctccagccttgttcttcaaaccactcagctcatgtgttttgcactgactagtactgaataatacaaccactcttatttaatgttagtattatttatttgacaactcagtgtctaacagcttgatatgcaggtccttgcatcctacatttctttaggaagttacccatttgtaactttaaaaacaggaaaaatatcagttggcaaatgcaatcttttttttttttaagctaaaggtgggtgaactggaatgaaaatctttctgatgttgtgtctataagcagccttgatgggatatgttagaagtgtcatgaaagtgtgattctacttttgcagaaaaatctaaagatcaatttatatagctttattttttactttatcaaagtatacagaattttaatatgcatatattgtgtctgacttaaaattataatgtctgcgtcaccatttaaaatgtctgttcattatgtaatgtaataaaagaaggtcttcaaaaatgtatttaacatgaatggtatccatagttgtcatcatcataaatactggagtttatttttaaattattaaacatagtaggtgcattaacataaatcagtctccacacagtaacatttaactgataattcattaatcagctttgaaaaattaaattgttaattaaaccaatctaacatttcagtaaagtttattttgtatgcttctgtttttaacttttatttctgtagataaactgactggataatattatattggacttttctctagattatctaagcaggagacctgaatctgcttgcaataaagaataaaagtctgcttcagtttctttataaagaaactcacacaa

SEQ ID NO: 2790 - DNA, 7325 bp, Homo sapiens
  source 1..7325: mol_type = unassigned DNA
ggtcaataatgaaggtggctgcggcgcggcggcaggctcagctgcgccgggcgggggcggcgccggggccgcgcctgtaggactcggggccgacgccgcgggatggggacgcggcgcggggagtgaggcagtggcggcggcggcggtaagcggaacttcggcccgaggggctcgcccgctcccgcctctgtcttgtcggcctccacctgcagccccgcggcccccgcgccccgcgggacccggacggcgacgacgggggaatgtggcgctggatccggcagcagctgggttttgacccaccacatcagagtgacacaagaaccatctacgtagccaacaggtttcctcagaatggcctttacacacctcagaaatttatagataacaggatcatttcatctaagtacactgtgtggaattttgttccaaaaaatttatttgaacagttcagaagagtggcaaacttttattttcttattatatttttggttcagcttatgattgatacacctaccagtccagttaccagtggacttccattattctttgtgataacagtaactgccataaagcagggatatgaagattggttacggcataactcagataatgaagtaaatggagctcctgtttatgttgttcgaagtggtggccttgtaaaaactagatcaaaaaacattcgggtgggtgatattgttcgaatagccaaagatgaaatttttcctgcagacttggtgcttctgtcctcagatcgactggatggttcctgtcacgttacaactgctagtttggacggagaaactaacctgaagacacatgtggcagttccagaaacagcattattacaaacagttgccaatttggacactctagtagctgtaatagaatgccagcaaccagaagcagacttatacagattcatgggacgaatgatcataacccaacaaatggaagaaattgtaagacctctggggccggagagtctcctgcttcgtggagccagattaaaaaacacaaaagaaatttttggtgttgcggtatacactggaatggaaactaagatggcattaaattacaagagcaaatcacagaaacgatctgcagtagaaaagtcaatgaatacatttttgataatttatctagtaattcttatatctgaagctgtcatcagcactatcttgaagtatacatggcaagctgaagaaaaatgggatgaaccttggtataaccaaaaaacagaacatcaaagaaatagcagtaagattctgagatttatttcagacttccttgcttttttggttctctacaatttcatcattccaatttcattatatgtgacagtcgaaatgcagaaatttcttggatcattttttattggctgggatcttgatctgtatcatgaagaatcagatcagaaagctcaagtcaatacttccgatctgaatgaagagcttggacaggtagagtacgtgtttacagataaaactggtacactgacagaaaatgagatgcagtttcgggaatgttcaattaatggcatgaaataccaagaaattaatggtagacttgtacccgaaggaccaacaccagactcttcagaaggaaacttatcttatcttagtagtttatcccatcttaacaacttatcccatcttacaaccagttcctctttcagaaccagtcctgaaaatgaaactgaactaattaaagaacatgatctcttctttaaagcagtcagtctctgtcacactgtacagattagcaatgttcaaactgactgcactggtgatggtccctggcaatccaacctggcaccatcgcagttggagtactatgcatcttcaccagatgaaaaggctctagtagaagctgctgcaaggattggtattgtgtttattggcaattctgaagaaactatggaggttaaaactcttggaaaactggaacggtacaaactgcttcatattctggaatttgattcagatcgtaggagaatgagtgtaattgttcaggcaccttcaggtgagaagttattatttgctaaaggagctgagtcatcaattctccctaaatgtataggtggagaaatagaaaaaaccagaattcatgtagatgaatttgctttgaaagggctaagaactctgtgtatagcatatagaaaatttacatcaaaagagtatgaggaaatagataaacgcatatttgaagccaggactgccttgcagcagcgggaagagaaattggcagctgttttccagttcatagagaaagacctgatattacttggagccacagcagtagaagacagactacaagataaagttcgagaaactattgaagcattgagaatggctggtatcaaagtatgggtacttactggggataaacatgaaacagctgttagtgtgagtttatcatgtggccattttcatagaaccatgaacatccttgaacttataaaccagaaatcagacagcgagtgtgctgaacaattgaggcagcttgccagaagaattacagaggatcatgtgattcagcatgggctggtagtggatgggaccagcctatctcttgcactcagggagcatgaaaaactatttatggaagtttgcagaaattgttcagctgtattatgctgtcgtatggctccactgcagaaagcaaaagtaataagactaataaaaatatcacctgagaaacctataacattggctgttggtgatggtgctaatgacgtaagcatgatacaagaagcccatgttggcataggaatcatgggtaaagaaggaagacaggctgcaagaaacagtgactatgcaatagccagatttaagttcctctccaaattgctttttgttcatggtcatttttattatattagaatagctacccttgtacagtattttttttataagaatgtgtgctttatcacaccccagtttttatatcagttctactgtttgttttctcagcaaacattgtatgacagcgtgtacctgactttatacaatatttgttttacttccctacctattctgatatatagtcttttggaacagcatgtagaccctcatgtgttacaaaataagcccaccctttatcgagacattagtaaaaaccgcctcttaagtattaaaacatttctttattggaccatcctgggcttcagtcatgcctttattttcttttttggatcctatttactaatagggaaagatacatctctgcttggaaatggccagatgtttggaaactggacatttggcactttggtcttcacagtcatggttattacagtcacagtaaagatggctctggaaactcatttttggacttggatcaaccatctcgttacctggggatctattatattttattttgtattttccttgttttatggagggattctctggccatttttgggctcccagaatatgtattttgtgtttattcagctcctgtcaagtggttctgcttggtttgccataatcctcatggttgttacatgtctatttcttgatatcataaagaaggtctttgaccgacacctccaccctacaagtactgaaaaggcacagcttactgaaacaaatgcaggtatcaagtgcttggactccatgtgctgtttcccggaaggagaagcagcgtgtgcatctgttggaagaatgctggaacgagttataggaagatgtagtccaacccacatcagcagatcatggagtgcatcggatcctttctataccaacgacaggagcatcttgactctctccacaatggactcatctacttgttaaaggggcagtagtactttgtgggagccagttcacctcctttcctaaaattcagtgtgatcaccctgttaatggccacactagctctgaaattaatttccaaaatctttgtagtagttcatacccactcagagttataatggcaaacaaacagaaagcattagtacaagcccctcccaacacccttaatttgaatctgaacatgttaaaatttgagaataaagagacatttttcatctctttgtctggtttgtcccttgtgcttatgggactcctaatggcatttcagtctgttgctgaggccattatattttaatataaatgtagaaaaaagagagaaatcttagtaaagagtattttttagtattagcttgattattgactcttctatttaaatctgcttctgtaaattatgctgaaagtttgccttgagaactctatttttttattagagttatatttaaagcttttcatgggaaaagttaatgtgaatactgaggaattttggtccctcagtgacctgtgttgttaattcattaatgcattctgagttcacagagcaaattaggagaatcatttccaaccattatttactgcagtatggggagtaaatttataccaattcctctaactgtactgtaacacagcctgtaaagttagccatataaatgcaagggtatatcatatatacaaatcaggaatcaggtccgttcaccgaacttcaaattgatgtttactaatatttttgtgacagagtataaagaccctatagtgggtaaattagatactattagcatattattaatttaatgtctttatcattggatcttttgcatgctttaatctggttaacatatttaaatttgctttttttctctttacctgaaggctctgtgtatagtatttcatgacatcgttgtacagtttaactatatcaataaaaagtttggacagtatttaaatattgcaaatatgtttaattatacaaatcagaatagtatgggtaattaaatgaatacaaaaagaagagcctctttctgcagccgacttagacatgctcttccctttctataagctagattttagaataaagggtttcagttaataatcttattttcaggttatgtcatctaacttatagcaaactaccacaatacagtgagttctgccagtgtcccagtacaaggcatatttcaggtgtggctgtggaatgtaaaaatgctcaacttgtatcaggtaatgttagcaataaattaaatgctaagaatgattaatcgggtacatgttactgtaattaactcattgcacttcaaaacctaacttccatcctgaatttatcaagtagttcagtattgtcatttgtttttgttttattgaaaagtaatgttgtcttaagatttagaagtgattattagcttgagaactattacccagctctaagcaaataatgattgtatacatattaagataatggttaaatgcggttttaccaagttttcccttgaaaatgtaattcctttatggagatttattgtgcagccctaagcttccttcccatttcatgaatataaggcttctagaattggactggcaggggaaagaatggtagagacagaaattaagactttatccttgtttgcttgtaaactattattttcttgctaatgtaacatttgtctgttccagtgatgtaaggatattaagttattaagctaaatattaattttcaaaaatagtccttctttaacttagatatttcatagctggatttaggaagatctgttattctggaagtactaaaaagaataatacaacgtacaatgtctgcattcactaattcatgttccagaagaggaaataatgaagatatactcagtagagtactaggtgggaggatatggaaatttgctcataaaatctcttataaaacgtgcatataacaaaatgacacccagtaggcctgcattacatttacatgaccgtgtttatttgccatcaaataaactgagtactgacaccagacaaagactccaaagtcataaaatagcctatgaccaactgcagcaagacaggaggtcagctcgcctataatggtgcttaaagtgtgattgatgtaattttctgtactcaccatttgaagttagttaaggagaactttatttttttaaaaaaagtaaatggcaaccactagtgtgctcatcctgaactgttactccaaatccactccgtttttaaagcaaaattatcttgtgattttaagaaaagagttttctatttatttaagaaagtaacaatgcagtctgcaagctttcagtagttttctagtgctatattcatcctgtaaaactcttactacgtaaccagtaatcacaaggaaagtgtcccctttgcatatttctttaaaattctttctttggaaagtatgatgttgataattaacttacccttatctgccaaaaccagagcaaaatgctaaatacgttattgctaatcagtggtctcaaatcgatttgcctccctttgcctcgtctgagggctgtaagcctgaagatagtggcaagcaccaagtcagtttccaaaattgcccctcagctgctttaagtgactcagcaccctgcctcagcttcagcaggcgtaggctcaccctgggcggagcaaagtatgggccagggagaactacagctacgaagacctgctgtcgagttgagaaaaggggagaatttatggtctgaattttctaactgtcctctttcttgggtctaaagctcataatacacaaaggcttccagacctgagccacacccaggccctatcctgaacaggagactaaacagaggcaaatcaaccctaggaaatacttgcattctgccctacggttagtaccaggactgaggtcatttctactggaaaagattgtgagattgaacttatctgatcgcttgagactcctaataggcaggagtcaaggccactagaaaattgacagttaagagccaaaagtttttaaaatatgctactctgaaaaatctcgtgaaggctgtaggaaaagggagaatcttccatgttggtgtttttcctgtaaagatcagtttggggtatgatataagcaggtattaataaaaataacacaccaaagagttacgtaaaacatgttttattaattttggtccccacgtacagacattttatttctattttgaaatgagttatctattttcataaaagtaaaacactattaaagtgctgttttatgtgaaataacttgaatgttgttcctataaaaaatagatcataactcatgatatgtttgtaatcatggtaatttagatttttatgaggaatgagtatctggaaatattgtagcaatacttggtttaaaattttggacctgagacactgtggctgtctaatgtaatcctttaaaaattctctgcattgtcagtaaatgtagtatattattgtacagctactcataattttttaaagtttatgaagttatatttatcaaataaaaactttcctatataattaaaa

SEQ ID NO: 2791 - DNA, 2218 bp, Homo sapiens
  source 1..2218: mol_type = unassigned DNA
taatggcatgaaataccaagaaattaatggtagacttgtacccgaaggaccaacaccagactcttcagaaggaaacttatcttatcttagtagtttatcccatcttaacaacttatcccatcttacaaccagttcctctttcagaaccagtcctgaaaatgaaactgaactaattaaagaacatgatctcttctttaaagcagtcagtctctgtcacactgtacagattagcaatgttcaaactgactgcactggtgatggtccctggcaatccaacctggcaccatcgcagttggagtactatgcatcttcaccagatgaaaaggctctagtagaagctgctgcaaggattggtattgtgtttattggcaattctgaagaaactatggaggttaaaactcttggaaaactggaacggtacaaactgcttcatattctggaatttgattcagatcgtaggagaatgagtgtaattgttcaggcaccttcaggtgagaagttattatttgctaaaggagctgagtcatcaattctccctaaatgtataggtggagaaatagaaaaaaccagaattcatgtagatgaatttgctttgaaagggctaagaactctgtgtatagcatatagaaaatttacatcaaaagagtatgaggaaatagataaacgcatatttgaagccaggactgccttgcagcagcgggaagagaaattggcagctgttttccagttcatagagaaagacctgatattacttggagccacagcagtagaagacagactacaagataaagttcgagaaactattgaagcattgagaatggctggtatcaaagtatgggtacttactggggataaacatgaaacagctgttagtgtgagtttatcatgtggccattttcatagaaccatgaacatccttgaacttataaaccagaaatcagacagcgagtgtgctgaacaattgaggcagcttgccagaagaattacagaggatcatgtgattcagcatgggctggtagtggatgggaccagcctatctcttgcactcagggagcatgaaaaactatttatggaagtttgcagaaattgttcagctgtattatgctgtcgtatggctccactgcagaaagcaaaagtaataagactaataaaaatatcacctgagaaacctataacattggctgttggtgatggtgctaatgacgtaagcatgatacaagaagcccatgttggcataggaatcatgggtaaagaaggaagacaggctgcaagaaacagtgactatgcaatagccagatttaagttcctctccaaattgctttttgttcatggtcatttttattatattagaatagctacccttgtacagtattttttttataagaatgtgtgctttatcacaccccagtttttatatcagttctactgtttgttttctcagcaaacattgtatgacagcgtgtacctgactttatacaatatttgttttacttccctacctattctgatatatagtcttttggaacagcatgtagaccctcatgtgttacaaaataagcccaccctttatcgagacattagtaaaaaccgcctcttaagtattaaaacatttctttattggaccatcctgggcttcagtcatgcctttattttcttttttggatcctatttactaatagggaaagatacatctctgcttggaaatggccagatgtttggaaactggacatttggcactttggtcttcacagtcatggttattacagtcacagtaaagatggctctggaaactcatttttggacttggatcaaccatctcgttacctggggatctattatattttattttgtattttccttgttttatggagggattctctggccatttttgggctcccagaatatgtattttgtgtttattcagctcctgtcaagtggttctgcttggtttgccataatcctcatggttgttacatgtctatttcttgatatcataaagaaggtctttgaccgacacctccaccctacaagtactgaaaaggcacagatgtactccaacacagttgctttaagtgacgagttcatcgcactgcagccattgtcgagggcaaggaatcagctgagcaaacttagatggaagaagataagggttcagtcagctcagcatatgaatttgctgaaagccagcacagaggggaggacagtaggcacctgctag

SEQ ID NO: 2792 - DNA, 8483 bp, Homo sapiens
  source 1..8483: mol_type = unassigned DNA
tgctgccgccgccgcagccgcagctactgtgacttctccgattgtgtgagctttgttggagcctgcgtacgtggatttatcgctgccacggtctgcgtagctccagaggtttaaccataggatagagaaaccaggaatgtaatgaggaaatcaaaatggatccaagtatgggtgtgaattctgttaccatttctgttgagggtatgacttgcaattcctgtgtttggaccattgagcagcagattggaaaagtgaatggtgtgcatcacattaaggtatcactggaagaaaaaaatgcaactattatttatgaccctaaactacagactccaaagaccctacaggaagctattgatgacatgggctttgatgctgttatccataatcctgaccctctccctgttttaactgacaccttgtttctgactgttacggcgtcactgactttgccatgggaccatatccaaagcacattgctgaagaccaagggtgtgacagacattaaaatttaccctcagaaaagaactgtagcagtgacaataatcccttctatagtgaatgccaatcagataaaagagctggttccagaactcagtttagatactgggacactggagaaaaagtcaggagcttgtgaagatcatagtatggctcaagctggtgaagtcgtgctgaagatgaaagtggaagggatgacctgccattcatgtactagcactattgaaggaaaaattgggaaactgcaaggtgttcagcgaattaaagtctccctggacaatcaagaagctactattgtttatcaacctcatcttatctcagtagaggaaatgaaaaagcagattgaagctatgggctttccagcatttgtcaaaaagcagcccaagtacctcaaattgggagctattgatgtagaacgtctaaagaacacaccagttaaatcctcagaagggtcacagcaaaggagtccatcatataccaatgattcaacagccactttcatcattgatggcatgcattgtaaatcatgtgtgtcaaatattgaaagtactttatctgcactccaatatgtaagcagcatagtagtttctttagagaataggtctgccattgtgaagtataatgcaagctcagtcactccagaatccctgagaaaagcaatagaggctgtatcaccggggctatatagagttagtatcacaagtgaagttgagagtacctcaaactctccctccagctcatctcttcagaagattcctttgaatgtagttagccagcctctgacacaagaaactgtgataaacattgatggcatgacttgtaattcctgtgtgcagtctattgagggtgtcatatcaaaaaagccaggtgtaaaatccatacgagtctcccttgcaaatagcaatgggactgttgagtatgatcctctactaacctctccagaaacgttgagaggagcaatagaagacatgggatttgatgctaccttgtcagacacgaatgagccgttggtagtaatagctcagccttcatcggaaatgccgcttttgacttcaactaatgaattttatactaaagggatgacaccagttcaagacaaggaggaaggaaagaattcatctaagtgttacatacaggtcactggcatgacttgcgcttcctgtgtagcaaacattgaacggaatttaaggcgggaagaaggaatatattctatacttgtggccctgatggctggcaaggcagaagtaaggtataatcctgctgttatacaacccccaatgatagcagagttcatccgagaacttggatttggagccactgtgatagaaaatgctgatgaaggagatggtgttttggaacttgttgtgaggggaatgacgtgtgcctcctgcgtacataaaatagagtctagtctcacaaaacacagagggatcctatactgctccgtggccctggcaaccaacaaagcacatattaaatatgacccagaaattattggtcctagagatattatccatacaattgaaagcttaggttttgaagcttctttggtcaagaaggatcggtcagcaagtcacttagatcataaacgagaaataagacaatggagacggtcttttcttgtgagtctgtttttctgtattcctgtaatggggctgatgatatatatgatggttatggaccaccactttgcaactcttcaccataatcaaaacatgagtaaagaagaaatgatcaaccttcattcttctatgttcctggagcgccagattcttccaggattgtctgttatgaatttgctgtcctttttattgtgtgtacctgtacagtttttcggaggctggtacttctacattcaggcttataaagcactgaagcataagacagcaaatatggacgtactgattgtgctggcaaccaccattgcatttgcctactctttgattattcttctagttgcaatgtatgagagagccaaagtgaaccctattactttctttgacacaccccctatgctgtttgtgtttattgcactaggccgatggctggaacatatagcaaagggcaaaacatcagaggctcttgcaaagttaatttcactacaagctacagaagcaactattgtaactcttgattctgataatatcctcctcagtgaagaacaagtggatgtggaacttgtacaacgtggagatatcattaaagtagttccaggaggcaaatttccagtggatggtcgtgttattgaaggacattctatggtagatgagtccctcatcacaggggaggcaatgcctgtggctaagaaacctggcagcacagtgattgctggttccattaaccagaacgggtcactgcttatctgcgcaacacatgttggagcagacacaaccctttctcaaattgtcaaacttgtggaagaggcacaaacatcaaaggctcctatccagcagtttgcagacaaactcagtggctattttgttccttttattgtttttgtttccattgccaccctcttggtatggattgtaattggatttctgaattttgaaattgtggaaacctactttcctggctacaatagaagtatctcccgaacagaaacgataatacgatttgctttccaagcctctatcacagttctgtgtattgcatgtccctgttcactgggactggccactccaactgctgtgatggtgggtacaggagtaggtgctcaaaatggcatactaataaaaggtggagagccattggagatggctcataaggtaaaggtagtggtatttgataagactggaaccattactcacggaaccccagtggtgaatcaagtaaaggttctaactgaaagtaacagaatatcacaccataaaatcttggccattgtgggaactgctgaaagtaacagtgaacaccctctaggaacagccataaccaaatattgcaaacaggagctggacactgaaaccttgggtacctgcatagatttccaggttgtgccaggctgtggtattagctgtaaagtcaccaatattgaaggcttgctacataagaataactggaatatagaggacaataatattaaaaatgcatccctggttcaaattgatgccagtaatgaacagtcatcaacttcgtcttccatgattattgatgcccagatctcaaatgctcttaatgctcagcagtataaagtcctcattggtaaccgggagtggatgattagaaatggtcttgtcattaataacgatgtaaatgatttcatgactgaacatgagagaaaaggtcggactgctgtattagtagcagttgatgatgagctgtgtggcttgatagccattgcagacacagtgaagcctgaagcagaactggctatccatattctgaaatctatgggcttagaagtagttctgatgactggagacaacagtaaaacagctagatctattgcttctcaggttggcattactaaggtgtttgctgaagttctaccttctcacaaggttgctaaagtgaagcaacttcaagaggaggggaaacgggtagcaatggtgggagatggaatcaatgactccccagctctggcaatggctaatgtgggaattgctattggcacaggcacagatgtagccattgaagcagctgatgtggttttgataaggaatgatcttctggatgtagtggcaagtattgacttatcaagagagacagtcaagaggattcggataaattttgtctttgctctaatttataatctggttggaattcccatagctgctggagtttttatgcccattggtttggttttgcagccctggatgggatctgcagcaatggctgcttcatctgtttctgtagtactttcttctctcttccttaaactttacaggaaaccaacttacgagagttatgaactgcctgcccggagccagataggacagaagagtccttcagaaatcagcgttcatgttggaatagatgatacctcaaggaattctcctaaactgggtttgctggaccggattgttaattatagcagagcctctataaactcactactgtctgataaacgctccctaaacagtgttgttaccagtgaacctgacaagcactcactcctggtgggagacttcagggaagatgatgacactgcattataaaaggccatggagagtgctgccagtttaacttgtcatgcactgacacagcattcatgatgttaccttcacttttcaaaatattgtagaaggatttttctcatgctcttatattagggattctatttgagttgcgtttatctgttggcaaaaatatctttttcaaggcatcagctctgaacctagctttatttaaactgaatttccagtatatttttgttttcactaacaacagataaggtagagcagtgaggtttacaacaagccctacaattagagattgctgaactgctgctaaagtgattttttttttatttgaccaaaaaaaaaaaggcccaagaagaagaaaatgaaaaatttgaagatttgagagcatgaagatattcatgcttttgaactcaaaatattgaagatactctcaagcctgtatccctgccccactggggagcaatgactttcaaagcactgtgtataaaacatctagttttagaagggaaacagttgaaactgtttaaaaatagatgtgccttatttattgcaggctttctttcccccattctccctgcatccttgtccttgcaggtgcttttttagatgctccaatatgtcttcttttgttattttctttcgagctaaccaagtttaggtggtttttcattgattaaaaataactgacaactgttctaatattttgctcctttttaaattttgtagctcaaaagaccttaaaggtctgtagggttccctgcctcccatctttccactgttgtaaaaagtatatcaaattattccttcaagtttcctagctctgtgctcagtttcagttcactcctgccaagttggactctaagttattcttcatgtagtctgctgatctcagtctggaaacttaacattatgagccttttctgctcaaaaaattttcaaagattaaaactattatacatatacaggtcatataaaattacctggattcactaaatttgtttgttgttgttgttgttgttgttgttgttgttgagacagagtcttgttttgcagcccaggctggagtgcagtggcaccatcttggctcactgcaacctctgcctaccggattcaaggaattctccctgcctcagcctcctgagtagctaggattacaggtgcctgccaccacacccggctaattttcatatttttcagtagagacggggtttcgccatgttggctagcctggtcttaaactcctaacctcaggtgatccacccgccttggcctcccaaagtgctgggattacaggtgtgagcctccatgcccagcctaaatttgtattttttgaattgagtataatcactttgctagtatatataatttaatagattttatttatcttttagtgtttcagataacctctcaaaaagactttaaaataatgctattacacaaagctgcatttaccaaaaaatacagtaaaatcataatacagaaactaaaatttccctaggttatgacgctttttagctaaatatatactcttctctagtttaaaacatttgaacttgcctagttagtgtggttggcaaatttaggagcttgttcccattgccaaatggatttagaaattcccttgtgagtgcctggtagctaatacactggtcagagatctggtacttgtaagactatttaaatttctttgttagttgcaagatggatttcatatgcagaatatgtaaatgaagaggactcataagtaaattcctaacattttgttcccattaccagaagcaaagctgctgctaacccaacatctggcacataggatttgtactcggtaaatgttagttcttttctccccttgaggtcagtaataaatacaaaaaaatcatttttctagagcagagtcttaaaatcaggtgggggtaggggatggagttcttcctttcctaccccttttctcttttatcctttcatatatacacatgcaaagtttacaaccttattccatgctgtctttcagatttagaaaagatctaatttctgtctcagctgtcttaaagagagaactgaagcttttgatgaaggtgctattaatctagaaaggcaaacccatttcactgaaatatcaatgggtttgcatatctaggccctttttttagaccaatgcctatgccatcctccatgctttcagtttgagttttattatttattattttaattccagtggcccatcttataatacaacttgtttcttctagaagacagagctgatagggtaaatgttgaaaaaagaagcatgcctccttctccctcccacccacctcaagcagttgaacacagccagttattcttccattattatgtgtaccttggagtcatcctcttggtcttgtattcatattgtgggacagtgggaatagcagcttgtagtattgaaataatcaaagagataatttcagctcttacaacaagaacagaaaacatgctaattagaaaaagtcctgctttaagtaatatgtagccacatttgaatcctctaccacaagtcttttttgcaatcttgaactttcattagcttcaaagagaagctgtatttacaggagaaagaggtgattatggagggaatcaaaaatactgctttcagttagtagctagctttaagtcaggagttagtaatgagaaattttataaatgtgtatttctgtgtattcacatacatatatatatacacacatatatatgtacatacacatacatacatattaccatactgaagggaaatggatttatatttgaatttgatatttgaatatttgaagttctctatttatatttcatttatcactcttctgtattcactcagcaaccatgcccttagtctgaagataacaaggatactttaatatccagtgccggttcagactcacctatgtggcaccttaaacttaaatatccaaagatgccttttgaatttcaaagattaaaacacagctagagtagtagtattgtagtctcaagatgtatggtgtgtcatttgtgaaaatagaaacgttatttttcctagtttagtatcaacattttagaatgtcaaatttgatgccttgtgaacaagtaattttatattgtgctttaattttttaaaaagtattctttattcatatgtatagaatgcttaaaatagcactgtagacaagatgtttccaaaactttaagtgcgcatatcttttctgtatacagcttaaaatcaaaaatgtatgttaagagaattttttctattacttatggatcatgctttaaaatgatttttcttgatatttattttactccattttgtttttttctctgggtgaggcatctggttactggttattttaaaaagaataaagacattcctggaatcactccttttgggtttttgtttgttttgtttcttttctacatttttaagtattattttacaaaatagaaaaaatatagattcatgccaaattattacctatttttacactaactttctgcagtccctccatctggtatgagtaaccagatagagcacaaagcatgagttcttgttcttcagttaaaagagcttctttcacagtgttgataacaaatgccttttgtagccaaaaccaggcgtctcaaccttacgtttttagttaaagaaatgtttagctaaacgttgttgaacattgattgtttggtaccgaaaacagcagtggacgatgttgtgcaatatccatctactgtagttaagatattcagtagtttgtttttcataagcatgtaattgatcatatttctgccaaggatgtgccttcaactttataattatagtgttgtaaaata

SEQ ID NO: 2793 - DNA, 8254 bp, Homo sapiens
  source 1..8254: mol_type = unassigned DNA
gttgttgctgccgccgccgcagccgcagctactgtgacttctccgattgtgtgagctttgttggagcctgcgtacgtggatttatcgctgccacggtctgcgtagctccagaggtttaaccataggatagagaaaccaggaatgtaatgaggaaatcaaaatggatccaagtatgggtgtgaattctgttaccatttctgttgagggtatgacttgcaattcctgtgtttggaccattgagcagcagattggaaaagtgaatggtgtgcatcacattaaggtatcactggaagaaaaaaatgcaactattatttatgaccctaaactacagactccaaagaccctacaggaagctattgatgacatgggctttgatgctgttatccataatcctgaccctctccctgttttaactgacaccttgtttctgactgttacggcgtcactgactttgccatgggaccatatccaaagcacattgctgaagaccaagggtgtgacagacattaaaatttaccctcagaaaagaactgtagcagtgacaataatcccttctatagtgaatgccaatcagataaaagagctggttccagaactcagtttagatactgggacactggagaaaaagtcaggagcttgtgaagatcatagtatggctcaagctggtgaagtcgtgctgaagatgaaagtggaagggatgacctgccattcatgtactagcactattgaaggaaaaattgggaaactgcaaggtgttcagcgaattaaagtctccctggacaatcaagaagctactattgtttatcaacctcatcttatctcagtagaggaaatgaaaaagcagattgaagctatgggctttccagcatttgtcaaaaagcagcccaagtacctcaaattgggagctattgatgtagaacgtctaaagaacacaccagttaaatcctcagaagggtcacagcaaaggagtccatcatataccaatgattcaacagccactttcatcattgatggcatgcattgtaaatcatgtgtgtcaaatattgaaagtactttatctgcactccaatatgtaagcagcatagtagtttctttagagaataggtctgccattgtgaagtataatgcaagctcagtcactccagaatccctgagaaaagcaatagaggctgtatcaccggggctatatagagttagtatcacaagtgaagttgagagtacctcaaactctccctccagctcatctcttcagaagattcctttgaatgtagttagccagcctctgacacaagaaactgtgataaacattgatggcatgacttgtaattcctgtgtgcagtctattgagggtgtcatatcaaaaaagccaggtgtaaaatccatacgagtctcccttgcaaatagcaatgggactgttgagtatgatcctctactaacctctccagaaacgttgagaggagcaatagaagacatgggatttgatgctaccttgtcagacacgaatgagccgttggtagtaatagctcagccttcatcggaaatgccgcttttgacttcaactaatgaattttatactaaagggatgacaccagttcaagacaaggaggaaggaaagaattcatctaagtgttacatacaggtcactggcatgacttgcgcttcctgtgtagcaaacattgaacggaatttaaggcgggaagaaggaatatattctatacttgtggccctgatggctggcaaggcagaagtaaggtataatcctgctgttatacaacccccaatgatagcagagttcatccgagaacttggatttggagccactgtgatagaaaatgctgatgaaggagatggtgttttggaacttgttgtgaggggaatgacgtgtgcctcctgcgtacataaaatagagtctagtctcacaaaacacagagggatcctatactgctccgtggccctggcaaccaacaaagcacatattaaatatgacccagaaattattggtcctagagatattatccatacaattgaaagcttaggttttgaagcttctttggtcaagaaggatcggtcagcaagtcacttagatcataaacgagaaataagacaatggagacggtcttttcttgtgagtctgtttttctgtattcctgtaatggggctgatgatatatatgatggttatggaccaccactttgcaactcttcaccataatcaaaacatgagtaaagaagaaatgatcaaccttcattcttctatgttcctggagcgccagattcttccaggattgtctgttatgaatttgctgtcctttttattgtgtgtacctgtacagggcaaaacatcagaggctcttgcaaagttaatttcactacaagctacagaagcaactattgtaactcttgattctgataatatcctcctcagtgaagaacaagtggatgtggaacttgtacaacgtggagatatcattaaagtagttccaggaggcaaatttccagtggatggtcgtgttattgaaggacattctatggtagatgagtccctcatcacaggggaggcaatgcctgtggctaagaaacctggcagcacagtgattgctggttccattaaccagaacgggtcactgcttatctgcgcaacacatgttggagcagacacaaccctttctcaaattgtcaaacttgtggaagaggcacaaacatcaaaggctcctatccagcagtttgcagacaaactcagtggctattttgttccttttattgtttttgtttccattgccaccctcttggtatggattgtaattggatttctgaattttgaaattgtggaaacctactttcctggctacaatagaagtatctcccgaacagaaacgataatacgatttgctttccaagcctctatcacagttctgtgtattgcatgtccctgttcactgggactggccactccaactgctgtgatggtgggtacaggagtaggtgctcaaaatggcatactaataaaaggtggagagccattggagatggctcataaggtaaaggtagtggtatttgataagactggaaccattactcacggaaccccagtggtgaatcaagtaaaggttctaactgaaagtaacagaatatcacaccataaaatcttggccattgtgggaactgctgaaagtaacagtgaacaccctctaggaacagccataaccaaatattgcaaacaggagctggacactgaaaccttgggtacctgcatagatttccaggttgtgccaggctgtggtattagctgtaaagtcaccaatattgaaggcttgctacataagaataactggaatatagaggacaataatattaaaaatgcatccctggttcaaattgatgccagtaatgaacagtcatcaacttcgtcttccatgattattgatgcccagatctcaaatgctcttaatgctcagcagtataaagtcctcattggtaaccgggagtggatgattagaaatggtcttgtcattaataacgatgtaaatgatttcatgactgaacatgagagaaaaggtcggactgctgtattagtagcagttgatgatgagctgtgtggcttgatagccattgcagacacagtgaagcctgaagcagaactggctatccatattctgaaatctatgggcttagaagtagttctgatgactggagacaacagtaaaacagctagatctattgcttctcaggttggcattactaaggtgtttgctgaagttctaccttctcacaaggttgctaaagtgaagcaacttcaagaggaggggaaacgggtagcaatggtgggagatggaatcaatgactccccagctctggcaatggctaatgtgggaattgctattggcacaggcacagatgtagccattgaagcagctgatgtggttttgataaggaatgatcttctggatgtagtggcaagtattgacttatcaagagagacagtcaagaggattcggataaattttgtctttgctctaatttataatctggttggaattcccatagctgctggagtttttatgcccattggtttggttttgcagccctggatgggatctgcagcaatggctgcttcatctgtttctgtagtactttcttctctcttccttaaactttacaggaaaccaacttacgagagttatgaactgcctgcccggagccagataggacagaagagtccttcagaaatcagcgttcatgttggaatagatgatacctcaaggaattctcctaaactgggtttgctggaccggattgttaattatagcagagcctctataaactcactactgtctgataaacgctccctaaacagtgttgttaccagtgaacctgacaagcactcactcctggtgggagacttcagggaagatgatgacactgcattataaaaggccatggagagtgctgccagtttaacttgtcatgcactgacacagcattcatgatgttaccttcacttttcaaaatattgtagaaggatttttctcatgctcttatattagggattctatttgagttgcgtttatctgttggcaaaaatatctttttcaaggcatcagctctgaacctagctttatttaaactgaatttccagtatatttttgttttcactaacaacagataaggtagagcagtgaggtttacaacaagccctacaattagagattgctgaactgctgctaaagtgattttttttttatttgaccaaaaaaaaaaaggcccaagaagaagaaaatgaaaaatttgaagatttgagagcatgaagatattcatgcttttgaactcaaaatattgaagatactctcaagcctgtatccctgccccactggggagcaatgactttcaaagcactgtgtataaaacatctagttttagaagggaaacagttgaaactgtttaaaaatagatgtgccttatttattgcaggctttctttcccccattctccctgcatccttgtccttgcaggtgcttttttagatgctccaatatgtcttcttttgttattttctttcgagctaaccaagtttaggtggtttttcattgattaaaaataactgacaactgttctaatattttgctcctttttaaattttgtagctcaaaagaccttaaaggtctgtagggttccctgcctcccatctttccactgttgtaaaaagtatatcaaattattccttcaagtttcctagctctgtgctcagtttcagttcactcctgccaagttggactctaagttattcttcatgtagtctgctgatctcagtctggaaacttaacattatgagccttttctgctcaaaaaattttcaaagattaaaactattatacatatacaggtcatataaaattacctggattcactaaatttgtttgttgttgttgttgttgttgttgttgttgttgagacagagtcttgttttgcagcccaggctggagtgcagtggcaccatcttggctcactgcaacctctgcctaccggattcaaggaattctccctgcctcagcctcctgagtagctaggattacaggtgcctgccaccacacccggctaattttcatatttttcagtagagacggggtttcgccatgttggctagcctggtcttaaactcctaacctcaggtgatccacccgccttggcctcccaaagtgctgggattacaggtgtgagcctccatgcccagcctaaatttgtattttttgaattgagtataatcactttgctagtatatataatttaatagattttatttatcttttagtgtttcagataacctctcaaaaagactttaaaataatgctattacacaaagctgcatttaccaaaaaatacagtaaaatcataatacagaaactaaaatttccctaggttatgacgctttttagctaaatatatactcttctctagtttaaaacatttgaacttgcctagttagtgtggttggcaaatttaggagcttgttcccattgccaaatggatttagaaattcccttgtgagtgcctggtagctaatacactggtcagagatctggtacttgtaagactatttaaatttctttgttagttgcaagatggatttcatatgcagaatatgtaaatgaagaggactcataagtaaattcctaacattttgttcccattaccagaagcaaagctgctgctaacccaacatctggcacataggatttgtactcggtaaatgttagttcttttctccccttgaggtcagtaataaatacaaaaaaatcatttttctagagcagagtcttaaaatcaggtgggggtaggggatggagttcttcctttcctaccccttttctcttttatcctttcatatatacacatgcaaagtttacaaccttattccatgctgtctttcagatttagaaaagatctaatttctgtctcagctgtcttaaagagagaactgaagcttttgatgaaggtgctattaatctagaaaggcaaacccatttcactgaaatatcaatgggtttgcatatctaggccctttttttagaccaatgcctatgccatcctccatgctttcagtttgagttttattatttattattttaattccagtggcccatcttataatacaacttgtttcttctagaagacagagctgatagggtaaatgttgaaaaaagaagcatgcctccttctccctcccacccacctcaagcagttgaacacagccagttattcttccattattatgtgtaccttggagtcatcctcttggtcttgtattcatattgtgggacagtgggaatagcagcttgtagtattgaaataatcaaagagataatttcagctcttacaacaagaacagaaaacatgctaattagaaaaagtcctgctttaagtaatatgtagccacatttgaatcctctaccacaagtcttttttgcaatcttgaactttcattagcttcaaagagaagctgtatttacaggagaaagaggtgattatggagggaatcaaaaatactgctttcagttagtagctagctttaagtcaggagttagtaatgagaaattttataaatgtgtatttctgtgtattcacatacatatatatatacacacatatatatgtacatacacatacatacatattaccatactgaagggaaatggatttatatttgaatttgatatttgaatatttgaagttctctatttatatttcatttatcactcttctgtattcactcagcaaccatgcccttagtctgaagataacaaggatactttaatatccagtgccggttcagactcacctatgtggcaccttaaacttaaatatccaaagatgccttttgaatttcaaagattaaaacacagctagagtagtagtattgtagtctcaagatgtatggtgtgtcatttgtgaaaatagaaacgttatttttcctagtttagtatcaacattttagaatgtcaaatttgatgccttgtgaacaagtaattttatattgtgctttaattttttaaaaagtattctttattcatatgtatagaatgcttaaaatagcactgtagacaagatgtttccaaaactttaagtgcgcatatcttttctgtatacagcttaaaatcaaaaatgtatgttaagagaattttttctattacttatggatcatgctttaaaatgatttttcttgatatttattttactccattttgtttttttctctgggtgaggcatctggttactggttattttaaaaagaataaagacattcctggaatcactccttttgggtttttgtttgttttgtttcttttctacatttttaagtattattttacaaaatagaaaaaatatagattcatgccaaattattacctatttttacactaactttctgcagtccctccatctggtatgagtaaccagatagagcacaaagcatgagttcttgttcttcagttaaaagagcttctttcacagtgttgataacaaatgccttttgtagccaaaaccaggcgtctcaaccttacgtttttagttaaagaaatgtttagctaaacgttgttgaacattgattgtttggtaccgaaaacagcagtggacgatgttgtgcaatatccatctactgtagttaagatattcagtagtttgtttttcataagcatgtaattgatcatatttctgccaaggatgtgccttcaactttataattatagtgttgtaaaata

SEQ ID NO: 2794 - DNA, 400 bp, Homo sapiens
  source 1..400: mol_type = unassigned DNA
gttgttgctgccgccgccgcagccgcagctactgtgacttctccgattgtgtgagctttgttggagcctgcgtacgtggatttatcgctgccacggtctgcgtagctccagaggtttaaccataggatagagaaaccaggaatgtaatgaggaaatcaaaatggatccaagtatgggtgtgaattctgttaccatttctgttgagggtatgacttgcaattcctgtgtttggaccattgagcagcagattggaaaagtgaatggtgtgcatcacattaaggtatcactggaagaaaaaaatgcaactattattttttatgcccattggtttggttttgcagccctggatgggatctgcagcaatggctgcttcatctgtttctgtagtactttcttctct

SEQ ID NO: 2795 - DNA, 5497 bp, Homo sapiens
  source 1..5497: mol_type = unassigned DNA
gttgttgctgccgccgccgcagccgcagctactgtgacttctccgattgtgtgagctttgttggagcctgcgtacgtggatttatcgctgccacggtctgcgtagctccagaggtttaaccataggatagagaaaccaggaatgtaatgaggaaatcaaaatggatccaagtatgggtgtgaattctgttaccatttctgttgagggtatgacttgcaattcctgtgtttggaccattgagcagcagattggaaaagtgaatggtgtgcatcacattaaggtaaaggtagtggtatttgataagactggaaccattactcacggaaccccagtggtgaatcaagtaaaggttctaactgaaagtaacagaatatcacaccataaaatcttggccattgtgggaactgctgaaagtaacagtgaacaccctctaggaacagccataaccaaatattgcaaacaggagctggacactgaaaccttgggtacctgcatagatttccaggttgtgccaggctgtggtattagctgtaaagtcaccaatattgaaggcttgctacataagaataactggaatatagaggacaataatattaaaaatgcatccctggttcaaattgatgccagtaatgaacagtcatcaacttcgtcttccatgattattgatgcccagatctcaaatgctcttaatgctcagcagtataaagtcctcattggtaaccgggagtggatgattagaaatggtcttgtcattaataacgatgtaaatgatttcatgactgaacatgagagaaaaggtcggactgctgtattagtagcagttgatgatgagctgtgtggcttgatagccattgcagacacagtgaagcctgaagcagaactggctatccatattctgaaatctatgggcttagaagtagttctgatgactggagacaacagtaaaacagctagatctattgcttctcaggttggcattactaaggtgtttgctgaagttctaccttctcacaaggttgctaaagtgaagcaacttcaagaggaggggaaacgggtagcaatggtgggagatggaatcaatgactccccagctctggcaatggctaatgtgggaattgctattggcacaggcacagatgtagccattgaagcagctgatgtggttttgataaggaatgatcttctggatgtagtggcaagtattgacttatcaagagagacagtcaagaggattcggataaattttgtctttgctctaatttataatctggttggaattcccatagctgctggagtttttatgcccattggtttggttttgcagccctggatgggatctgcagcaatggctgcttcatctgtttctgtagtactttcttctctcttccttaaactttacaggaaaccaacttacgagagttatgaactgcctgcccggagccagataggacagaagagtccttcagaaatcagcgttcatgttggaatagatgatacctcaaggaattctcctaaactgggtttgctggaccggattgttaattatagcagagcctctataaactcactactgtctgataaacgctccctaaacagtgttgttaccagtgaacctgacaagcactcactcctggtgggagacttcagggaagatgatgacactgcattataaaaggccatggagagtgctgccagtttaacttgtcatgcactgacacagcattcatgatgttaccttcacttttcaaaatattgtagaaggatttttctcatgctcttatattagggattctatttgagttgcgtttatctgttggcaaaaatatctttttcaaggcatcagctctgaacctagctttatttaaactgaatttccagtatatttttgttttcactaacaacagataaggtagagcagtgaggtttacaacaagccctacaattagagattgctgaactgctgctaaagtgattttttttttatttgaccaaaaaaaaaaaggcccaagaagaagaaaatgaaaaatttgaagatttgagagcatgaagatattcatgcttttgaactcaaaatattgaagatactctcaagcctgtatccctgccccactggggagcaatgactttcaaagcactgtgtataaaacatctagttttagaagggaaacagttgaaactgtttaaaaatagatgtgccttatttattgcaggctttctttcccccattctccctgcatccttgtccttgcaggtgcttttttagatgctccaatatgtcttcttttgttattttctttcgagctaaccaagtttaggtggtttttcattgattaaaaataactgacaactgttctaatattttgctcctttttaaattttgtagctcaaaagaccttaaaggtctgtagggttccctgcctcccatctttccactgttgtaaaaagtatatcaaattattccttcaagtttcctagctctgtgctcagtttcagttcactcctgccaagttggactctaagttattcttcatgtagtctgctgatctcagtctggaaacttaacattatgagccttttctgctcaaaaaattttcaaagattaaaactattatacatatacaggtcatataaaattacctggattcactaaatttgtttgttgttgttgttgttgttgttgttgttgttgagacagagtcttgttttgcagcccaggctggagtgcagtggcaccatcttggctcactgcaacctctgcctaccggattcaaggaattctccctgcctcagcctcctgagtagctaggattacaggtgcctgccaccacacccggctaattttcatatttttcagtagagacggggtttcgccatgttggctagcctggtcttaaactcctaacctcaggtgatccacccgccttggcctcccaaagtgctgggattacaggtgtgagcctccatgcccagcctaaatttgtattttttgaattgagtataatcactttgctagtatatataatttaatagattttatttatcttttagtgtttcagataacctctcaaaaagactttaaaataatgctattacacaaagctgcatttaccaaaaaatacagtaaaatcataatacagaaactaaaatttccctaggttatgacgctttttagctaaatatatactcttctctagtttaaaacatttgaacttgcctagttagtgtggttggcaaatttaggagcttgttcccattgccaaatggatttagaaattcccttgtgagtgcctggtagctaatacactggtcagagatctggtacttgtaagactatttaaatttctttgttagttgcaagatggatttcatatgcagaatatgtaaatgaagaggactcataagtaaattcctaacattttgttcccattaccagaagcaaagctgctgctaacccaacatctggcacataggatttgtactcggtaaatgttagttcttttctccccttgaggtcagtaataaatacaaaaaaatcatttttctagagcagagtcttaaaatcaggtgggggtaggggatggagttcttcctttcctaccccttttctcttttatcctttcatatatacacatgcaaagtttacaaccttattccatgctgtctttcagatttagaaaagatctaatttctgtctcagctgtcttaaagagagaactgaagcttttgatgaaggtgctattaatctagaaaggcaaacccatttcactgaaatatcaatgggtttgcatatctaggccctttttttagaccaatgcctatgccatcctccatgctttcagtttgagttttattatttattattttaattccagtggcccatcttataatacaacttgtttcttctagaagacagagctgatagggtaaatgttgaaaaaagaagcatgcctccttctccctcccacccacctcaagcagttgaacacagccagttattcttccattattatgtgtaccttggagtcatcctcttggtcttgtattcatattgtgggacagtgggaatagcagcttgtagtattgaaataatcaaagagataatttcagctcttacaacaagaacagaaaacatgctaattagaaaaagtcctgctttaagtaatatgtagccacatttgaatcctctaccacaagtcttttttgcaatcttgaactttcattagcttcaaagagaagctgtatttacaggagaaagaggtgattatggagggaatcaaaaatactgctttcagttagtagctagctttaagtcaggagttagtaatgagaaattttataaatgtgtatttctgtgtattcacatacatatatatatacacacatatatatgtacatacacatacatacatattaccatactgaagggaaatggatttatatttgaatttgatatttgaatatttgaagttctctatttatatttcatttatcactcttctgtattcactcagcaaccatgcccttagtctgaagataacaaggatactttaatatccagtgccggttcagactcacctatgtggcaccttaaacttaaatatccaaagatgccttttgaatttcaaagattaaaacacagctagagtagtagtattgtagtctcaagatgtatggtgtgtcatttgtgaaaatagaaacgttatttttcctagtttagtatcaacattttagaatgtcaaatttgatgccttgtgaacaagtaattttatattgtgctttaattttttaaaaagtattctttattcatatgtatagaatgcttaaaatagcactgtagacaagatgtttccaaaactttaagtgcgcatatcttttctgtatacagcttaaaatcaaaaatgtatgttaagagaattttttctattacttatggatcatgctttaaaatgatttttcttgatatttattttactccattttgtttttttctctgggtgaggcatctggttactggttattttaaaaagaataaagacattcctggaatcactccttttgggtttttgtttgttttgtttcttttctacatttttaagtattattttacaaaatagaaaaaatatagattcatgccaaattattacctatttttacactaactttctgcagtccctccatctggtatgagtaaccagatagagcacaaagcatgagttcttgttcttcagttaaaagagcttctttcacagtgttgataacaaatgccttttgtagccaaaaccaggcgtctcaaccttacgtttttagttaaagaaatgtttagctaaacgttgttgaacattgattgtttggtaccgaaaacagcagtggacgatgttgtgcaatatccatctactgtagttaagatattcagtagtttgtttttcataagcatgtaattgatcatatttctgccaaggatgtgccttcaactttataattatagtgttgtaaaata

SEQ ID NO: 2796 - DNA, 5226 bp, Homo sapiens
  source 1..5226: mol_type = unassigned DNA
agaaatcaggaatgtaatgaggaaatcaaaatggatccaagtatgggtgtgaattctgttaccatttctgttgagggtatgacttgcaattcctgtgtttggaccattgagcagcagattggaaaagtgaatggtgtgcatcacattaaggtatcactggaagaaaaaaatgcaactattatttatgaccctaaactacagactccaaagaccctacaggaagctattgatgacatgggctttgatgctgttatccataatcctgaccctctccctgttttaactgacaccttgtttctgactgttacggcgtcactgactttgccatgggaccatatccaaagcacattgctgaagaccaagggtgtgacagacattaaaatttaccctcagaaaagaactgtagcagtgacaataatcccttctatagtgaatgccaatcagataaaagagctggttccagaactcagtttagatactgggacactggagaaaaagtcaggagcttgtgaagatcatagtatggctcaagctggtgaagtcgtgctgaagatgaaagtggaagggatgacctgccattcatgtactagcactattgaaggaaaaattgggaaactgcaaggtgttcagcgaattaaagtctccctggacaatcaagaagctactattgtttatcaacctcatcttatctcagtagaggaaatgaaaaagcagattgaagctatgggctttccagcatttgtcaaaaagcagcccaagtacctcaaattgggagctattgatgtagaacgtctaaagaacacaccagttaaatcctcagaagggtcacagcaaaggagtccatcatataccaatgattcaacagccactttcatcattgatggcatgcattgtaaatcatgtgtgtcaaatattgaaagtactttatctgcactccaatatgtaagcagcatagtagtttctttagagaataggtctgccattgtgaagtataatgcaagctcagtcactccagaatccctgagaaaagcaatagaggctgtatcaccggggctatatagagttagtatcacaagtgaagttgagagtacctcaaactctccctccagctcatctcttcagaagattcctttgaatgtagttagccagcctctgacacaagaaactgtgataaacattgatggcatgacttgtaattcctgtgtgcagtctattgagggtgtcatatcaaaaaagccaggtgtaaaatccatacgagtctcccttgcaaatagcaatgggactgttgagtatgatcctctactaacctctccagaaacgttgagaggagcaatagaagacatgggatttgatgctaccttgtcagacacgaatgagccgttggtagtaatagctcagccttcatcggaaatgccgcttttgacttcaactaatgaattttatactaaagggatgacaccagttcaagacaaggaggaaggaaagaattcatctaagtgttacatacaggtcactggcatgacttgcgcttcctgtgtagcaaacattgaacggaatttaaggcgggaagaaggaatatattctatacttgtggccctgatggctggcaaggcagaagtaaggtataatcctgctgttatacaacccccaatgatagcagagttcatccgagaacttggatttggagccactgtgatagaaaatgctgatgaaggagatggtgttttggaacttgttgtgaggggaatgacgtgtgcctcctgcgtacataaaatagagtctagtctcacaaaacacagagggatcctatactgctccgtggccctggcaaccaacaaagcacatattaaatatgacccagaaattattggtcctagagatattatccatacaattgaagtaagtgccaagaatttatgtttctgtgttcttacctatttaatcagcactcccgtgaatcatttctggtttgcatcagatagaggcaatgaaaaaaaatctaactcctttgaacacttcaaacaagatctgtctcaaaatttaatgtaaacgtgtctgcatttttttttttggtctttttcaggaaaagttaggcaaaggtacatttacactattaatcaggagcaaacaagttagaaccacaaaacacttaaaatatttagaaaatggaaataaagtataatttgttataaataagattcatattagttactaagaaagtgaaggatcctgcttgatggctttttgtttgttaggtcaaaacaaaagacctatttttaagttaaagtaagaaatttaaaagactaaacccagctggacatagtggctcatgcctataatctcagcattttgagaggcctagagggcacaatcacttgaggccaggagttcaagaccatcctgggcaatgtagcgagaccctgtctctgcaacaaaaattaaaataactagccaggtgtggtgccacgcacccatagtattaatcacacgagaagcagaggtaggaggattgcttaagtccaggagttgaaggttactgtgagagagaccttgtctctaaaacaaacaaacaaacaaacacaatcctttctttgtgacagattcatcctgtgttcttcaataagtcttaagtggtaatacatgtgaatgtattttaaaagtttcagtatgctatagaattggtgttcaagtgatttaaagcattttattagttcagttaagatcctatttgtatagatgacattatcattaccatttttgtgaaactagttttactgagtacctgctatgtgccagttaccaagattgcaaagcttcaacccttaattcccacagcaatgtggtcatattcattttggaggtgaggaaacccaggttaagagaagttaagttacttatccaaagtcacatagctaataactgtcataactgggatttgagcctaattactctgactccaaaagctcatgcttgttctattcactgtgcactgccaacaaatgtaagatggcagcatttcccctagcagttggaaatgtaatgtgtattactatctatggtcagataagtcttgcttaggggtagtttcctttttatactttgttttattggggaaaatgatttttgttcatgttctttttctgataaaacaagactaaatactgcatatgcaaggccttgaataatatgtttagtatggtgctagcttttttttttttttttttttttttttggagacagagtctcactctgtcgcctgggctggagtgcagtggtgcgatctcagctcactgcaacctccgcctcctgggttcaagcgattctcctgtctcagcttcccgagcagctgggattacaggcacctgccactatttccagctaattttttgtatttttagtagagacggggtttcaccgtgttggccatactgctctcgaactcctgactttgtgatttgcccaccttggcctcccaaagtgctgggattacaggcatgagccaccgtgcccggcctggtgctagcttttatggcctattaatgagaacctctactgaggacagttgtacttgagttaaactcttatatataggatacatattaactagcattaaggaaatatttatttgtttgatgaaagattggaaacaaatgcaatcaagagcaggaagcacatcttcatctttgtattccccagagtgacttgccctcagtaattgaactgttcttaatgacaataccatggcttagaatttctctatacaatatttatatgttcagtgaaataatttttttctcatgaatttccttagagcttaggttttgaagcttctttggtcaagaaggatcggtcagcaagtcacttagatcataaacgagaaataagacagtaagtactttggagtgtcagtaaaaaacagattttgactccttattacaaatttttttttgcatgtcagtttttataatatcatccttatactggatgaaatggtcacaatgtatatctctctgtagtatgtagaatctttacccattagctatttatgaccatgatttttctttttttattttttccatataagatggagacggtcttttcttgtgagtctgtttttctgtattcctgtaatggggctgatgatatatatgatggttatggaccaccactttgcaactcttcaccataatcaaaacatgagtaaagaagaaatgatcaaccttcattcttctatgttcctggagcgccagattcttccaggattgtctgttatgaatttgctgtcctttttattgtgtgtacctgtacaggcaagtgaattgttagcaaatatatttgttaataataaaaaataagcaaaatttggcaggcaaggtttattttcagctacaaaactgatgttagctagaagtctgatcattttatgccatatgctttacaaaaataatcttcaactgggtagttatttaagttgataatagatgccatttaacccctaagaaagagttcaagttttttgggtttggtatttatatctgctactgtatataactttattttatttttaaatttttatttatctatttttttttttttagagatggggttttgctctgtcacccaggctggaatgcagtggtgtaagcacagctcactgtggtcttgaactcctgggctcaagcattccttctgcctcagcattctgagtagctgggacttccaggcactagccactgcacccagctcaatgactttatttttgttatttcttcctggcacttcagttcattactttctgtatgttttaaactcttttttcgagataaacttttactttggaatagaatacttctatcaaataaatcttttcctttatctgatccttataaaaggcaataatgattttaaaaaacatcttagtttctctgttttaatgaaataagctttccagttatatttaccaacaaaaacggccaacagatttcgtagcttgtgatataccagttagtttgagttttggaaagatgggtgagttttatacaaaaaaatccttgagaaaatgtaattcctttcttagttcttgtttttgctagcctcagaaagaaaaatctgcttggtgtgatggctcatgcctataatcccagctacttgggaggctgaggcaggaggattgcttgaggccaggagtttgagaccagcctgggcaacatatcaagactgtctctt

SEQ ID NO: 2797 - DNA, 4775 bp, Homo sapiens
  source 1..4775: mol_type = unassigned DNA
actgtgacttctccgattgtgtgagctttgttggagcctgcgtacgtggatttatcgctgccacggtctgcgtagctccagaggtttaaccataggatagagaaaccaggaatgtaatgaggaaatcaaaatggatccaagtatgggtgtgaattctgttaccatttctgttgagggtatgacttgcaattcctgtgtttggaccattgagcagcagattggaaaagtgaatggtgtgcatcacattaaggtatcactggaagaaaaaaatgcaactattatttatgaccctaaactacagactccaaagaccctacaggaagctattgatgacatgggctttgatgctgttatccataatcctgaccctctccctgttttaactgacaccttgtttctgactgttacggcgtcactgactttgccatgggaccatatccaaagcacattgctgaagaccaagggtgtgacagacattaaaatttaccctcagaaaagaactgtagcagtgacaataatcccttctatagtgaatgccaatcagataaaagagctggttccagaactcagtttagatactgggacactggagaaaaagtcaggagcttgtgaagatcatagtatggctcaagctggtgaagtcgtgctgaagatgaaagtggaagggatgacctgccattcatgtactagcactattgaaggaaaaattgggaaactgcaaggtgttcagcgaattaaagtctccctggacaatcaagaagctactattgtttatcaacctcatcttatctcagtagaggaaatgaaaaagcagattgaagctatgggctttccagcatttgtcaaaaagcagcccaagtacctcaaattgggagctattgatgtagaacgtctaaagaacacaccagttaaatcctcagaagggtcacagcaaaggagtccatcataccaatgattcaacagccactttcatcattgatggcatgcattgtaaatcatgtgtgtcaaatattgaaagtactttatctgcactccaatatgtaagcagcatagtagtttctttagagaataggtctgccattgtgaagtataatgcaagctcagtcactccagaatccctgagaaaagcaatagaggctgtatcaccggggctatatagagttagtatcacaagtgaagttgagagtacctcaaactctccctccagctcatctcttcagaagattcctttgaatgtagttagccagcctctgacacaagaaactgtgataaacattgatggcatgacttgtaattcctgtgtgcagtctattgagggtgtcatatcaaaaaagccaggtgtaaaatccatacgagtctcccttgcaaatagcaatgggactgttgagtatgatcctctactaacctctccagaaacgttgagaggagcaatagaagacatgggatttgatgctaccttgtcagacacgaatgagccgttggtagtaatagctcagccttcatcggaaatgccgcttttgacttcaactaatgaattttatactaaagggatgacaccagttcaagacaaggaggaaggaaagaattcatctaagtgttacatacaggtcactggcatgacttgcgcttcctgtgtagcaaacattgaacggaatttaaggcgggaagaaggaatatattctatacttgtggccctgatggctggcaaggcagaagtaaggtataatcctgctgttatacaacccccaatgatagcagagttcatccgagaacttggatttggagccactgtgatagaaaatgctgatgaaggagatggtgttttggaacttgttgtgaggggaatgacgtgtgcctcctgcgtacataaaatagagtctagtctcacaaaacacagagggatcctatactgctccgtggccctggcaaccaacaaagcacatattaaatatgacccagaaattattggtcctagagatattatccatacaattgaaagcttaggttttgaagcttctttggtcaagaaggatcggtcagcaagtcacttagatcataaacgagaaataagacaatggagacggtcttttcttgtgagtctgtttttctgtattcctgtaatggggctgatgatatatatgatggttatggaccaccactttgcaactcttcaccataatcaaaacatgagtaaagaagaaatgatcaaccttcattcttctatgttcctggagcgccagattcttccaggattgtctgttatgaatttgctgtcctttttattgtgtgtacctgtacagtttttcggaggctggtacttctacattcaggcttataaagcactgaagcataagacagcaaatatggacgtactgattgtgctggcaaccaccattgcatttgcctactctttgattattcttctagttgcaatgtatgagagagccaaagtgaaccctattactttctttgacacaccccctatgctgtttgtgtttattgcactaggccgatggctggaacatatagcaaagggcaaaacatcagaggctcttgcaaagttaatttcactacaagctacagaagcaactattgtaactcttgattctgataatatcctcctcagtgaagaacaagtggatgtggaacttgtacaacgtggagatatcattaaagtagttccaggaggcaaatttccagtggatggtcgtgttattgaaggacattctatggtagatgagtccctcatcacaggggaggcaatgcctgtggctaagaaacctggcagcacagtgattgctggttccattaaccagaacgggtcactgcttatctgcgcaacacatgttggagcagacacaaccctttctcaaattgtcaaacttgtggaagaggcacaaacatcaaaggctcctatccagcagtttgcagacaaactcagtggctattttgttccttttattgtttttgtttccattgccaccctcttggtatggattgtaattggatttctgaattttgaaattgtggaaacctactttcctggctacaatagaagtatctcccgaacagaaacgataatacgatttgctttccaagcctctatcacagttctgtgtattgcatgtccctgttcactgggactggccactccaactgctgtgatggtgggtacaggagtaggtgctcaaaatggcatactaataaaaggtggagagccattggagatggctcataaggtaaaggtagtggtatttgataagactggaaccattactcacggaaccccagtggtgaatcaagtaaaggttctaactgaaagtaacagaatatcacaccataaaatcttggccattgtgggaactgctgaaagtaacagtgaacaccctctaggaacagccataaccaaatattgcaaacaggagctggacactgaaaccttgggtacctgcatagatttccaggttgtgccaggctgtggtattagctgtaaagtcaccaatattgaaggcttgctacataagaataactggaatatagaggacaataatattaaaaatgcatccctggttcaaattgatgccagtaatgaacagtcatcaacttcgtcttccatgattattgatgcccagatctcaaatgctcttaatgctcagcagtataaagtcctcattggtaaccgggagtggatgattagaaatggtcttgtcattaataacgatgtaaatgatttcatgactgaacatgagagaaaaggtcggactgctgtattagtagcagttgatgatgagctgtgtggcttgatagccattgcagacacagtgaagcctgaagcagaactggctatccatattctgaaatctatgggcttagaagtagttctgatgactggagacaacagtaaaacagctagatctattgcttctcaggttggcattactaaggtgtttgctgaagttctaccttctcacaaggttgctaaagtgaagcaacttcaagaggaggggaaacgggtagcaatggtgggagatggaatcaatgactccccagctctggcaatggctaatgtgggaattgctattggcacaggcacagatgtagccattgaagcagctgatgtggttttgataaggaatgatcttctggatgtagtggcaagtattgacttatcaagagagacagtcaagaggattcggataaattttgtctttgctctaatttataatctggttggaattcccatagctgctggagtttttatgcccattggtttggttttgcagccctggatgggatctgcagcaatggctgcttcatctgtttctgtagtactttcttctctcttccttaaactttacaggaaaccaacttacgagagttatgaactgcctgcccggagccagataggacagaagagtccttcagaaatcagcgttcatgttggaatagatgatacctcaaggaattctcctaaactgggtttgctggaccggattgttaattatagcagagcctctataaactcactactgtctgataaacgctccctaaacagtgttgttaccagtgaacctgacaagcactcactcctggtgggagacttcagggaagatgatgacactgcattataaaaggccatggagagtgctgccagtttaacttgtcatgcactgacacagcattcatgatgttaccttcacttttcaaaatattgtagaaggatttttctcatgctcttatattagggattctatttgagttgcgtttatctgttg

SEQ ID NO: 2798 - DNA, 2716 bp, Homo sapiens
  source 1..2716: mol_type = unassigned DNA
gttgctagagataccgcctggaggccactgatctgtaaaagggatctctacagaagatagggatttttgatcgccagagaagaagggatatgtgagatccaaacgccgaaggaggaaagcaggctccgtggtctcttccagccctgatggaagaaactaccgagccttattatactaggtgctttccacatgcctattcatttaatcctccagcaaccttgtaagaagggccatcccattttatatttaaacaaaccttaactactgacgcaaggagtcaaggatctaatcccaaagcctctgcctggttcgctgcagatggatgtccgcgaggacgccagccctccgcctcccgccgggtccctgaacgccggcccggccggtccaacctcattccgcttcccgccatcgaaacgcgaagcccccgccttcccccaaacgtctcagcgccgctggggcctttctggctgcgccgcctccgaccccaggccccggtccgcgcccgccgctcgctagtcctgggagtgaggagaacgcgtgctgaggacccggccagagggacagcggggaccgccctcccgctgcgtctctgaaagcgaggccgttcctcccgcgtccgacccccgcggggccgtcaggttcggggcggcccaggctgcgggtccgcagggcgcttcgggccgagccggcgcggcgcgtgaagggcaggggacgccccgaaagaccgctggggtgggaccccaagctccaggggtctttggaaataagaatgcggcgtgacgttggctgtgcgggcgcggggctgacgcggaccctataacccatcgccgaaaccgggcggccgcgcccctattcctcggcatttctctctgtccgcggccctgctcagccaatcagcgagtgggctcctaggcaggtcctgagtgacagcgcggcgggctggatcaggagatgcgcgtgcgcggcccggcccggctgatcgcttcgggtgctcgactcctgttgcgcatgctcagcgcgctgcccggctggggacccgcgcacctgcagcgcccgctgctcggccctgcatcctgcctgggcatcctgcgcccggccatgacggcgcactcattcgccctcccggtcatcatcttcaccacgttctggggcctcgtcggcatcgccgggccctggttcgtgccgaagggacccaaccgcggagtgatcatcaccatgctggtcgccaccgccgtctgctgttacctcttctggctcatcgccatcctggcgcagctgaaccccctgttcgggccccagctgaagaatgagaccatctggtacgtgcgcttcctgtgggagtgacccgccgcccccgacccaggtgcccagctctcggaatgactgtggctccactgtccctgacaaccccttcgtccggaccctcccccacacaactatgtctggtcaccagctccctcctgctggcacccagagacccggacccgcagcctgcctggttcctggaagtcttcccagtcttcccagccagcccgggccctggggagccctgggcacagcagcggccgaggggatgtcctgctccaatacccgcactgctctggagtttgccctctttcccaaggagatgctgctggggagctggtatgggtggggtctttccctttacagacggggcagatgccaggactcagcccatcctgaggaggacacgtgtcctcatggagagggtgctccggcccaggcgggggagtcagtgcccagtcagcagctctgccaccatcctgctgggaactgggggggcctctattgggttataggcaaggccttttctctggcatggaattgttaattttctgacacgtctagatgtgaaatttctgaaaatgttgaagcagagaaacattcacacacaaaaagcaacatagtcatgtgggtccagatggcctcagtcctagatgttggcaccctttgctgtgtctcctcagagtatcctgttccgcctcctgccacctggacctccctcagtggatgtcttccctcccccgaccccagcctgtcagtccgagcacagtgcaggtttggctctgacttgggcttttggctgcagtgggggtggatttcagagcctctcatggcagcatctaagtgaccagagctgggatgagagaggggaaggggcaatgtgagtggcgctatgggacgggccagccctgctcctgagccagccccgccctctgccccctggccctgggctctgtgctagggatggtgaagaatgggggcgtgccagcctggcaggagtgggaagcaacacgcaggggtcccggacctctccagccttgccctcacgcttacccgagctcccagtgtggttagcacagagctcacccaccttgcctggctcccagctggggcctgtcctcactggtgctccaggggaagaaacgacagcctcacttctgtatggactgctgatgtggcctgccatcctgttcagcgggcattgtctttggagcagcaggagaataggatgcctctcactcacatgccagttcctggctggccagctgctcagggctcaggctggggcctcccattgacatcctccccctacactccctctctgagcctccgtcgcccctcctgttgggtaagggtgttgagtgtgacttgtgctgaaaacctggttcatatataataaataatggtgatg

SEQ ID NO: 2799 - DNA, 2605 bp, Homo sapiens
  source 1..2605: mol_type = unassigned DNA
gttgctagagataccgcctggaggccactgatctgtaaaagggatctctacagaagatagggatttttgatcgccagagaagaagggatatgtgagatccaaacgccgaaggaggaaagcaggctccgtggtctcttccagccctgatggaagaaactaccgagccttattatactaggtgctttccacatgcctattcatttaatcctccagcaaccttgtaagaagggccatcccattttatatttaaacaaaccttaactactgacgcaaggagtcaaggatctaatcccaaagcctctgcctggttcgctgcagatggatgtccgcgaggacgccagccctccgcctcccgccgggtccctgaacgccggcccggccggtccaacctcattccgcttcccgccatcgaaacgcgaagcccccgccttcccccaaacgtctcagcgccgctggggcctttctggctgcgccgcctccgaccccaggccccggtccgcgcccgccgctcgctagtcctgggagtgaggagaacgcgtgctgaggacccggccagagggacagcggggaccgccctcccgctgcgtctctgaaagcgaggccgttcctcccgcgtccgacccccgcggggccgtcaggttcggggcggcccaggctgcgggtccgcagggcgcttcgggccgagccggcgcggcgcgtgaagggcaggggacgccccgaaagaccgctggggtgggaccccaagctccaggggtctttggaaataagaatgcggcgtgacgttggctgtgcgggcgcggggctgacgcggaccctataacccatcgccgaaaccgggcggccgcgcccctattcctcggcatttctctctgtccgcggccctgctcagccaatcagcgagtgggctcctaggcaggtcctgagtgacagcgcggcgggctggatcaggagatgcgcgtgcgcggcccggcccggctgatcgcttcgggtgctcgactcctgttgcgcatgctcagcgcgctgcccggctggggacccgcgcacctgcagcgcccgctgctcggccctgcatcctgcctgggcatcctgcgcccggccatgacggcgcactcattcgccctcccggtcatcatcttcaccacgttctggggcctcgtcggcatcgccgggccctggttcgtgccgaagggacccaaccgcggagtgatcatcaccatgctggtcgccaccgccgtctgctgttacctcttgtgcccagctctcggaatgactgtggctccactgtccctgacaaccccttcgtccggaccctcccccacacaactatgtctggtcaccagctccctcctgctggcacccagagacccggacccgcagggcctgcctggttcctggaagtcttcccagtcttcccagccagcccgggccctggggagccctgggcacagcagcggccgaggggatgtcctgctccaatacccgcactgctctggagtttgccctctttcccaaggagatgctgctggggagctggtatgggtggggtctttccctttacagacggggcagatgccaggactcagcccatcctgaggaggacacgtgtcctcatggagagggtgctccggcccaggcgggggagtcagtgcccagtcagcagctctgccaccatcctgctgggaactgggggggcctctattgggttataggcaaggccttttctctggcatggaattgttaattttctgacacgtctagatgtgaaatttctgaaaatgttgaagcagagaaacattcacacacaaaaagcaacatagtcatgtgggtccagatggcctcagtcctagatgttggcaccctttgctgtgtctcctcagagtatcctgttccgcctcctgccacctggacctccctcagtggatgtcttccctcccccgaccccagcctgtcagtccgagcacagtgcaggtttggctctgacttgggcttttggctgcagtgggggtggatttcagagcctctcatggcagcatctaagtgaccagagctgggatgagagaggggaaggggcaatgtgagtggcgctatgggacgggccagccctgctcctgagccagccccgccctctgccccctggccctgggctctgtgctagggatggtgaagaatgggggcgtgccagcctggcaggagtgggaagcaacacgcaggggtcccggacctctccagccttgccctcacgcttacccgagctcccagtgtggttagcacagagctcacccaccttgcctggctcccagctggggcctgtcctcactggtgctccaggggaagaaacgacagcctcacttctgtatggactgctgatgtggcctgccatcctgttcagcgggcattgtctttggagcagcaggagaataggatgcctctcactcacatgccagttcctggctggccagctgctcagggctcaggctggggcctcccattgacatcctccccctacactccctctctgagcctccgtcgcccctcctgttgggtaagggtgttgagtgtgacttgtgctgaaaacctggttcatatataataaataatggtgatg

SEQ ID NO: 2800 - DNA, 2614 bp, Homo sapiens
  source 1..2614: mol_type = unassigned DNA
gttgctagagataccgcctggaggccactgatctgtaaaagggatctctacagaagatagggatttttgatcgccagagaagaagggatatgtgagatccaaacgccgaaggaggaaagcaggctccgtggtctcttccagccctgatggaagaaactaccgagccttattatactaggtgctttccacatgcctattcatttaatcctccagcaaccttgtaagaagggccatcccattttatatttaaacaaaccttaactactgacgcaaggagtcaaggatctaatcccaaagcctctgcctggttcgctgcagatggatgtccgcgaggacgccagccctccgcctcccgccgggtccctgaacgccggcccggccggtccaacctcattccgcttcccgccatcgaaacgcgaagcccccgccttcccccaaacgtctcagcgccgctggggcctttctggctgcgccgcctccgaccccaggccccggtccgcgcccgccgctcgctagtcctgggagtgaggagaacgcgtgctgaggacccggccagagggacagcggggaccgccctcccgctgcgtctctgaaagcgaggccgttcctcccgcgtccgacccccgcggggccgtcaggttcggggcggcccaggctgcgggtccgcagggcgcttcgggccgagccggcgcggcgcgtgaagggcaggggacgccccgaaagaccgctggggtgggaccccaagctccaggggtctttggaaataagaatgcggcgtgacgttggctgtgcgggcgcggggctgacgcggaccctataacccatcgccgaaaccgggcggccgcgcccctattcctcggcatttctctctgtccgcggccctgctcagccaatcagcgagtgggctcctaggcaggtcctgagtgacagcgcggcgggctggatcaggagatgcgcgtgcgcggcccggcccggctgatcgcttcgggtgctcgactcctgttgcgcatgctcagcgcgctgcccggctggggacccgcgcacctgcagcgcccgctgctcggccctgcatcctgcctgggcatcctgcgcccggccatgacggcgcactcattcgccctcccggtcatcatcttcaccacgttctggggcctcgtcggcatcgccgggccctggttcgtgccgaagggacccaaccgcggagtgatcatcaccatgctggtcgccaccgccgtctgctgttacctcttgtgcccagctctcggaatgactgtggctccactgtccctgacaaccccttcgtccggaccctcccccacacaactatgtctggtcaccagctccctcctgctggcacccagagacccggacccgcagggcctgcctggttcctggaagtcttcccagtcttcccagccagcccgggccctggggagccctgggcacagcagcggccgaggggatgtcctgctccaatacccgcactgctctggagtttgccctctttcccaaggagatgctgctggggagctggtatgggtggggtctttccctttacagacggggcagatgccaggactcagcccatcctgaggaggacacgtgtcctcatggagagggtgctccggcccaggcgggggagtcagtgcccagtcagcagctctgccaccatcctgctgggaactgggggggcctctattgggttataggcaaggccttttctctggcatggaattgttaattttctgacacgtctagatgtgaaatttctgaaaatgttgaagcagagaaacattcacacacaaaaagcaacatagtcatgtgggtccagatggcctcagtcctagatgttggcaccctttgctgtgtctcctcagagtatcctgttccgcctcctgccacctggacctccctcagtggatgtcttccctcccccgaccccagcctgtcagtccgagcacagtgcaggtttggctctgacttgggcttttggctgcagtgggggtggatttcagagcctctcatggcagcatctaagtgaccagagctgggatgagagaggggaaggggcaatgtgagtggcgctatgggacgggccagccctgctcctgagccagccccgccctctgccccctggccctgggctctgtgctagggatggtgaagaatgggggcgtgccagcctggcaggagtgggaagcaacacgcaggggtcccggacctctccagccttgccctcacgcttacccgagctcccagtgtggttagcacagagctcacccaccttgcctggctcccagctggggcctgtcctcactggtgctccaggggaagaaacgacagcctcacttctgtatggactgctgatgtggcctgccatcctgttcagcgggcattgtctttggagcagcaggagaataggatgcctctcactcacatgccagttcctggctggccagctgctcagggctcaggctggggcctcccattgacatcctccccctacactccctctctgagcctccgtcgcccctcctgttgggtaagggtgttgagtgtgacttgtgctgaaaacctggttcatatataataaataatggtgatgaaaagatta

SEQ ID NO: 2801 - DNA, 2722 bp, Homo sapiens
  source 1..2722: mol_type = unassigned DNA
gttgctagagataccgcctggaggccactgatctgtaaaagggatctctacagaagatagggatttttgatcgccagagaagaagggatatgtgagatccaaacgccgaaggaggaaagcaggctccgtggtctcttccagccctgatggaagaaactaccgagccttattatactaggtgctttccacatgcctattcatttaatcctccagcaaccttgtaagaagggccatcccattttatatttaaacaaaccttaactactgacgcaaggagtcaaggatctaatcccaaagcctctgcctggttcgctgcagatggatgtccgcgaggacgccagccctccgcctcccgccgggtccctgaacgccggcccggccggtccaacctcattccgcttcccgccatcgaaacgcgaagcccccgccttcccccaaacgtctcagcgccgctggggcctttctggctgcgccgcctccgaccccaggccccggtccgcgcccgccgctcgctagtcctgggagtgaggagaacgcgtgctgaggacccggccagagggacagcggggaccgccctcccgctgcgtctctgaaagcgaggccgttcctcccgcgtccgacccccgcggggccgtcaggttcggggcggcccaggctgcgggtccgcagggcgcttcgggccgagccggcgcggcgcgtgaagggcaggggacgccccgaaagaccgctggggtgggaccccaagctccaggggtctttggaaataagaatgcggcgtgacgttggctgtgcgggcgcggggctgacgcggaccctataacccatcgccgaaaccgggcggccgcgcccctattcctcggcatttctctctgtccgcggccctgctcagccaatcagcgagtgggctcctaggcaggtcctgagtgacagcgcggcgggctggatcaggagatgcgcgtgcgcggcccggcccggctgatcgcttcgggtgctcgactcctgttgcgcatgctcagcgcgctgcccggctggggacccgcgcacctgcagcgcccgctgctcggccctgcatcctgcctgggcatcctgcgcccggccatgacggcgcactcattcgccctcccggtcatcatcttcaccacgttctggggcctcgtcggcatcgccgggccctggttcgtgccgaagggacccaaccgcggagtgatcatcaccatgctggtcgccaccgccgtctgctgttacctcttctggctcatcgccatcctggcgcagctgaaccccctgttcgggccccagctgaagaatgagaccatctggtacgtgcgcttcctgtgggagtgacccgccgcccccgacccaggtgcccagctctcggaatgactgtggctccactgtccctgacaaccccttcgtccggaccctcccccacacaactatgtctggtcaccagctccctcctgctggcacccagagacccggacccgcagggcctgcctggttcctggaagtcttcccagtcttcccagccagcccgggccctggggagccctgggcacagcagcggccgaggggatgtcctgctccaatacccgcactgctctggagtttgccctctttcccaaggagatgctgctggggagctggtatgggtggggtctttccctttacagacggggcagatgccaggactcagcccatcctgaggaggacacgtgtcctcatggagagggtgctccggcccaggcgggggagtcagtgcccagtcagcagctctgccaccatcctgctgggaactgggggggcctctattgggttataggcaaggccttttctctggcatggaattgttaattttctgacacgtctagatgtgaaatttctgaaaatgttgaagcagagaaacattcacacacaaaaagcaacatagtcatgtgggtccagatggcctcagtcctagatgttggcaccctttgctgtgtctcctcagagtatcctgttccgcctcctgccacctggacctccctcagtggatgtcttccctcccccgaccccagcctgtcagtccgagcacagtgcaggtttggctctgacttgggcttttggctgcagtgggggtggatttcagagcctctcatggcagcatctaagtgaccagagctgggatgagagaggggaaggggcaatgtgagtggcgctatgggacgggccagccctgctcctgagccagccccgccctctgccccctggccctgggctctgtgctagggatggtgaagaatgggggcgtgccagcctggcaggagtgggaagcaacacgcaggggtcccggacctctccagccttgccctcacgcttacccgagctcccagtgtggttagcacagagctcacccaccttgcctggctcccagctggggcctgtcctcactggtgctccaggggaagaaacgacagcctcacttctgtatggactgctgatgtggcctgccatcctgttcagcgggcattgtctttggagcagcaggagaataggatgcctctcactcacatgccagttcctggctggccagctgctcagggctcaggctggggcctcccattgacatcctccccctacactccctctctgagcctccgtcgcccctcctgttgggtaagggtgttgagtgtgacttgtgctgaaaacctggttcatatataataaataatggtgatgaaaa

SEQ ID NO: 2802 - DNA, 1764 bp, Homo sapiens
  source 1..1764: mol_type = unassigned DNA
gctgcccggctggggacccgcgcacctgcagcgcccgctgctcggccctgcatcctgcctgggcatcctgcgcccggccatgacggcgcactcattcgccctcccggtcatcatcttcaccacgttctggggcctcgtcggcatcgccgggccctggttcgtgccgaagggacccaaccgcggagtgatcatcaccatgctggtcgccaccgccgtctgctgttacctcttctggctcatcgccatcctggcgcagctgaaccccctgttcgggccccagctgaagaatgagaccatctggtacgtgcgcttcctgtgggagtgacccgccgcccccgacccagcgcttcaccccaaggcaagaccctaacctgggccctaacctggacggagggagggaaagggtgcccagctctcggaatgactgtggctccactgtccctgacaaccccttcgtccggaccctcccccacacaactatgtctggtcaccagctccctcctgctggcacccagagacccggacccgcagggcctgcctggttcctggaagtcttcccagtcttcccagccagcccgggccctggggagccctgggcacagcagcggccgaggggatgtcctgctccaatacccgcactgctctggagtttgccctctttcccaaggagatgctgctggggagctggtatgggtggggtctttccctttacagacggggcagatgccaggactcagcccatcctgaggaggacacgtgtcctcatggagagggtgctccggcccaggcgggggagtcagtgcccagtcagcagctctgccaccatcctgctgggaactgggggggcctctattgggttataggcaaggccttttctctggcatggaattgttaattttctgacacgtctagatgtgaaatttctgaaaatgttgaagcagagaaacattcacacacaaaaagcaacatagtcatgtgggtccagatggcctcagtcctagatgttggcaccctttgctgtgtctcctcagagtatcctgttccgcctcctgccacctggacctccctcagtggatgtcttccctcccccgaccccagcctgtcagtccgagcacagtgcaggtttggctctgacttgggcttttggctgcagtgggggtggatttcagagcctctcatggcagcatctaagtgaccagagctgggatgagagaggggaaggggcaatgtgagtggcgctatgggacgggccagccctgctcctgagccagccccgccctctgccccctggccctgggctctgtgctagggatggtgaagaatgggggcgtgccagcctggcaggagtgggaagcaacacgcaggggtcccggacctctccagccttgccctcacgcttacccgagctcccagtgtggttagcacagagctcacccaccttgcctggctcccagctggggcctgtcctcactggtgctccaggggaagaaacgacagcctcacttctgtatggactgctgatgtggcctgccatcctgttcagcgggcattgtctttggagcagcaggagaataggatgcctctcactcacatgccagttcctggctggccagctgctcagggctcaggctggggcctcccattgacatcctccccctacactccctctctgagcctccgtcgcccctcctgttgggtaagggtgttgagtgtgacttgtgctgaaaacctggttcatatataataaataatggtgatgaaaag

SEQ ID NO: 2803 - DNA, 1666 bp, Homo sapiens
  source 1..1666: mol_type = unassigned DNA
atgctcagcgcgctgcccggctggggacccgcgcacctgcagcgcccgctgctcggccctgcatcctgcctgggcatcctgcgcccggccatgacggcgcactcattcgccctcccggtcatcatcttcaccacgttctggggcctcgtcggcatcgccgggccctggttcgtgccgaagggacccaaccgcggagtgatcatcaccatgctggtcgccaccgccgtctgctgttacctcttctggctcatcgccatcctggcgcagctgaaccccctgttcgggccccagctgaagaatgagaccatctggtgcccagctctcggaatgactgtggctccactgtccctgacaaccccttcgtccggaccctcccccacacaactatgtctggtcaccagctccctcctgctggcacccagagacccggacccgcagggcctgcctggttcctggaagtcttcccagtcttcccagccagcccgggccctggggagccctgggcacagcagcggccgaggggatgtcctgctccaatacccgcactgctctggagtttgccctctttcccaaggagatgctgctggggagctggtatgggtggggtctttccctttacagacggggcagatgccaggactcagcccatcctgaggaggacacgtgtcctcatggagagggtgctccggcccaggcgggggagtcagtgcccagtcagcagctctgccaccatcctgctgggaactgggggggcctctattgggttataggcaaggccttttctctggcatggaattgttaattttctgacacgtctagatgtgaaatttctgaaaatgttgaagcagagaaacattcacacacaaaaagcaacatagtcatgtgggtccagatggcctcagtcctagatgttggcaccctttgctgtgtctcctcagagtatcctgttccgcctcctgccacctggacctccctcagtggatgtcttccctcccccgaccccagcctgtcagtccgagcacagtgcaggtttggctctgacttgggcttttggctgcagtgggggtggatttcagagcctctcatggcagcatctaagtgaccagagctgggatgagagaggggaaggggcaatgtgagtggcgctatgggacgggccagccctgctcctgagccagccccgccctctgccccctggccctgggctctgtgctagggatggtgaagaatgggggcgtgccagcctggcaggagtgggaagcaacacgcaggggtcccggacctctccagccttgccctcacgcttacccgagctcccagtgtggttagcacagagctcacccaccttgcctggctcccagctggggcctgtcctcactggtgctccaggggaagaaacgacagcctcacttctgtatggactgctgatgtggcctgccatcctgttcagcgggcattgtctttggagcagcaggagaataggatgcctctcactcacatgccagttcctggctggccagctgctcagggctcaggctggggcctcccattgacatcctccccctacactccctctctgagcctccgtcgcccctcctgttgggtaagggtgttgagtgtgacttgtgctgaaaacctggttcatatataataaataatggtgatg

SEQ ID NO: 2804 - DNA, 1080 bp, Homo sapiens
  source 1..1080: mol_type = unassigned DNA
gcaagcgcagattgtgggcggctgtgtcagctgacccaaggggccttcgaggtgccttaggccgcttgccttgctctcagaatcgctgccgccatggctagtcagtctcaggggattcagcagctgctgcaggccgagaagcgggcagccgagaaggtgtccgaggcccgcaaaagaaagaaccggaggctgaagcaggccaaagaagaagctcaggctgaaattgaacagtaccgcctgcagagggagaaagaattcaaggccaaggaagctgcggcattgggatcccgtggcagttgcagcactgaagtggagaaggagacccaggagaagatgaccatcctccagacatacttccggcagaacagggatgaagtcttggacaacctcttggcttttgtctgtgacattcggccagaaatccatgaaaactaccgcataaatggatagaagagagaagcacctgtgctgtggagtggcattttagatgccctcacgaatatgaagcttagcacagctctagttacattcttatgatatggcattaaattatttccatatattatataataggtccttccactttttggagagtagcaaatctagcttttttgtacagacttagaaattatctaaagatttcatctttttacctcatatttcttaggaatttaatggttatatgttgtctttttttcctatgtcttttggctcaagcaacatgtatatcagtgttgactttttctttcttagatctagtttaaaaaaaaaaaaaaccacataacaattctttgaagaaaggaagggattaaataatttttttccctaacactttcttgaaggtcaggggctttatctatgaaaaagtagtaaatagttctttgtaacctgtgtgaagcagcagccagccttaaagtagtccattcttgctaatggttagaacagtgaatactagtggaattgtttgggctgcttttagtttctcttaatcaaaattactagatgatagaattcaagaacttgttacatgtattacttggtgtatcgataatcatttaaaagtaaagactctgtcatgca

SEQ ID NO: 2805 - DNA, 1588 bp, Homo sapiens
  source 1..1588: mol_type = unassigned DNA
cctgttgtaagcccgcagctttgggcctggtctctgctgctcccaggcggcccctttgggtactgcctgagcaagaagtgctggagaggaggaccagtcatcaataggaggatgagattgggagagacactcggtgcaggaggctgagtgagcaggggagcactaagacccaggggtagtggaggactgcagcaacgagctggaggaggagaagtaagcggtggggggtgggagccatctggtactttgacagcattcaaaacagcatcggccataacaacagaaatggccagtcagtcccaaggtatccagcagcttctgcaagctgagaagcgggcagctgagaaggtggcagatgccagaaagaggaaggcccggcgactgaagcaggcaaaggaggaggcacagatggaggtggagcaataccgcagagagcgagagcacgaattccagagcaagcagcaggcggccatgggctcccaggggaacctgtctgctgaggtggagcaggctacaaggcgccaggtgcagggcatgcagagctcccagcagagaaaccgagagcgtgtcctggcccagcttcttggcatggtctgcgacgtcaggccccaggtccaccccaactaccggatttctgcctagggccaccgtagggcctgactccttctgccagttccctccctcaaagaaatcctccaatcaaaatcacctcccaccataatccctgtcttctttccatcccctagaaatcctgggaggcaggatccaataattttcctgtgacacttataaatatcctgctcacatctgaatctccttgttgttctttaaccctcactgggactttgtaaacttccaagtcattctcacctaaaccctctgtgaaatttgtaatatggggaagtaggaatgtggaaaacatcctgacttcagtgtctggccgatgtgggtccctctcttgaccctgtcacttgctggctgtgaaaccaggacaagctacttaacttggtagcctcgatgtcctcctctgtgaaactgggatgataataatgcctaccttgtgagggttgcttcaatgattaggaatcattctgtaaagtctagcacagttccttgcatgttgtagcagtgattcagtaagtagcaaccctgtgatactattaccaccacctgctcactggtcaaaacctacacagctgtttcctcacgtccatcactggctctctaattccacttgttcattctgtgaccctagttattttctgaaaaattggttcttctcttttcccagagaccttctgatctccaaaaagaggagatgactacatttagcccctctcttataattccaggtagataactgcattttgtagcctctctttgtttttcttttgctgatctttgtctttattagattttcctcctttcctatttccccaaagacttatcagatgctcattgctttctaagatctaaaatgatactgtgttccctcatatgcatgcccttcctttctatatccttgacaccttactttcccattgtaacaataaaaaaagtatcaataaaataattattggcaaataaa

SEQ ID NO: 2806 - DNA, 1261 bp, Homo sapiens
  source 1..1261: mol_type = unassigned DNA
ggagaagtaagcggtggggggtgggagccatctggtactttgacagcattcaaaacagcatcggccataacaacagaaatggccagtcagtcccaaggtatccagcagcttctgcaagctgagaagcgggcagctgagaaggtggcagatgccagaaagaggaaggcccggcgactgaagcaggctacaaggcgccaggtgcagggcatgcagagctcccagcagagaaaccgagagcgtgtcctggcccagcttcttggcatggtctgcgacgtcaggccccaggtccaccccaactaccggatttctgcctagggccaccgtagggcctgactccttctgccagttccctccctcaaagaaatcctccaatcaaaatcacctcccaccataatccctgtcttctttccatcccctagaaatcctgggaggcaggatccaataattttcctgtgacacttataaatatcctgctcacatctgaatctccttgttgttctttaaccctcactgggactttgtaaacttccaagtcattctcacctaaaccctctgtgaaatttgtaatatggggaagtaggaatgtggaaaacatcctgacttcagtgtctggccgatgtgggtccctctcttgaccctgtcacttgctggctgtgaaaccaggacaagctacttaacttggtagcctcgatgtcctcctctgtgaaactgggatgataataatgcctaccttgtgagggttgcttcaatgattaggaatcattctgtaaagtctagcacagttccttgcatgttgtagcagtgattcagtaagtagcaaccctgtgatactattaccaccacctgctcactggtcaaaacctacacagctgtttcctcacgtccatcactggctctctaattccacttgttcattctgtgaccctagttattttctgaaaaattggttcttctcttttcccagagaccttctgatctccaaaaagaggagatgactacatttagcccctctcttataattccaggtagataactgcattttgtagcctctctttgtttttcttttgctgatctttgtctttattagattttcctcctttcctatttccccaaagacttatcagatgctcattgctttctaagatctaaaatgatactgtgttccctcatatgcatgcccttcctttctatatccttgacaccttactttcccattgtaacaataaaaaaagtatcaataaaataattattggcaaataaa

SEQ ID NO: 2807 - DNA, 1351 bp, Homo sapiens
  source 1..1351: mol_type = unassigned DNA
tctggtactttgacagcattcaaaacagcatcggccataacaacagaaatggccagtcagtcccaaggtatccagcagcttctgcaagctgagaagcgggcagctgagaaggtggcagatgccagaaagaggaaggcccggcgactgaagcaggcaaaggaggaggcacagatggaggtggagcaataccgcagagagcgagagcacgaattccagagcaagcagcaggcggccatgggctcccaggggaacctgtctgctgaggtggagcaggctacaaggcgccaggtgcagggcatgcagagctcccagcagagaaaccgagagcgtgtcctggcccagcttcttggcatggtctgcgacgtcaggccccaggtccaccccaactaccggatttctgcctagggccaccgtagggcctgactccttctgccagttccctccctcaaagaaatcctccaatcaaaatcacctcccaccataatccctgtcttctttccatcccctagaaatcctgggaggcaggatccaataattttcctgtgacacttataaatatcctgctcacatctgaatctccttgttgttctttaaccctcactgggactttgtaaacttccaagtcattctcacctaaaccctctgtgaaatttgtaatatggggaagtaggaatgtggaaaacatcctgacttcagtgtctggccgatgtgggtccctctcttgaccctgtcacttgctggctgtgaaaccaggacaagctacttaacttggtagcctcgatgtcctcctctgtgaaactgggatgataataatgcctaccttgtgagggttgcttcaatgattaggaatcattctgtaaagtctagcacagttccttgcatgttgtagcagtgattcagtaagtagcaaccctgtgatactattaccaccacctgctcactggtcaaaacctacacagctgtttcctcacgtccatcactggctctctaattccacttgttcattctgtgaccctagttattttctgaaaaattggttcttctcttttcccagagaccttctgatctccaaaaagaggagatgactacatttagcccctctcttataattccaggtagataactgcattttgtagcctctctttgtttttcttttgctgatctttgtctttattagattttcctcctttcctatttccccaaagacttatcagatgctcattgctttctaagatctaaaatgatactgtgttccctcatatgcatgcccttcctttctatatccttgacaccttactttcccattgtaacaataaaaaaagtatcaataaaataattattggcaaataaa

SEQ ID NO: 2808 - DNA, 609 bp, Homo sapiens
  source 1..609: mol_type = unassigned DNA
ggcgggcagcagcatgcagtgccgtgtccccatggcggtcctggtgggcagggtcagccccgagccgaagcagcaggcacagggcaggggcatcgtggcgggcacaggcccggtgcagtggtgggggctgcccagcatctacatcgaggcctgggtgtcgctggaggagggcctgggcccggaccagccgtcctgcagacaaggaaggcccggcgactgaagcaggcaaaggaggaggcacagatggaggtggagcaataccgcagagagcgagagcacgaattccagagcaagcagcaggcggccatgggctcccaggggaacctgtctgctgaggtggagcaggctacaaggcgccaggtgcagggcatgcagagctcccagcagagaaaccgagagcgtgtcctggcccagcttcttggcatggtctgcgacgtcaggccccaggtccaccccaactaccggatttctgcctagggccaccgtagggcctgactccttctgccagttccctccctcaaagaaatcctccaatcaaaatcacctcccaccataatccctgtcttctttccatcccctagaaatcctgggaggcaggatccaataatt

SEQ ID NO: 2809 - DNA, 1261 bp, Homo sapiens; identical to SEQ ID NO: 2806
  source 1..1261: mol_type = unassigned DNA

SEQ ID NO: 2810 - DNA, 1261 bp, Homo sapiens; identical to SEQ ID NO: 2806
  source 1..1261: mol_type = unassigned DNA

SEQ ID NO: 2811 - DNA, 1351 bp, Homo sapiens
  source 1..1351: mol_type = unassigned DNA
tctggtactttgacagcattcaaaacagcatcggccataacaacagaaatggccagtcagtcccaaggtatccagcagcttctgcaagctgagaagcgggcagctgagaaggtggcagatgccagaaagaggaaggcccggcgactgaagcaggcaaaggaggaggcacagatggaggtggagcaataccgcagagagcgagagcacgaattccagagcaagcagcaggcggccatgggctcccaggggaacctgtctgctgaggtggagcaggctacaaggcgccaggtgcagggcatgcagagctcccagcagagaaaccgagagcgtgtcctggcccagcttcttggcatggtctgcgacgtcaggccccaggtccaccccaactaccggatttctgcctagggccaccgtagggcctgactccttctgccagttccctccctcaaagaaatcctccaatcaaaatcacctcccaccataatccctgtcttctttccatcccctagaaatcctgggaggcaggatccaataattttcctgtgacacttataaatatcctgctcacatctgaatctccttgttgttctttaaccctcactgggactttgtaaacttccaagtcattctcacctaaaccctctgtgaaatttgtaatatggggaagtaggaatgtggaaaacatcctgacttcagtgtctggccgatgtgggtccctctcttgaccctgtcacttgctggctgtgaaaccaggacaagctacttaacttggtagcctcgatgtcctcctctgtgaaactgggatgataataatgcctaccttgtgagggttgcttcaatgattaggaatcattctgtaaagtctagcagagttccttgcatgttgtagcagtgattcagtaagtagcaaccctgtgatactattaccaccacctgctcactggtcaaaacctacacagctgtttcctcacgtccatcactggctctctaattccacttgttcattctgtgaccctagttattttctgaaaaattggttcttctcttttcccagagaccttctgatctccaaaaagaggagatgactacatttagcccctctcttataattccaggtagataactgcattttgtagcctctctttgtttttcttttgctgatctttgtctttattagattttcctcctttcctatttccccaaagacttatcagatgctcattgctttctaagatctaaaatgatactgtgttccctcatatgcatgcccttcctttctatatccttgacaccttactttcccattgtaacaataaaaaaagtatcaataaaataattattggcaaataaa

SEQ ID NO: 2812 - DNA, 1261 bp, Homo sapiens
  source 1..1261: mol_type = unassigned DNA
ggagaagtaagcggtggggggtgggagccatctggtactttgacagcattcaaaacagcatcggccataacaacagaaatggccagtcagtcccaaggtatccagcagcttctgcaagctgagaagcgggcagctgagaaggtggcagatgccagaaagaggaaggcccggcgactgaagcaggctacaaggcgccaggtgcagggcatgcagagctcccagcagagaaaccgagagcgtgtcctggcccagcttcttggcatggtctgcgacgtcaggccccaggtccaccccaactaccggatttctgcctagggccaccgtagggcctgactccttctgccagttccctccctcaaagaaatcctccaatcaaaatcacctcccaccataatccctgtcttctttccatcccctagaaatcctgggaggcaggatccaataattttcctgtgacacttataaatatcctgctcacatctgaatctccttgttgttctttaaccctcactgggactttgtaaacttccaagtcattctcacctaaaccctctgtgaaatttgtaatatggggaagtaggaatgtggaaaacatcctgacttcagtgtctggccgatgtgggtccctctcttgaccctgtcacttgctggctgtgaaaccaggacaagctacttaacttggtagcctcgatgtcctcctctgtgaaactgggatgataataatgcctaccttgtgagggttgcttcaatgattaggaatcattctgtaaagtctagcagagttccttgcatgttgtagcagtgattcagtaagtagcaaccctgtgatactattaccaccacctgctcactggtcaaaacctacacagctgtttcctcacgtccatcactggctctctaattccacttgttcattctgtgaccctagttattttctgaaaaattggttcttctcttttcccagagaccttctgatctccaaaaagaggagatgactacatttagcccctctcttataattccaggtagataactgcattttgtagcctctctttgtttttcttttgctgatctttgtctttattagattttcctcctttcctatttccccaaagacttatcagatgctcattgctttctaagatctaaaatgatactgtgttccctcatatgcatgcccttcctttctatatccttgacaccttactttcccattgtaacaataaaaaaagtatcaataaaataattattggcaaataaa

SEQ ID NO: 2813 - DNA, 1351 bp, Homo sapiens; identical to SEQ ID NO: 2807
  source 1..1351: mol_type = unassigned DNA

SEQ ID NO: 2814 - DNA, 1261 bp, Homo sapiens; identical to SEQ ID NO: 2806
  source 1..1261: mol_type = unassigned DNA

SEQ ID NO: 2815 - DNA, 1261 bp, Homo sapiens; identical to SEQ ID NO: 2806
  source 1..1261: mol_type = unassigned DNA

SEQ ID NO: 2816 - DNA, 1351 bp, Homo sapiens; identical to SEQ ID NO: 2807
  source 1..1351: mol_type = unassigned DNA

SEQ ID NO: 2817 - DNA, 1261 bp, Homo sapiens; identical to SEQ ID NO: 2806
  source 1..1261: mol_type = unassigned DNA

SEQ ID NO: 2818 - DNA, 1351 bp, Homo sapiens; identical to SEQ ID NO: 2807
  source 1..1351: mol_type = unassigned DNA

SEQ ID NO: 2819 - DNA, 1351 bp, Homo sapiens; identical to SEQ ID NO: 2807
  source 1..1351: mol_type = unassigned DNA

SEQ ID NO: 2820 - DNA, 662 bp, Homo sapiens
  source 1..662: mol_type = unassigned DNA
ctaacctgttgtaagcccgcagctttgggcctggtctctgctgctcccaggcggcccctttgggtactgcctgagcaagaagtgctggagaggaggaccagtcatcaataggaggatgagattgggagagacactcggtgcaggaggctgagtgagcaggggagcactaagacccaggggtagtggaggactgcagcaacgagctggaggaggagaaggaaggcccggcgactgaagcaggcaaaggaggaggcacagatggaggtggagcaataccgcagagagcgagagcacgaattccagagcaagcagcaggcggccatgggctcccaggggaacctgtctgctgaggtggagcaggctacaaggcgccaggtgcagggcatgcagagctcccagcagagaaaccgagagcgtgtcctggcccagcttcttggcatggtctgcgacgtcaggccccaggtccaccccaactaccggatttctgcctagggccaccgtagggcctgactccttctgccagttccctccctcaaagaaatcctccaatcaaaatcacctcccaccataatccctgtcttctttccatcccctagaaatcctgggaggcaggatccaataattttcctgtgacacttataaatatcctgctcacatctgaa

SEQ ID NO: 2821 - DNA, 1294 bp, Homo sapiens
  source 1..1294: mol_type = unassigned DNA
gtggaaccaggtatccagcagcttctgcaagctgagaagcgggcagctgagaaggtggcagatgccagaaagaggaaggcccggcgactgaagcaggcaaaggaggaggcacagatggaggtggagcaataccgcagagagcgagagcacgaattccagagcaagcagcaggcggccatgggctcccaggggaacctgtctgctgaggtggagcaggctacaaggcgccaggtgcagggcatgcagagctcccagcagagaaaccgagagcgtgtcctggcccagcttcttggcatggtctgcgacgtcaggccccaggtccaccccaactaccggatttctgcctagggccaccgtagggcctgactccttctgccagttccctccctcaaagaaatcctccaatcaaaatcacctcccaccataatccctgtcttctttccatcccctagaaatcctgggaggcaggatccaataattttcctgtgacacttataaatatcctgctcacatctgaatctccttgttgttctttaaccctcactgggactttgtaaacttccaagtcattctcacctaaaccctctgtgaaatttgtaatatggggaagtaggaatgtggaaaacatcctgacttcagtgtctggccgatgtgggtccctctcttgaccctgtcacttgctggctgtgaaaccaggacaagctacttaacttggtagcctcgatgtcctcctctgtgaaactgggatgataataatgcctaccttgtgagggttgcttcaatgattaggaatcattctgtaaagtctagcacagttccttgcatgttgtagcagtgattcagtaagtagcaaccctgtgatactattaccaccacctgctcactggtcaaaacctacacagctgtttcctcacgtccatcactggctctctaattccacttgttcattctgtgaccctagttattttctgaaaaattggttcttctcttttcccagagaccttctgatctccaaaaagaggagatgactacatttagcccctctcttataattccaggtagataactgcattttgtagcctctctttgtttttcttttgctgatctttgtctttattagattttcctcctttcctatttccccaaagacttatcagatgctcattgctttctaagatctaaaatgatactgtgttccctcatatgcatgcccttcctttctatatccttgacaccttactttcccattgtaacaataaaaaaagtatcaataaaataattattggcaaataaa

SEQ ID NO: 2822 - DNA, 1175 bp, Homo sapiens
  source 1..1175: mol_type = unassigned DNA
acgcgtctcccccacggtgcgaagtggtacggctcgcaggggcggggcccaggtcatgtgacgcggccgcggccgccattttgttctgcggtgctggtatttagagcgcagcggctgacgggccggatcgccttcgccgccgcccgcccgcaaaccttcgtgcccggcccgtcctcgcccccgcctccgccaccgcctcggcccgcagagcttgccccctccccacccgcagacatgtccgagtccaagagcggccccgagtatgcttcgtttttcgccgtcatgggcgcctcggccgccatggtcttcagcgccctgggcgctgcctatggcacagccaagagcggtaccggcattgcggccatgtctgtcatgcggccggagcagatcatgaagtccatcatcccagtggtcatggctggcatcatcgccatctacggcctggtggtggcagtcctcatcgccaactccctgaatgacgacatcagcctctacaagagcttcctccagctgggcgccggcctgagcgtgggcctgagcggcctggcagccggctttgccatcggcatcgtgggggacgctggcgtgcggggcaccgcccagcagccccgactattcgtgggcatgatcctgattctcatcttcgccgaggtgctcggcctctacggtctcatcgtcgccctcatcctctccacaaagtagaccctctccgagcccaccagccacagaatattatgtaaagaccacccctcctcattccagaacgaacagcctgacacatacgcacggggccgccgcccccagtagttggtcttgtacatgcgcagtgtcctagtgcccatcgtctgtttccccggccttgcccccgcccgccccgtgccgtggacatctgggcccactcatcgcccctccaggcccccggcgccccaccccctagagtgctctgtgtatgcggatgatttagaattgtcatttctctttactggatgtttatttataaagatctggcctgttcctgcgtctgcggagcggcccttgtctcccagctatctataaccttagctagagtgtcgccttgtgggttcctgttgctgagacttcctggatggagccgccctcaccgccgggcccgtggccctgcgcggagctgtgtccaataaagttcttggatgtga

SEQ ID NO: 2823 - DNA, 944 bp, Homo sapiens
  source 1..944: mol_type = unassigned DNA
gggcgggcggacagactgcgggacggacggtggacgctgggacgcgtttgtagctccggccccgccgttccgacccccgccgccgtcgccgccatgacggggctagcactgctctactccggggtcttcgtggccttctgggcctgcgcgctggccgtgggttcctgacggagacttcgcccttcatgtggtccaacctgggcattggcctagctatctccctgtctgtggttggggcagcctggggcatctatattaccggctcctccatcattggtggaggagtgaaggcccccaggatcaagaccaagaacctggtcagcatcatcttctgtgaggctgtggccatctacggcatcatcatggcaattgtcattagcaacatggctgagcctttcagtgccacagaccccaaggccatcggccatcggaactaccatgcaggctactccatgtttggggctggcctcaccgtaggcctgtctaacctcttctgtggagtctgcgtgggcatcgtgggcagtggggctgccctggccgatgctcagaaccccagcctctttgtaaagattctcatcgtggagatctttggcagcgccattggcctctttggggtcatcgtcgcaattcttcagacctccagagtgaagatgggtgactagatgatatgtgtgggtggggccgtgcctcacttttatttattgctggttttcctgggacagctggagctgtgtcccttagcctttcagaggcttggtgttcagggccctccctgcactcccctcttgctgcgtgttgatttggaggcactgcagtccaggccgagtcctcagtgcggggagcaggctgctgctgctgactctgtgcagctgcgcacctgtgtcccccacctccaccctcaacccatcttcctagtgtttgtgaaataaacttggtatttgtct

SEQ ID NO: 2824 - DNA, 370 bp, Homo sapiens
  source 1..370: mol_type = unassigned DNA
gtgggcagtggggctgccctggccgatgctcagaaccccagcctctttgtaaagattctcatcgtggagatctttggcagcttggcctctttggggtcatcgtcgcaattcttcagacctccagagtgaagatgggtgactagatgatatgtgtgggtggggccgtgcctcacttttatttattgctggttttcctgggacagctggagctgtgtcccttagcctttcagaggcttggtgttcagggccctccctgcactcccctcttgctgcgtgttgatttggaggcactgcagtccaggccgagtcctcagtgcggggagcaggctgctgctgctgactctgtgcagctgcgcacctgtgtccccca

SEQ ID NO: 2825 - DNA, 865 bp, Homo sapiens
  source 1..865: mol_type = unassigned DNA
cgggcggacagactgcgggacggacggtggacgctgggacgcgtttgtagctccggccccgccgttccgacccccgccgccgtcgccgccatgacggggctagcactgctctactccggggtcttcgtggccttctgggcctgcgcgctggccgtgggtgaggccgggtcctggcgggcgggagcagcatcgcggccgagctggccgggtcggaactcggcggggaagtggcctgcggggaatactggccccccgcgcgctctgcacccgaggctctggggacttgcgcctgcgagggcctctgactccgacaaaggagacccggatttccagctgcttgaggaggggttcctgacggagacttcgcccttcatgtggtccaacctgggcattggcctagctatctccctgtctgtggttggggcagcctggggcatctatattaccggctcctccatcattggtggaggagtgaaggcccccaggatcaagaccaagaacctggtcagcatcatcttctgtgaggctgtggccatctacggcatcatcatggcaattgtcattagcaacatggctgagcctttcagtgccacagaccccaaggccatcggccatcggaactaccatgcaggctactccatgtttggggctggcctcaccgtaggcctgtctaacctcttctgtggagtctgcgtgggcatcgtgggcagtggggctgccctggccgatgctcagaaccccagcctctttgtaaagattctcatcgtggagatctttggcagcgccattggcctctttggggtcatcgtcgcaattcttcagacctccagagtgaagatgggtgactagatgatatgtgtgggtg

SEQ ID NO: 2826 - DNA, 1298 bp, Homo sapiens
  source 1..1298: mol_type = unassigned DNA
acaggctaggacgcacggctgccagagaggacgccttaggggcccgcgagcaggctcgggaataaaacagggctggcagggcgaggtggagagactcgagaaggaccggccagatgtcgaagttcctagagaggagggcgcccaagcctccgccgagacgcgtgactacaactaccacaatccccagcgcctgcggttccagcgtcgccttgctctagacgggcggcggcgctgcgcggggaaccggcgtggggtcacgtggtaccggcgcatcacgtgggcgagttaggtgacgctgcggggcgggcggacagactgcgggacggacggtggacgctgggacgcgtttgtagctccggccccgccgttccgacccccgccgccgtcgccgccatgacggggctagcactgctctactccggggtcttcgtggccttctgggcctgcgcgctggccgtgggagtctgctacaccatttttgatttgggcttccgctttgatgtggcatggttcctgacggagacttcgcccttcatgtggtccaacctgggcattggcctagctatctccctgtctgtggttggggcagcctggggcatctatattaccggctcctccatcattggtggaggagtgaaggcccccaggatcaagaccaagaacctggtcagcatcatcttctgtgaggctgtggccatctacggcatcatcatggcaattgtcattagcaacatggctgagcctttcagtgccacagaccccaaggccatcggccatcggaactaccatgcaggctactccatgtttggggctggcctcaccgtaggcctgtctaacctcttctgtggagtctgcgtgggcatcgtgggcagtggggctgccctggccgatgctcagaaccccagcctctttgtaaagattctcatcgtggagatctttggcagcgccattggcctctttggggtcatcgtcgcaattcttcagacctccagagtgaagatgggtgactagatgatatgtgtgggtggggccgtgcctcacttttatttattgctggttttcctgggacagctggagctgtgtcccttagcctttcagaggcttggtgttcagggccctccctgcactcccctcttgctgcgtgttgatttggaggcactgcagtccaggccgagtcctcagtgcggggagcaggctgctgctgctgactctgtgcagctgcgcacctgtgtcccccacctccaccctcaacccatcttcctagtgtttgtgaaataaacttggtatttgtctgggtc

SEQ ID NO: 2827 - DNA, 411 bp, Homo sapiens
  source 1..411: mol_type = unassigned DNA
acgcgcttccctgccactgggttagggaaggcttgccggaaggacgatttcggaggacagcaggtgttagccaggcagcggagcgagcgccaacaggcgcactggggcggagagacgccgtgagcaaggttcctgacggagacttcgcccttcatgtggtccaacctgggcattggcctagctatctccctgtctgtggttggggcagcctggggcatctatattaccggctcctccatcattggtggaggagtgaaggcccccaggatcaagaccaagaacctggtcagcatcatcttctgtgaggctgtggccatctacggcatcatcatggcaattgtcattagcaacatggctgagcctttcagtgccacagaccccaaggccatcggccatcggaactaccatgca

SEQ ID NO: 2828 - DNA, 825 bp, Homo sapiens
  source 1..825: mol_type = unassigned DNA
gagctgaactgctttcttctctgcttccacaacaggttcctgacggagacttcgcccttcatgtggtccaacctgggcattggcctagctatctccctgtctgtggttggggcagcctggggcatctatattaccggctcctccatcattggtggaggagtgaaggcccccaggatcaagaccaagaacctggtcagcatcatcttctgtgaggctgtggccatctacggcatcatcatggcaattgtcattagcaacatggctgagcctttcagtgccacagaccccaaggccatcggccatcggaactaccatgcaggctactccatgtttggggctggcctcaccgtaggcctgtctaacctcttctgtggagtctgcgtgggcatcgtgggcagtggggctgccctggccgatgctcagaaccccagcctctttgtaaagattctcatcgtggagatctttggcagcgccattggcctctttggggtcatcgtcgcaattcttcagacctccagagtgaagatgggtgactagatgatatgtgtgggtggggccgtgcctcacttttatttattgctggttttcctgggacagctggagctgtgtcccttagcctttcagaggcttggtgttcagggccctccctgcactcccctcttgctgcgtgttgatttggaggcactgcagtccaggccgagtcctcagtgcggggagcaggctgctgctgctgactctgtgcagctgcgcacctgtgtcccccacctccaccctcaacccatcttcctagtgtttgtgaaataaacttggtatttgtctgggtca

SEQ ID NO: 2829 - DNA, 1685 bp, Homo sapiens
  source 1..1685: mol_type = unassigned DNA
tgcggggcgggcggacagactgcgggacggacggtggacgctgggacgcgtttgtagctccggccccgccgttccgacccccgccgccgtcgccgccatgacggggctagcactgctctactccggggtcttcgtggccttctgggcctgcgcgctggccgtgggagtctgctacaccatttttgatttgggcttccgctttgatgtggcatggttcctgacggagacttcgcccttcatgtggtccaacctgggcattggcctagctatctccctgtctgtggttggggcagcctggggcatctatattaccggctcctccatcattggtggaggagtgaaggcccccaggatcaagaccaagaacctggtcagcatcatcttctgtgaggctgtggccatctacggcatcatcatggcaattgtcattagcaacatggctgagcctttcagtgccacagaccccaaggccatcggccatcggaactaccatgcaggctactccatgtttggggctggcctcaccgtaggcctgtctaacctcttctgtggagtctgcgtgggcatcgtgggcagtggggctgccctggccgatgctcagaaccccagcctctttgtaaagattctcatcgtggagatctttggcagcgccattggcctctttggggtcatcgtcgcaattcttcaggtgatgaatccccttgggaagcctctgtgtccttgtccccaacctagccttaccctccttctggagaagctgaagtgctctccttctctacctataactatagattcccccaaacagcttccacctcctcatttccatcttctggttttctcctacaggggctctctatttttgtctctgatttggtgtcactgacaacagccctgttctttttcccccctttctaatgcgttgtatctgtatagcacttagtcctccctctttctgttctctcattttatctgccatgcttttcatgtctccagtctgtatttgtgatctagactagaatggaattttgtctgtctatatcagtctgtcatggtgtgtttgactgtctctcggagctatgtgtatctccctctcacatgcctgtcagtaggacaccattgtctaaattgtgtgtgtctagtctgtctgacagtgtgtgagtttgtgactaaggatcagcctgagggtctgagtgtgactgtgggtgcttgactgagttgattcttagtgactagctttatccatatgccacttctctccgtctgtcccacagcgtaactctgtggttgtctgtccctgtctgccttgtctgtcacagtgtgtccatcctggttagtcatatatctcttgtggtctgtccatccaaccatgtgctagatgtcatcttctatcatttgtcactgccttacctattcctctgtccctgcctgatttctcctgttctttttttgcagacctccagagtgaagatgggtgactagatgatatgtgtgggtggggccgtgcctcacttttatttattgctggttttcctgggacagctggagctgtgtcccttagcctttcagaggcttggtgttcagggccctccctgcactcccctcttgctgcgtgttgatttggaggcactgcagtccaggccgagtcctcagtgcggggagcaggctgctgctgctgactctgtgca

SEQ ID NO: 2830 - DNA, 1402 bp, Homo sapiens
  source 1..1402: mol_type = unassigned DNA
tcccattggctgagaagggtcatgaggatgaactgtgcagtcacctggcaggaaccggaacccgcggttataaagtaaaggaacccgagatctgcgcaggggttccctttgccgatttctctcacctcacctttcaaacctaaactcgagcctactgttcaccggcctagcattgctctcgccatggctctcagcgatgctgacgtgcaaaagcagataaagcatatgatggctttcattgaacaagaagccaatgagaaagcagaagaaatagatgcaaaggcagaagaagagttcaacatagagaaaggtcggcttgtgcaaacccaaagactaaagattatggaatattatgagaagaaagagaaacagattgagcagcagaagaaaattcagatgtccaatttgatgaatcaagcgagactcaaagtcctcagagcaagagatgaccttatcacagacctactaaatgaagcaaaacagagactcagcaaggtggtaaaagatacaaccaggtaccaagtgctgctggatggactggttctccagggtttgtaccagttgctggagccccgaatgattgttcgttgcaggaaacaagatttccctctggtaaaggctgcagtgcagaaggcaattcctatgtacaaaattgccaccaaaaacgatgttgatgtccaaattgaccaggagtcctacctgcctgaagacatagctggtggagttgagatctataatggagatcgtaaaataaaggtttccaacaccctggaaagccggctggatctcatagcccagcagatgatgccagaagtccggggagccttgtttggtgcaaatgccaacaggaagtttttggactaagccttcaggaggtggagctcgtcgtcagctctcctgctgtgatgtggaagcttctgatatttgaagaaacacgaatgtctctgtagcttcctcttcactgccccagtattgctctgtatttatcagcgatgcccctctgtcactcatgccttgcctaattgttcacaatggtggaaagcttcatgtaatatgatcaggacccacctccagttcttctgaaagtgtgacagtgtccagccggttctgcagcactaggggagggggcagatggtggttgcatgggcttcctgggtctccactctccgtctggcctaaaggtgatgtatttggtgtttggccctgcagtccccactcttgaggcttaaggcgcatgtggcacaccactccttccagcagtagtcgctttactgttacctgtttaggcctagaagttttccctcatctgtaaatgtgatttaaaatctaagccatgaatatgctttatttattaaaagagttatgcggatttaatgtgatttctagtgtaaggcactacaaa

SEQ ID NO: 2831 - DNA, 1208 bp, Homo sapiens
  source 1..1208: mol_type = unassigned DNA
aaagtaaaggaacccgagatctgcgcaggggttccctttgccgatttctctcacctcacctttcaaacctaaactcgagcctactgttcaccggcctagcattgctctcgccatggctctcagcgatgctgacgtgcaaaagcagataaagcatatgatggctttcattgaacaagaagccaatgagaaagcagaagaaatagatgcaaaggcagaagaagagttcaacatagagaaaggtcggcttgtgcaaacccaaagactaaagattatggaatattatgagaagaaagagaaacagattgagcagcagaagaaaattcagatgtccaatttgatgaatcaagcgagactcaaagtcctcagagcaagagatgaccttatcacaggtttgtaccagttgctggagccccgaatgattgttcgttgcaggaaacaagatttccctctggtaaaggctgcagtgcagaaggcaattcctatgtacaaaattgccaccaaaaacgatgttgatgtccaaattgaccaggagtcctacctgcctgaagacatagctggtggagttgagatctataatggagatcgtaaaataaaggtttccaacaccctggaaagccggctggatctcatagcccagcagatgatgccagaagtccggggagccttgtttggtgcaaatgccaacaggaagtttttggactaagccttcaggaggtggagctcgtcgtcagctctcctgctgtgatgtggaagcttctgatatttgaagaaacacgaatgtctctgtagcttcctcttcactgccccagtattgctctgtatttatcagcgatgcccctctgtcactcatgccttgcctaattgttcacaatggtggaaagcttcatgtaatatgatcaggacccacctccagttcttctgaaagtgtgacagtgtccagccggttctgcagcactaggggagggggcagatggtggttgcatgggcttcctgggtctccactctccgtctggcctaaaggtgatgtatttggtgtttggccctgcagtccccactcttgaggcttaaggcgcatgtggcacaccactccttccagcagtagtcgctttactgttacctgtttaggcctagaagttttccctcatctgtaaatgtgatttaaaatctaagccatgaatatgctttatttattaaaagagttatgcgga

SEQ ID NO: 2832 - DNA, 994 bp, Homo sapiens
  source 1..994: mol_type = unassigned DNA
ataaagtaaaggaacccgagatctgcgcaggggttccctttgccgatttctctcacctcacctttcaaacctaaactcgagcctactgttcaccggcctagcattgctctcgccatggctctcagcgatgctgacgtgcaaaagcaggcagaagaagagttcaacatagagaaaggtcggcttgtgcaaacccaaagactaaagattatggaatattatgagaagaaagagaaacagattgagcagcagaagaaaattcagatgtccaatttgatgaatcaagcgagactcaaagtcctcagagcaagagatgaccttatcacagacctactaaatgaagcaaaacagagactcagcaaggtggtaaaagatacaaccaggtaccaagtgctgctggatggactggttctccagggtttgtaccagttgctggagccccgaatgattgttcgttgcaggaaacaagatttccctctggtaaaggctgcagtgcagaaggcaattcctatgtacaaaattgccaccaaaaacgatgttgatgtccaaattgaccaggagtcctacctgcctgaagacatagctggtggagttgagatctataatggagatcgtaaaataaaggtttccaacaccctggaaagccggctggatctcatagcccagcagatgatgccagaagtccggggagccttgtttggtgcaaatgccaacaggaagtttttggactaagccttcaggaggtggagctcgtcgtcagctctcctgctgtgatgtggaagcttctgatatttgaagaaacacgaatgtctctgtagcttcctcttcactgccccagtattgctctgtatttatcagcgatgcccctctgtcactcatgccttgcctaattgttcacaatggtggaaagcttcatgtaatatgatcaggacccacctccagttcttctgaaagtgtgacagtgtccagccggttctgcagcactaggggagggggc

SEQ ID NO: 2833 - DNA, 1716 bp, Homo sapiens
  source 1..1716: mol_type = unassigned DNA
agagccacgcccccttatggtcacgtgaggcgcttgcgcgtcacctgacgcacttgacagcccgctgaggacgcagcgtcagctgacctggggagtcgcgattcgtgccggccggtcctggttctccggtcccgccgctcccgcagcagccatgtcgttcttcccggagctttactttaacgtggacaatggctacttggagggactggtgcgcggcctgaaggccggggtgctcagccaggccgactacctcaacctggtgcagtgcgagacgctagaggacttgaaactgcatctgcagagcactgattatggtaacttcctggccaacgaggcatcacctctgacggtgtcagtcatcgatgaccggctcaaggagaagatggtggtggagttccgccacatgaggaaccatgcctatgagccactcgccagcttcctagacttcattacttacagttacatgatcgacaacgtgatcctgctcatcacaggcacgctgcaccagcgctccatcgctgagctcgtgcccaagtgccacccactaggcagcttcgagcagatggaggccgtgaacattgctcagacacctgctgagctctacaatgccattctggtggacacgcctcttgcggcttttttccaggactgcatttcagagcaggaccttgacgagatgaacatcgagatcatccgcaacaccctctacaaggcctacctggagtccttctacaagttctgcaccctactgggcgggactacggctgatgccatgtgccccatcctggagtttgaagcagaccgccgcgccttcatcatcaccatcaattctttcggcacagagctgtccaaagaggaccgtgccaagctctttccacactgtgggcggctctaccctgagggcctggcgcagctggctcgggctgacgactatgaacaggtcaagaacgtggccgattactacccggagtacaagctgctcttcgagggtgcaggtagcaaccctggagacaagacgctggaggaccgattctttgagcacgaggtaaagctgaacaagttggccttcctgaaccagttccactttggtgtcttctatgccttcgtgaagctcaaggagcaggagtgtcgcaacatcgtgtggatcgctgaatgtatcgcccagcgccaccgcgccaaaatcgacaactacatccctatcttctagcgtcctggcccaaggctctcaattgcactctttgtgtgtgtgtgtgtgtgtgtgcgcgtgtgtgtgcgtgtgtgtgtatgtggtctgtgacaagcctgtggctcacctgcctgtccggggtgtagtacgctgtcctagcggctgcccagttctcctgaccctcttagagactgttcttaggcctgaaaaggggctgggcacccccccccaccaaggatggacgaagaccccctccagagcaaggaggccccctcagccctgtggttacagccgctgatgtatctaagaagcatgtcactttcatgttcctccctaactccctgacctgagaaccctggggcctgggggcagtttgagcctcctctcccttctgtgggtcgctcccagagccatggcccatgggaaggacagagtgtgtgtgtccttggggcctggggggatgttgctcctcagctccctccctcagccctgcccctctgagacaataaaactgccctctctaaggccaa

SEQ ID NO: 2834 - DNA, 1254 bp, Homo sapiens
  source 1..1254: mol_type = unassigned DNA
cctgcacttcaagggcttctctctccggcagcctgtggacttccctggagcacttgctggagcagagatcacaggaaggtcactctggccagcaagtagcactgttagaccagtcaagggctgaggaatggatggtgccacaagggatgccagagggacttgtccctgagtgatgacagtccagtgacagtgctgatggtccatgcctgtcagacttgaaactgcatctgcagagcactgattatggtaacttcctggccaacgaggcatcacctctgacggtgtcagtcatcgatgaccggctcaaggagaagatggtggtggagttccgccacatgaggaaccatgcctatgagccactcgccagcttcctagacttcattacttacagttacatgatcgacaacgtgatcctgctcatcacaggcacgctgcaccagcgctccatcgctgagctcgtgcccaagtgccacccactaggcagcttcgagcagatggaggccgtgaacattgctcagacacctgctgagctctacaatgccattctggtggacacgcctcttgcggcttttttccaggactgcatttcagagcaggaccttgacgagatgaacatcgagatcatccgcaacaccctctacaaggcctacctggagtccttctacaagttctgcaccctactgggcgggactacggctgatgccatgtgccccatcctggagtttgaagcagaccgccgcgccttcatcatcaccatcaattctttcggcacagagctgtccaaagaggaccgtgccaagctctttccacactgtgggcggctctaccctgagggcctggcgcagctggctcgggctgacgactatgaacaggtcaagaacgtggccgattactacccggagtacaagctgctcttcgagggtgcaggtagcaaccctggagacaagacgctggaggaccgattctttgagcacgaggtaaagctgaacaagttggccttcctgaaccagttccactttggtgtcttctatgccttcgtgaagctcaaggagcaggagtgtcgcaacatcgtgtggatcgctgaatgtatcgcccagcgccaccgcgccaaaatcgacaactacatccctatcttctagcgtcctggcccaaggctctcaattgcactctttgtgtgtgtgtgtgtgtgtgtgcgcgtgtgtgtgcgtgtgtgtgtatgtggtctgtgacaagcctgtggctcacctgcctgtc

SEQ ID NO: 2835 - DNA, 1262 bp, Homo sapiens
  source 1..1262: mol_type = unassigned DNA
gttctccggtcccgccgctcccgcagcagccatgtcgttcttcccggagctttactttaacgtggacaatggctacttggagggactggtgcgcggcctgaaggccggggtgctcagccaggccgactacctcaacctggtgcagtgcgagacgctagaggacttgaaactgcatctgcagagcactgattatggtaacttcctggccaacgaggcatcacctctgacggtgtcagtcatcgatgaccggctcaaggagaagatggtggtggagttccgccacatgaggaaccatgcctatgagccactcgccagcttcctagacttcattacgcaggagtcagaggctgggacacctgaagggccagggaacatgcccaagctaggaagcaggccctctcctggccacaggcctcctttcctgagagtctccttgctgccctggcctccatcaagttacagttacatgatcgacaacgtgatcctgctcatcacaggcacgctgcaccagcgctccatcgctgagctcgtgcccaagtgccacccactaggcagcttcgagcagatggaggccgtgaacattgctcagacacctgctgagctctacaatgccattctggtggacacgcctcttgcggcttttttccaggactgcatttcagagcaggaccttgacgagatgaacatcgagatcatccgcaacaccctctacaaggcctacctggagtccttctacaagttctgcaccctactgggcgggactacggctgatgccatgtgccccatcctggagtttgaagcagaccgccgcgccttcatcatcaccatcaattctttcggcacagagctgtccaaagaggaccgtgccaagctctttccacactgtgggcggctctaccctgagggcctggcgcagctggctcgggctgacgactatgaacaggtcaagaacgtggccgattactacccggagtacaagctgctcttcgagggtgcaggtagcaaccctggagacaagacgctggaggaccgattctttgagcacgaggtaaagctgaacaagttggccttcctgaaccagttccactttggtgtcttctatgccttcgtgaagctcaaggagcaggagtgtcgcaacatcgtgtggatcgctgaatgtatcgcccagcgccaccgcgccaaaatcgacaactacatccctatcttctagcgtcctggcccaaggctctcaattgcactctttgtgtgtgtgtgtgtgtgtg

SEQ ID NO: 2836 - DNA, 5612 bp, Homo sapiens
  source 1..5612: mol_type = unassigned DNA
gctgggctggcacgtgacttgttctgtgttcgcttgggtagaggaagccgtgaggccggagcttaggtcgggaagggatggatcgctgagccgatagcgtccgctaggctgtctgcctcgaatctctcttgatttttgaggaaatacctagtaacaaacatgactgagttctggcttatatctgctcctggggagaaaacctgtcagcaaacatgggagaaattgcatgcggcaacttcaaagaacaataatcttgctgtcacttccaagttcaatattcctgacttaaaggttggcacgttggatgtcttggttggcttgtcagatgaactggctaaactggatgcatttgtagaaggagtggttaagaaagtagctcaatacatggctgatgtattggaagatagcaaagacaaagttcaagagaatctgttggctaatggagtggacttggttacttatataacaaggttccagtgggacatggccaaatatccaatcaagcagtccctgaaaaatatttctgaaataattgccaagggagtaactcagattgataatgacctgaaatctcgagcatctgcatacaataacctgaaaggaaatcttcagaatttggaacgaaagaatgcaggaagtttgctaactagaagtctagcagaaattgtgaagaaggatgactttgttcttgattcagagtatctcgtcacattactggtagtagttcccaagttaaaccacaacgactggattaagcagtatgaaacactagccgaaatggtagttccaaggtctagcaatgttctttcagaggaccaagacagttacctgtgtaatgtcaccttgtttaggaaggcagttgatgacttcagacacaaagccagagaaaacaaattcattgttcgtgacttccagtataatgaagaggagatgaaagcagataaagaagaaatgaacaggctttctactgataagaaaaaacaatttggaccacttgtacggtggctgaaagtgaattttagtgaagcatttattgcatggattcacgtgaaagcattacgggttttcgttgagtctgttttaaggtatggcttgccagtgaacttccaagcaatgctacttcagcccaataagaaaactttgaagaaactgagagaagtattacatgaattgtataaacatctagacagcagtgcagcagctattattgatgctcctatggatattccaggtttaaacctgagtcaacaagaatactacccctatgtgtactacaagattgattgcaacttgctggaattcaagtgaaaatgggctcctcccccgacaatcctgtccttgtgtttgtgtgtgctaacagaaataagttgcagtatggtcgtacttttaactctagtatcctttgcttgcttcttacgccctttcctaggtgaattctcccacagtggtctgtatctcaacattttctttttaaaggaaaaaatatatatatatagtttctttttattgatcaggtctgtaaatgtgtactaaaaaaatcagagtttatttataaacaaaatagtttatttaaagagaaggtctcttccttattgatatcatggtatgcattaattccatttgttactattgtgcacaaaagccctgttcacaggggaatggtgtaaacatttatactgttttgttcactgtatttagtagacataactgttgaatagttactgaatcatgatgtaaagaatatgtgaccatcttcaggtatgggatttctgaacgtttcaaatttcaatcaatgagcactgtcaacacccacaggagagaataaaattacctgtgcaaaggtgtattgtggtgtgtgtaacttaagattacagttctgtttgagagttaaatgatgtcatagctcacttgctatgctgcttccaggattttgttatatgctgaggtgtaaccatttgtgttgtctgactttcgtatgatttaattgagccaaatttgggtcagaacacaaatttgaagatgacttttcagtatatgatgggtatttacatttgaacactagaattttaggtctctcaaataattaagaatagagccagttttgaataaagtctagcagaactatgcagctttagtcatttgttttgtctaagtctgtattttatgtgttgtcttcttaagatctataattttggcatttatgtcatttgtgacatagtctgaaaatagagacattgttggcctttaaaatctcagaaatgaatgacttaatttagtgtcctgaaagagcttttaaaagaggattttgtggcaatgtttctcttactacgtactcacaggtttgcaaatgggaaaaaagtttacatttcagtttaggggcatatctaagctatgctattccctttagaaaattagcctccaaaatcttttgtttcaaaatattatattatttcataaataatttcaagcaaatacagacatccacaatgtagaacatgagagaccccctccctcaatttccacctcccaagggaagtttatgtatttttctaggcccttttctatgtctttacatctctgtctcacacacacacacgtatacacacacacagtttatttttaataaaataggattataccacacacatcctgtcacttgcttttttgcttaagagtatatctaagagaatcctttgtgtcagtgaagctggagctacctcattcttttaactggctgcgtggcgttccattgagtgtctgtcatcatgtgtttagccgagtggatggatagtctgcttgtttttagtttttgctcttaacaaacactgctgcagtcagcatccttgcacagatttctttgtatacttgtattagtatttctgtaagatctgagaagtggaatttgtagggtcataggttatgtacacttaagtttttgacactcactgccaagtcatctgtcagaattctaaactaaagacatgtttggagtgtggatttatcttcagtttttctttggacaagaggaagctgtgaaagattttgctatcagaaaattttggttctttgtcttttgcacatgttctttgagtcttagtatctgtaacgtggcgctactctctctatcatgggggggcatgttttgacattaaattgacttttaagaaaaacatgtcactaacctgaagctcagccacacagtgacttttaaggttttatttagactttactgttgttctcatgagagtaggtacagactgcataaggtttagaatcccagcatatgtctgaaacgacgggactttcactgtgatttccaccagagaaattatagcagagtggctgagcatgtgctctgaggccaggccccagctctgctgctgacgagctgtgtggtcctgggcagagtggtctccgagttccagtccctcctctgtaaaatgggcatgattagagtgcccaccgcattagggatgttggggtgagtcagtgtgaccccacgtgcacagaaagtgctgcgagtggtgcatggtgagaggttgatgcaggtacttagcccttggggaacacaggtagttccttttcactgtgtttaatttgggaaaatccagatccacatcattgtagagtctgagggttagaaggaagtcattgtgtctaacataacaacagagcagtttgtgtcactgagctccagtctgtgctggattattgatattgttggtggcggtcaccattcctggaaagggactgtcccaagccacttaccttcccgaggagtctgctggttctccttgaggatagtgcttagataacagactcattaaacatttactgagtgtctgtcagggatcattcacatccacatcatcctcccggcccctccccgtgttgttcatggagggagtactggcggtccccattttcatgtatggagacttcaggtgaaagaagttaagtgaattctttgttgagtcacaaatcttgagccagtcagaatttgaacctaagatttttgactgctggttgtcacacttcccgccccacactcaactgttgtgtgaatgagccagacacattgcttaacctgagtccgagatggacaatggtataggaaagatattcggtatggagaatcagatgttaacttgtgttgctatttttgttttgttttgttttgttttgtttttgagacaaggtcttgctctgtcacccaggctagagtgcagtggcatgatcagggcttactgcagcctcaccctcgatttcctgggctcaagcaatcctcccacctcagcccccaagtagctgggcctacaggtgcgtgctaccacgcctggccaattttttaaattttagcacagatgaggtctcactatgttgcccgggctggtctcgaactcctgagctcaagggatcctcccgcctcagcctcccaaagtgctggtgttacaggcataagccaccacgcctggcctgtgttgctattatatttggcaggaacccagagtccagaacatttcatctatgatgggttagataatgtgtctagttgtttgcatgccaatttcagtagcctcagttattcaacctaggagatttttctacctctttactaccctgctgaagttgctcttcagcagaaaatctttgtggaacacattccacactttgaaatcttcgtggaacaaaagatatttgtggaaccaatctttgtggaacatattccagctttttgaatgagtgcatatccagtagtacctttaaagtaacactttgtacataacaaatactcagcaaatgtgaaactttatttgctcttacttcaaaattagtccaaaatgttggaaataaaatataagacattgatctagatatgaggtttttctccttcattctcagctgtcgaagaaatcaaagtagcatatgcacaaggttaaaaaccacatatacaaatactatagaacagcttataatgaaaaccttgcctgcctttataaaaaatgtgattatcttcttctgttaatgtcaataaaagatggtttgtcctagaaggtctataaatggtattatgttctggaggaaacctagcaaaaactttgctagtttagtacttgtctctaaattgatgttcacccatttcaatattgcacttattaatggtctttatttttctagcatagataacaattgattctttagattcatatatggaggtaattcttgctttctaaagaaaggaatatggcacattggaaccattttattcaccagtggatttacccttagagtatttttagatctgagctgatgacttgtgagagaaaaagggaacagagtaaagccatggaagccatgaacagtaagagactgccgcctggcatggtttcttcttctgcagaagatgaaactgaggagaaacaagacaacatccttcataccaggaatggtcaagataatgcaagaagaaaaaagctttcaaacaaatcagaaggcagtcaacaaacagaaagggggacattccttccctggcagttactcaaaactgaaattgcttattgtgtacaccggggcttgtacttggggaatttaataaaaatgctcattaccaa

SEQ ID NO: 2837 - DNA, 2130 bp, Homo sapiens
  source 1..2130: mol_type = unassigned DNA
agaggaagccgtgaggccggagcttaggtcgggaagggatggatcgctgagccgatagcgtccgctaggctgtctgcctcggtacctgttactgctgctacttcctcgtttgacaccttcctggaatctctcttgatttttgaggaaatacctagtaacaaacatgactgagttctggcttatatctgctcctggggagaaaacctgtcagcaaacatgggagaaattgcatgcggcaacttcaaagaacaataatcttgctgtcacttccaagttcaatattcctgacttaaaggttggcacgttggatgtcttggttggcttgtcagatgaactggctaaactggatgcatttgtagaaggagtggttaagaaagtagctcaatacatggctgatgtattggaagatagcaaagacaaagttcaagagaatctgttggctaatggagtggacttggttacttatataacaaggttccagtgggacatggccaaatatccaatcaagcagtccctgaaaaatatttctgaaataattgccaagggagtaactcagattgataatgacctgaaatctcgagcatctgcatacaataacctgaaaggaaatcttcagaatttggaacgaaagaatgcaggaagtttgctaactagaagtctagcagaaattgtgaagaaggatgactttgttcttgattcagagtatctcgtcacattactggtagtagttcccaagttaaaccacaacgactggattaagcagtatgaaacactagccgaaatggtagttccaaggtctagcaatgttctttcagaggaccaagacagttacctgtgtaatgtcaccttgtttaggaaggcagttgatgacttcagacacaaagccagagaaaacaaattcattgttcgtgacttccagtataatgaagaggagatgaaagcagataaagaagaaatgaacaggctttctactgataagaaaaaacaatttggaccacttgtacggtggctgaaagtgaattttagtgaagcatttattgcatggattcacgtgaaagcattacgggttttcgttgagtctgttttaaggtatggcttgccagtgaacttccaagcaatgctacttcagcccaataagaaaactttgaagaaactgagagaagtattacatgaattgtataaacatctagacagcagtgcagcagctattattgatgctcctatggatattccaggtttaaacctgagtcaacaagaatactacccctatgtgtactacaagattgattgcaacttgctggaattcaagtgaaaatgggctcctcccccgacaatcctgtccttgtgtttgtgtgtgctaacagaaataagttgcagtatggtcgtacttttaactctagtatcctttgcttgcttcttacgccctttcctaggtgaattctcccacagtggtctgtatctcaacattttctttttaaaggaaaaaatatatatatatagtttctttttattgatcaggtctgtaaatgtgtactaaaaaaatcagagtttatttataaacaaaatagtttatttaaagagaaggtctcttccttattgatatcatggtatgcattaattccatttgttactattgtgcacaaaagccctgttcacaggggaatggtgtaaacatttatactgttttgttcactgtatttagtagacataactgttgaatagttactgaatcatgatgtaaagaatatgtgaccatcttcaggtatgggatttctgaacgtttcaaatttcaatcaatgagcactgtcaacacccacaggagagaataaaattacctgtgcaaaggtgtattgtggtgtgtgtaacttaagattacagttctgtttgagagttaaatgatgtcatagctcacttgctatgctgcttccaggattttgttatatgctgaggtgtaaccatttgtgttgtctgactttcgtatgatttaattgagccaaatttgggtcagaacacaaatttgaagatgacttttcagtatatgatgggtatttacatttgaacactagaattttaggtctctcaaataattaagaatagagccagttttgaataaagtctagcagaactatg

SEQ ID NO: 2838 - DNA, 2093 bp, Homo sapiens
  source 1..2093: mol_type = unassigned DNA
gtggagaaagcggcagctgtcccagcggaagcgacgaagggacgggacccgggagcctggacgagtccgagcgcgtcacctcctcacgctgcggctgtcgcccgtgtcccgccggcccgttccgtgtcgccccgcagtgctgcggccgccgcggcaccatggctgtgtttgtcgtgctcctggcgttggtggcgggtgttttggggaacgagtttagtatattaaaatcaccagggtctgttgttttccgaaatggaaattggcctataccaggagagcggatcccagacgtggctgcattgtccatgggcttctctgtgaaagaagacctttcttggccaggactcgcagtgggtaacctgtttcatcgtcctcgggctaccgtcatggtgatggtgaagggagtgaacaaactggctctacccccaggcagtgtcatttcgtaccctttggagaatgcagttccttttagtcttgacagtgttgcaaattccattcactccttattttctgaggaaactcctgttgttttgcagttggctcccagtgaggaaagagtgtatatggtagggaaggcaaactcagtgtttgaagacctttcagtcaccttgcgccagctccgtaatcgcctgtttcaagaaaactctgttctcagttcactccccctcaattctctgagtaggaacaatgaagttgacctgctctttctttctgaactgcaagtgctacatgatatttcaagcttgctgtctcgtcataagcatctagccaaggatcattctcctgatttatattcactggagctggcaggtttggatgaaattgggaagcgttatggggaagactctgaacaattcagagatgcttctaagatccttgttgacgctctgcaaaagtttgcagatgacatgtacagtctttatggtgggaatgcagtggtagagttagtcactgtcaagtcatttgacacctccctcattaggaagacaaggactatccttgaggcaaaacaagcgaagaacccagcaagtccctataaccttgcatataagtataattttgaatattccgtggttttcaacatggtactttggataatgatcgccttggccttggctgtgattatcacctcttacaatatttggaacatggatcctggatatgatagcatcatttataggatgacaaaccagaagattcgaatggattgaatgttacctgtgccagaattagaaaagggggttggaaattggctgttttgttaaaatatatcttttagtgtgctttaaagtagatagtatactttacatttataaaaaaaaatcaaattttgttctttattttgtgtgtgcctgtgatgtttttctagagtgaattatagtattgacgtgaatcccactgtggtatagattccataatatgcttgaatattatgatatagccatttaataacattgatttcattctgtttaatgaatttggaaatatgcactgaaagaaatgtaaaacatttagaatagctcgtgttatggaaaaaagtgcactgaatttattagacaaacttacgaatgcttaacttctttacacagcataggtgaaaatcatatttgggctattgtatactatgaacaatttgtaaatgtcttaatttgatgtaaataactctgaaacaagagaaaaggtttttaacttagagtagccctaaaatatggatgtgcttatataatcgcttagttttggaactgtatctgagtaacagaggacagctgttttttaaccctcttctgcaagtttgttgacctacatgggctaatatggatactaaaaatactacattgatctaagaagaaactagccttgtggagtatatagatgcttttcattatacacacaaaaatccctgagggacattttgaggcatgaatataaaacatttttatttcagtaacttttccccctgtgtaagttactatggtttgtggtacaacttcattctatagaatattaagtggaagtgggtgaattctactttttatgttggagtggaccaatgtctatcaagagtgacaaataaagttaatgatgattccaaa

SEQ ID NO: 2839 - DNA, 728 bp, Homo sapiens
  source 1..728: mol_type = unassigned DNA
gtgtcccgccggcccgttccgtgtcgccccgcagtgctgcggccgccgcggcaccatggctgtgtttgtcgtgctcctggcgttggtggcgggtgttttggggaacgagtttagtatattaaaatcaccagggtctgttgttttccgaaatggaaattggcctataccaggagagcggatcccagacgtggctgcattgtccatgggcttctctgtgaaagaagacctttcttggccaggactcgcagtgggtaacctgtttcatcgtcctcgggctaccgtcatggtgatggtgaagggagtgaacaaactggctctacccccaggcagtgtcatttcgtaccctttggagaatgttgacctgctctttctttctgaactgcaagtgctacatgatatttcaagcttgctgtctcgtcataagcatctagccaaggatcattctcctgatttatattcactggagctggcaggtttggatgaaattgggaagcgttatggggaagactctgaacaattcagagatgcttctaagatccttgttgacgctctgcaaaagtttgcagatgacatgtacagtctttatggtgggaatgcagtggtagagttagtcactgtcaagtcatttgacacctccctcattaggaagacaaggactatccttgaggcaaaacaagcgaagaacccagcaagtccctataaccttgcatataagtataattttgaat

SEQ ID NO: 2840 - DNA, 609 bp, Homo sapiens
  source 1..609: mol_type = unassigned DNA
gagtccgagcgcgtcacctcctcacgctgcggctgtcgcccgtgtcccgccggcccgttccgtgtcgccccgcagtgctgcggccgccgcggcaccatggctgtgtttgtcgtgctcctggcgttggtggcgggtgttttggggaacgagtttagtatattaaaatcaccagggtctgttgttttccgaaatggaaattggcctataccaggagagcggatcccagacgtggctgcattgtccatgggcttctctgtgaaagaagacctttcttggccaggactcgcagtgggtaacctgtttcatcgtcctcgggctaccgtcatggtgatggtgaagggagtgaacaaactggctctacccccaggcagtgtcatttcgtaccctttggagaatagagtgtatatggtagggaaggcaaactcagtgtttgaagacctttcagtcaccttgcgccagctccgtaatcgcctgtttcaagaaaactctgttctcagttcactccccctcaattctctgagtaggaacaatgaagttgacctgctctttctttctgaactgcaagtgctacatgatatttcaagcttgctgtctcgtcataagcatcta

SEQ ID NO: 2841 - DNA, 777 bp, Homo sapiens
  source 1..777: mol_type = unassigned DNA
gtgtcccgccggcccgttccgtgtcgccccgcagtgctgcggccgccgcggcaccatggctgtgtttgtcgtgctcctggcgttggtggcgggacctttcttggccaggactcgcagtgggtaacctgtttcatcgtcctcgggctaccgtcatggtgatggtgaagggagtgaacaaactggctctacccccaggcagtgtcatttcgtaccctttggagaatgcagttccttttagtcttgacagtgttgcaaattccattcactccttattttctgaggaaactcctgttgttttgcagttggctcccagtgaggaaagagtgtatatggtagggaaggcaaactcagtgtttgaagacctttcagtcaccttgcgccagctccgtaatcgcctgtttcaagaaaactctgttctcagttcactccccctcaattctctgagtaggaacaatgaagttgacctgctctttctttctgaactgcaagtgctacatgatatttcaagcttgctgtctcgtcataagcatctagccaaggatcattctcctgatttatattcactggagctggcaggtttggatgaaattgggaagcgttatggggaagactctgaacaattcagagatgcttctaagatccttgttgacgctctgcaaaagtttgcagatgacatgtacagtctttatggtgggaatgcagtggtagagttagtcactgtcaagtcatttgacacctccctcattaggaagacaaggactatccttgaggcaaaac

SEQ ID NO: 2842 - DNA, 1511 bp, Homo sapiens
  source 1..1511: mol_type = unassigned DNA
gtaactggtgattggtggagaaagcggcagctgtcccagcggaagcgacgaagggacgggacccgggagcctggacgagtccgagcgcgtcacctcctcacgctgcggctgtcgcccgtgtcccgccggcccgttccgtgtcgccccgcagtgctgcggccgccgcggcaccatggctgtgtttgtcgtgctcctggcgttggtggcgggtgttttggggaacgagtttagtatattaaaatcaccagggtctgttgttttccgaaatggaaattggcctataccaggagagcggatcccagacgtggctgcattgtccatgggcttctctgtgaaagaagacctttcttggccaggactcgcagtgggtaacctgtttcatcgtcctcgggctaccgtcatggtgatggtgaagggagtgaacaaactggctctacccccaggcagtgtcatttcgtaccctttggagaatagagtgtatatggtagggaaggcaaactcagtgtttgaagacctttcagtcaccttgcgccagctccgtaatcgcctgtttcaagaaaactctgttctcagttcactccccctcaattctctgagtaggaacaatgaagttgacctgctctttctttctgaactgcaagtgctacatgatatttcaagcttgctgtctcgtcataagcatctagccaaggatcattctcctgatttatattcactggagctggcaggtttggatgaaattgggaagcgttatggggaagactctgaacaattcagagatgcttctaagatccttgttgacgctctgcaaaagtttgcagatgacatgtacagtctttatggtgggaatgcagtggtagagttagtcactgtcaagtcatttgacacctccctcattaggaagacaaggactatccttgaggcaaaacaagcgaagaacccagcaagtccctataaccttgcatataagtataattttgaatattccgtggttttcaacatggtactttggataatgatcgccttggccttggctgtgattatcacctcttacaatatttggaacatggatcctggatatgatagcatcatttataggatgacaaaccagaagattcgaatggattgaatgttacctgtgccagaattagaaaagggggttggaaattggctgttttgttaaaatatatcttttagtgtgctttaaagtagatagtatactttacatttataaaaaaaaatcaaattttgttctttattttgtgtgtgcctgtgatgtttttctagagtgaattatagtattgacgtgaatcccactgtggtatagattccataatatgcttgaatattatgatatagccatttaataacattgatttcattctgtttaatgaatttggaaatatgcactgaaagaaatgtaaaacatttagaatagctcgtgttatggaaaaaagtgcactgaatttattagacaaacttacgaatgcttaacttctttacacagcata

SEQ ID NO: 2843 - DNA, 1006 bp, Homo sapiens
  source 1..1006: mol_type = unassigned DNA
gtcacctcctcacgctgcggctgtcgcccgtgtcccgccggcccgttccgtgtcgccccgcagtgctgcggccgccgcggcaccatggctgtgtttgtcgtgctcctggcgttggtggcgggtgttttggggaacgagtttagtatattaaaatcaccagggtctgttgttttccgaaatggaaattggcctataccaggagagcggatcccagacgtggctgcattgtccatgggcttctctgtgaaagaagacctttcttggccaggactcgcagtgggtaacctgtttcatcgtcctcgggctaccgtcatggtgatggtgaagggagtgaacaaactggctctacccccaggcagtgtcatttcgtaccctttggagaatgttgacctgctctttctttctgaactgcaagtgctacatgatatttcaagcttgctgtctcgtcataagcatctagccaaggatcattctcctgatttatattcactggagctggcaggtttggatgaaattgggaagcgttatggggaagactctgaacaattcagagatgcttctaagatccttgttgacgctctgcaaaagtttgcagatgacatgtacagtctttatggtgggaatgcagtggtagagttagtcactgtcaagtcatttgacacctccctcattaggaagacaaggactatccttgaggcaaaacaagcgaagaacccagcaagtccctataaccttgcatataagtataattttgaatattccgtggttttcaacatggtactttggataatgatcgccttggccttggctgtgattatcacctcttacaatatttggaacatggatcctggatatgatagcatcatttataggatgacaaaccagaagattcgaatggattgaatgttacctgtgccagaattagaaaagggggttggaaattggctgttttgttaaaatatatcttttagtgtgctttaaagtagatagtatactttacatttat

SEQ ID NO: 2844 - DNA, 1030 bp, Homo sapiens
  source 1..1030: mol_type = unassigned DNA
acgctgcggctgtcgcccgtgtcccgccggcccgttccgtgtcgccccgcagtgctgcggccgccgcggcaccatggctgtgtttgtcgtgctcctggcgttggtggcgggtgttttggggaacgagtttagtatattaaaatcaccagggtctgttgttttccgaaatggaaattggcctataccaggagagcggatcccagacgtggctgcattgtccatgggcttctctgtgaaagaagacctttcttggccaggactcgcagtgggtaacctgtttcatcgtcctcgggctaccgtcatggtgatggtgaagggagtgaacaaactggctctacccccaggcagtgtcatttcgtaccctttggagaatgcagttccttttagtcttgacagtgttgcaaattccattcactccttattttctgaggaaactcctgttgttttgcagttggctcccagtgaggaaagagtgtatatggtaggaacaatgaagttgacctgctctttctttctgaactgcaagtgctacatgatatttcaagcttgctgtctcgtcataagcatctagccaaggatcattctcctgatttatattcactggagctggcaggtttggatgaaattgggaagcgttatggggaagactctgaacaattcagagatgcttctaagatccttgttgacgctctgcaaaagtttgcagatgacatgtacagtctttatggtgggaatgcagtggtagagttagtcactgtcaagtcatttgacacctccctcattaggaagacaaggactatccttgaggcaaaacaagcgaagaacccagcaagtccctataaccttgcatataagtataattttgaatattccgtggttttcaacatggtactttggataatgatcgccttggccttggctgtgattatcacctcttacaatatttggaacatggatcctggatatgatagcatcatttataggatgacaaaccagaagattcgaatggattgaatgttacctgtgccag

SEQ ID NO: 2845 - DNA, 1311 bp, Homo sapiens
  source 1..1311: mol_type = unassigned DNA
gagtccgagcgcgtcacctcctcacgctgcggctgtcgcccgtgtcccgccggcccgttccgtgtcgccccgcagtgctgcggccgccgcggcaccatggctgtgtttgtcgtgctcctggcgttggtggcgggacctttcttggccaggactcgcagtgggtaacctgtttcatcgtcctcgggctaccgtcatggtgatggtgaagggagtgaacaaactggctctacccccaggcagtgtcatttcgtaccctttggagaatgcagttccttttagtcttgacagtgttgcaaattccattcactccttattttctgaggaaactcctgttgttttgcagttggctcccagtgaggaaagagtgtatatggtagggaaggcaaactcagtgtttgaagacctttcagtcaccttgcgccagctccgtaatcgcctgtttcaagaaaactctgttctcagttcactccccctcaattctctgagtaggaacaatgaagttgacctgctctttctttctgaactgcaagtgctacatgatatttcaagcttgctgtctcgtcataagcatctagccaaggatcattctcctgatttatattcactggagctggcaggtttggatgaaattgggaagcgttatggggaagactctgaacaattcagagatgcttctaagatccttgttgacgctctgcaaaagtttgcagatgacatgtacagtctttatggtgggaatgcagtggtagagttagtcactgtcaagtcatttgacacctccctcattaggaagacaaggactatccttgaggcaaaacaagcgaagaacccagcaagtccctataaccttgcatataagtataattttgaatattccgtggttttcaacatggtactttggataatgatcgccttggccttggctgtgattatcacctcttacaatatttggaacatggatcctggatatgatagcatcatttataggatgacaaaccagaagattcgaatggattgaatgttacctgtgccagaattagaaaagggggttggaaattggctgttttgttaaaatatatcttttagtgtgctttaaagtagatagtatactttacatttataaaaaaaaatcaaattttgttctttattttgtgtgtgcctgtgatgtttttctagagtgaattatagtattgacgtgaatcccactgtggtatagattccataatatgcttgaatattatgatatagccatttaataacattgatttcattctgtttaatgaatttggaaatatgcactgaaagaaatgt

SEQ ID NO: 2846 - DNA, 4142 bp, Homo sapiens
  source 1..4142: mol_type = unassigned DNA
ggcggcgcaggggcggggctttacggacgcaagcacgtcgaagcgctgctcctggagccgcggagggtgcgggtttggctgcggtggtttctgtggcggttgctgtggcggagtttggaggttggagagaaatccaggtactcactagactggtaccttctgccaccatgggggagcttttccggagtgaagaaatgacactggcccagctttttctacagtcagaggctgcttattgttgtgtcagtgaattaggagaacttggaaaggttcagtttcgtgacttaaatccagatgtgaatgttttccaacggaaatttgtgaatgaagttagaagatgtgaagaaatggatcgaaagcttcgatttgttgagaaagagataagaaaagctaacattccgattatggacaccggtgaaaacccagaggttcccttcccccgggacatgattgacttagaggccaattttgagaagattgaaaatgaactgaaggaaatcaacacaaaccaggaagctctgaagagaaacttcctggaactgaccgaattaaaatttatacttcgcaaaactcagcaattttttgatgaggctgaattgcatcatcagcagatggcggatccagacttgttggaagagtcctcatccctcttggagccaagtgagatgggaagaggcactcctttaagacttggcttcgtggctggtgtcattaaccgggagcgcatccctacttttgagcgcatgctttggcgggtatgccggggaaatgtgttcctgcgacaggctgaaatcgagaaccccctggaggatcctgtgactggcgactacgtgcacaagtctgtgtttatcattttcttccaaggcgatcagctgaaaaacagagtcaagaaaatctgtgaagggttccgagcctcactctatccctgtcctgagacaccacaggagaggaaggaaatggcttctggagtgaataccaggattgatgatctccaaatggttctgaatcaaacggaggatcaccgccagagggttctgcaggcagctgctaagaacatccgtgtctggttcatcaaagtgcggaagatgaaggccatctatcacaccctgaacctgtgcaacatagatgtgactcagaaatgcttgattgcagaggtctggtgccctgtcaccgaccttgactccatccagtttgcactcagaaggggcacggaacacagtggttccactgtaccttccattttgaacaggatgcagacaaaccagactcccccaacctataacaaaaccaacaagtttacctatggctttcagaacatagtagatgcttatggaattggaacttaccgagagataaatccagctccgtatactattatcacgttcccttttctatttgctgtgatgtttggagacttcggtcatggcattttaatgaccctttttgctgtgtggatggtactgagggagagccggatcctttcccagaagaatgagaatgagatgtttagcactgtgttcagtggtcgatacattattttattgatgggtgtgttctccatgtacactggcctcatctacaatgattgcttttccaagtctcttaatatctttgggtcatcctggagtgtacggccgatgtttacttataattggactgaagagacgcttcgggggaaccctgttctacagctgaacccagccctccctggagtgtttggtggaccatacccttttggcattgatccaatttggaacattgctaccaataaactgacgttcttgaactcctttaagatgaagatgtctgttatccttggtatcatccatatgctgtttggagtcagcctgagtctgttcaaccatatctatttcaagaagcccctgaatatctactttggatttattcctgaaataatcttcatgacctctttgtttggctatttggttatccttattttttacaagtggacggcctatgatgctcatacctctgagaatgcaccaagccttctgatccatttcataaacatgttcctcttttcctacccagagtctggttattcaatgttgtattctggacagaaaggaattcagtgtttcctggtagtggttgcactactgtgtgtaccttggatgctgctgtttaaaccattggtccttcgccgtcagtatttgaggagaaagcatttgggaactctcaactttggtgggatcagggtgggcaacggaccgacagaggaggatgctgagattattcagcatgaccagctctccacccactcagaggacgcagacgagtttgactttggggacaccatggtccaccaggccatccacaccatcgagtactgcctgggctgcatctccaacactgcctcctacttgcggctctgggccctcagcctcgctcatgcgcagctgtctgaggtgctttggaccatggtgatccacatcggcctgagcgtgaagagcttggcgggaggtttggtgctgttcttcttcttcactgcctttgccaccctgaccgtggccatcctcctgatcatggagggcctctcggcctttctccacgcactgcgcttacactgggttgagttccagaataaattctacagcgggaccggtttcaagttcttacccttctccttcgagcatattcgggaagggaagtttgaagagtgagtccctgtgagggccgtgtgccccatgctaccctccccgcctccctccacagtgatcagctgtgcctctctgcctgttggttgtgatctgtgggcaccagctcattcgtgtcaccctgtctgtgagtcatttagatagaatagtcctccttgggtctcccaccacccctagctttgtgtgtagtgtagtgattttctggctgtcactcatactcactgggcaccagccttgccctcttagcctccatccatccagacagcccttcccacctcctggtggtgagccagtctgcattcccacgccatcccaaagccctttcatcttccccgtgcattgtagatggaaggagcacccatgccattcacatctagactttgagttccctgcatctgccaccgtagtttctagcaggagtagtggggggagtaatacagattcttccctagaaggggacactggtaacatgtcccactcttggattagcaggggtgggtccaggaagatgatatttgcgtcttttgcccacccccctggcattcagctggacccaactaggccatcatgagtggcttctccctgtcatccccaggggtcataggatatctacaccgcctttctgaccccaccctgcactcccatcctttcctctctccccgttcatgccctgcactacatagcacagccgggatgcttggaacagaggccttggctgctccgcagtgcacagggcttccctctctcggggttggcttcttcccaggccttgcatgggccctgcccacaagcacaccctcaggccgagggtgcagactgatgctcttccctgatggagaccctgagatcttccccacccccaatcatgatgtcttcagtgtgggactggggtcctcttggttctgcctgcagcctgcctggctccgcccctagtgccccctcctcaccacactggccccaggtctcaggaggggtgtcctgggcagggaaggtcagtgtcactgatggtttgctgtttggaagccattggcagggctgccgtgcatgtggctgtgagggctgcacagtcctgccaaggggcttcctccttgtcaccccgaaccttgtaatcgtgtgctggcgtggcagccctggctaagttaatccccaccgctttcagtggtagaaagaattccctgagtgggccaggctggtgccctcctcctaccctggcttttctgagtgagctgcctggagccctcatcccctctcccaggctgggctggccctgggcggggccactgtgtgctggcccactgtgacctgacccgaccttgtgcagcccccctgccctggtgtcctgggttttcgtgatgatctttgctctgtttccagtggggtttgaagcagagttcagggaaccctgcccaaggtcctcctgttcagacattcctatgttgaataaagtatgtttgacttccccgg

SEQ ID NO: 2847 - DNA, 4139 bp, Homo sapiens
  source 1..4139: mol_type = unassigned DNA
ggcggcgcaggggcggggctttacggacgcaagcacgtcgaagcgctgctcctggagccgcggagggtgcgggtttggctgcggtggtttctgtggcggttgctgtggcggagtttggaggttggagagaaatccaggtactcactagactggtaccttctgccaccatgggggagcttttccggagtgaagaaatgacactggcccagctttttctacagtcagaggctgcttattgttgtgtcagtgaattaggagaacttggaaaggttcagtttcgtgacttaaatccagatgtgaatgttttccaacggaaatttgtgaatgaagttagaagatgtgaagaaatggatcgaaagcttcgatttgttgagaaagagataagaaaagctaacattccgattatggacaccggtgaaaacccagaggttcccttcccccgggacatgattgacttagaggccaattttgagaagattgaaaatgaactgaaggaaatcaacacaaaccaggaagctctgaagagaaacttcctggaactgaccgaattaaaatttatacttcgcaaaactcagcaattttttgatgagatggcggatccagacttgttggaagagtcctcatccctcttggagccaagtgagatgggaagaggcactcctttaagacttggcttcgtggctggtgtcattaaccgggagcgcatccctacttttgagcgcatgctttggcgggtatgccggggaaatgtgttcctgcgacaggctgaaatcgagaaccccctggaggatcctgtgactggcgactacgtgcacaagtctgtgtttatcattttcttccaaggcgatcagctgaaaaacagagtcaagaaaatctgtgaagggttccgagcctcactctatccctgtcctgagacaccacaggagaggaaggaaatggcttctggagtgaataccaggattgatgatctccaaatggttctgaatcaaacggaggatcaccgccagagggttctgcaggcagctgctaagaacatccgtgtctggttcatcaaagtgcggaagatgaaggccatctatcacaccctgaacctgtgcaacatagatgtgactcagaaatgcttgattgcagaggtctggtgccctgtcaccgaccttgactccatccagtttgcactcagaaggggcacggaacacagtggttccactgtaccttccattttgaacaggatgcagacaaaccagactcccccaacctataacaaaaccaacaagtttacctatggctttcagaacatagtagatgcttatggaattggaacttaccgagagataaatccagctccgtatactattatcacgttcccttttctatttgctgtgatgtttggagacttcggtcatggcattttaatgaccctttttgctgtgtggatggtactgagggagagccggatcctttcccagaagaatgagaatgagatgtttagcactgtgttcagtggtcgatacattattttattgatgggtgtgttctccatgtacactggcctcatctacaatgattgcttttccaagtctcttaatatctttgggtcatcctggagtgtacggccgatgtttacttataattggactgaagagacgcttcgggggaaccctgttctacagctgaacccagccctccctggagtgtttggtggaccatacccttttggcattgatccaatttggaacattgctaccaataaactgacgttcttgaactcctttaagatgaagatgtctgttatccttggtatcatccatatgctgtttggagtcagcctgagtctgttcaaccatatctatttcaagaagcccctgaatatctactttggatttattcctgaaataatcttcatgacctctttgtttggctatttggttatccttattttttacaagtggacggcctatgatgctcatacctctgagaatgcaccaagccttctgatccatttcataaacatgttcctcttttcctacccagagtctggttattcaatgttgtattctggacagaaaggaattcagtgtttcctggtagtggttgcactactgtgtgtaccttggatgctgctgtttaaaccattggtccttcgccgtcagtatttgaggagaaagcatttgggaactctcaactttggtgggatcagggtgggcaacggaccgacagaggaggatgctgagattattcagcatgaccagctctccacccactcagaggacgcagacgagccttccgaggacgaagtgtttgactttggggacaccatggtccaccaggccatccacaccatcgagtactgcctgggctgcatctccaacactgcctcctacttgcggctctgggccctcagcctcgctcatgcgcagctgtctgaggtgctttggaccatggtgatccacatcggcctgagcgtgaagagcttggcgggaggtttggtgctgttcttcttcttcactgcctttgccaccctgaccgtggccatcctcctgatcatggagggcctctcggcctttctccacgcactgcgcttacactgggttgagttccagaataaattctacagcgggaccggtttcaagttcttacccttctccttcgagcatattcgggaagggaagtttgaagagtgagtccctgtgagggccgtgtgccccatgctaccctccccgcctccctccacagtgatcagctgtgcctctctgcctgttggttgtgatctgtgggcaccagctcattcgtgtcaccctgtctgtgagtcatttagatagaatagtcctccttgggtctcccaccacccctagctttgtgtgtagtgtagtgattttctggctgtcactcatactcactgggcaccagccttgccctcttagcctccatccatccagacagcccttcccacctcctggtggtgagccagtctgcattcccacgccatcccaaagccctttcatcttccccgtgcattgtagatggaaggagcacccatgccattcacatctagactttgagttccctgcatctgccaccgtagtttctagcaggagtagtggggggagtaatacagattcttccctagaaggggacactggtaacatgtcccactcttggattagcaggggtgggtccaggaagatgatatttgcgtcttttgcccacccccctggcattcagctggacccaactaggccatcatgagtggcttctccctgtcatccccaggggtcataggatatctacaccgcctttctgaccccaccctgcactcccatcctttcctctctccccgttcatgccctgcactacatagcacagccgggatgcttggaacagaggccttggctgctccgcagtgcacagggcttccctctctcggggttggcttcttcccaggccttgcatgggccctgcccacaagcacaccctcaggccgagggtgcagactgatgctcttccctgatggagaccctgagatcttccccacccccaatcatgatgtcttcagtgtgggactggggtcctcttggttctgcctgcagcctgcctggctccgcccctagtgccccctcctcaccacactggccccaggtctcaggaggggtgtcctgggcagggaaggtcagtgtcactgatggtttgctgtttggaagccattggcagggctgccgtgcatgtggctgtgagggctgcacagtcctgccaaggggcttcctccttgtcaccccgaaccttgtaatcgtgtgctggcgtggcagccctggctaagttaatccccaccgctttcagtggtagaaagaattccctgagtgggccaggctggtgccctcctcctaccctggcttttctgagtgagctgcctggagccctcatcccctctcccaggctgggctggccctgggcggggccactgtgtgctggcccactgtgacctgacccgaccttgtgcagcccccctgccctggtgtcctgggttttcgtgatgatctttgctctgtttccagtggggtttgaagcagagttcagggaaccctgcccaaggtcctcctgttcagacattcctatgttgaataaagtatgtttgacttccccgg

SEQ ID NO: 2848 - DNA, 3028 bp, Homo sapiens
  source 1..3028: mol_type = unassigned DNA
ggcggcgcaggggcggggctttacggacgcaagcacgtcgaagcgctgctcctggagccgcggagggtgcgggtttggctgcggtggtttctgtggcggttgctgtggcggagtttggaggttggagagaaatccaggtactcactagactggtaccttctgccaccatgggggagcttttccggagtgaagaaatgacactggcccagctttttctacagtcagaggctgcttattgttgtgtcagtgaattaggagaacttggaaaggttcagtttcgtgacttaaatccagatgtgaatgttttccaacggaaatttgtgaatgaagttagaagatgtgaagaaatggatcgaaagcttcgatttgttgagaaagagataagaaaagctaacattccgattatggacaccggtgaaaacccagaggttcccttcccccgggacatgattgacttagaggccaattttgagaagattgaaaatgaactgaaggaaatcaacacaaaccaggaagctctgaagagaaacttcctggaactgaccgaattaaaatttatacttcgcaaaactcagcaattttttgatgagatggcggatccagacttgttggaagagtcctcatccctcttggagccaagtgagatgggaagaggcactcctttaagacttggcttcgtggctggtgtcattaaccgggagcgcatccctacttttgagcgcatgctttggcgggtatgccggggaaatgtgttcctgcgacaggctgaaatcgagaaccccctggaggatcctgtgactggcgactacgtgcacaagtctgtgtttatcattttcttccaaggcgatcagctgaaaaacagagtcaagaaaatctgtgaagggttccgagcctcactctatccctgtcctgagacaccacaggagaggaaggaaatggcttctggagtgaataccaggattgatgatctccaaatggttctgaatcaaacggaggatcaccgccagagggttctgcaggcagctgctaagaacatccgtgtctggttcatcaaagtgcggaagatgaaggccatctatcacaccctgaacctgtgcaacatagatgtgactcagaaatgcttgattgcagaggtctggtgccctgtcaccgaccttgactccatccagtttgcactcagaaggggcacggaacacagtggttccactgtaccttccattttgaacaggatgcagacaaaccagactcccccaacctataacaaaaccaacaagtttacctatggctttcagaacatagtagatgcttatggaattggaacttaccgagagataaatccagctccgtatactattatcacgttcccttttctatttgctgtgatgtttggagacttcggtcatggcattttaatgaccctttttgctgtgtggatggtactgagggagagccggatcctttcccagaagaatgagaatgagatgtttagcactgtgttcagtggtcgatacattattttattgatgggtgtgttctccatgtacactggcctcatctacaatgattgcttttccaagtctcttaatatctttgggtcatcctggagtgtacggccgatgtttacttataattggactgaagagacgcttcgggggaaccctgttctacagctgaacccagccctccctggagtgtttggtggaccatacccttttggcattgatccaatttggaacattgctaccaataaactgacgttcttgaactcctttaagatgaagatgtctgttatccttggtatcatccatatgctgtttggagtcagcctgagtctgttcaaccatatctatttcaagaagcccctgaatatctactttggatttattcctgaaataatcttcatgacctctttgtttggctatttggttatccttattttttacaagtggacggcctatgatgctcatacctctgagaatgcaccaagccttctgatccatttcataaacatgttcctcttttcctacccagagtctggttattcaatgttgtattctggacagaaaggaattcagtgtttcctggtagtggttgcactactgtgtgtaccttggatgctgctgtttaaaccattggtccttcgccgtcagtatttgaggagaaagcatttgggaactctcaactttggtgggatcagggtgggcaacggaccgacagaggaggatgctgagattattcagcatgaccagctctccacccactcagaggacgcagacgagtttgactttggggacaccatggtccaccaggccatccacaccatcgagtactgcctgggctgcatctccaacactgcctcctacttgcggctctgggccctcagcctcgctcatgcgcagctgtctgaggtgctttggaccatggtgatccacatcggcctgagcgtgaagagcttggcgggaggtttggtgctgttcttcttcttcactgcctttgccaccctgaccgtggccatcctcctgatcatggagggcctctcggcctttctccacgcactgcgcttacactgggttgagttccagaataaattctacagcgggaccggtttcaagttcttacccttctccttcgagcatattcgggaagggaagtttgaagagtgagtccctgtgagggccgtgtgccccatgctaccctccccgcctccctccacagtgatcagctgtgcctctctgcctgttggttgtgatctgtgggcaccagctcattcgtgtcaccctgtctgtgagtcatttagatagaatagtcctccttgggtctcccaccacccctagctttgtgtgtagtgtagtgattttctggctgtcactcatactcactgggcaccagccttgccctcttagcctccatccatccagacagcccttcccacctcctggtggtgagccagtctgcattcccacgccatcccaaagccctttcatcttccccgtgcattgtagatggaaggagcacccatgccattcac

SEQ ID NO: 2849 - DNA, 2774 bp, Homo sapiens
  source 1..2774: mol_type = unassigned DNA
acgtcgaagcgctgctcctggagccgcggagggtgcgggtttggctgcggtggtttctgtggcggttgctgtggcggagtttggaggttggagagaaatccaggtactcactagactggtaccttctgccaccatgggggagcttttccggagtgaagaaatgacactggcccagctttttctacagtcagaggctgcttattgttgtgtcagtgaattaggagaacttggaaaggttcagtttcgtgacttaaatccagatgtgaatgttttccaacggaaatttgtgaatgaagttagaagatgtgaagaaatggatcgaaagcttcgatttgttgagaaagagataagaaaagctaacattccgattatggacaccggtgaaaacccagaggttcccttcccccgggacatgattgacttagagatggcggatccagacttgttggaagagtcctcatccctcttggagccaagtgagatgggaagaggcactcctttaagacttggcttcgtggctggtgtcattaaccgggagcgcatccctacttttgagcgcatgctttggcgggtatgccggggaaatgtgttcctgcgacaggctgaaatcgagaaccccctggaggatcctgtgactggcgactacgtgcacaagtctgtgtttatcattttcttccaaggcgatcagctgaaaaacagagtcaagaaaatctgtgaagggttccgagcctcactctatccctgtcctgagacaccacaggagaggaaggaaatggcttctggagtgaataccaggattgatgatctccaaatggttctgaatcaaacggaggatcaccgccagagggttctgcaggcagctgctaagaacatccgtgtctggttcatcaaagtgcggaagatgaaggccatctatcacaccctgaacctgtgcaacatagatgtgactcagaaatgcttgattgcagaggtctggtgccctgtcaccgaccttgactccatccagtttgcactcagaaggggcacggaacacagtggttccactgtaccttccattttgaacaggatgcagacaaaccagactcccccaacctataacaaaaccaacaagtttacctatggctttcagaacatagtagatgcttatggaattggaacttaccgagagataaatccagctccgtatactattatcacgttcccttttctatttgctgtgatgtttggagacttcggtcatggcattttaatgaccctttttgctgtgtggatggtactgagggagagccggatcctttcccagaagaatgagaatgagatgtttagcactgtgttcagtggtcgatacattattttattgatgggtgtgttctccatgtacactggcctcatctacaatgattgcttttccaagtctcttaatatctttgggtcatcctggagtgtacggccgatgtttacttataattggactgaagagacgcttcgggggaaccctgttctacagctgaacccagccctccctggagtgtttggtggaccatacccttttggcattgatccaatttggaacattgctaccaataaactgacgttcttgaactcctttaagatgaagatgtctgttatccttggtatcatccatatgctgtttggagtcagcctgagtctgttcaaccatatctatttcaagaagcccctgaatatctactttggatttattcctgaaataatcttcatgacctctttgtttggctatttggttatccttattttttacaagtggacggcctatgatgctcatacctctgagaatgcaccaagccttctgatccatttcataaacatgttcctcttttcctacccagagtctggttattcaatgttgtattctggacagaaaggaattcagtgtttcctggtagtggttgcactactgtgtgtaccttggatgctgctgtttaaaccattggtccttcgccgtcagtatttgaggagaaagcatttgggaactctcaactttggtgggatcagggtgggcaacggaccgacagaggaggatgctgagattattcagcatgaccagctctccacccactcagaggacgcagacgagtttgactttggggacaccatggtccaccaggccatccacaccatcgagtactgcctgggctgcatctccaacactgcctcctacttgcggctctgggccctcagcctcgctcatgcgcagctgtctgaggtgctttggaccatggtgatccacatcggcctgagcgtgaagagcttggcgggaggtttggtgctgttcttcttcttcactgcctttgccaccctgaccgtggccatcctcctgatcatggagggcctctcggcctttctccacgcactgcgcttacactgggttgagttccagaataaattctacagcgggaccggtttcaagttcttacccttctccttcgagcatattcgggaagggaagtttgaagagtgagtccctgtgagggccgtgtgccccatgctaccctccccgcctccctccacagtgatcagctgtgcctctctgcctgttggttgtgatctgtgggcaccagctcattcgtgtcaccctgtctgtgagtcatttagatagaatagtcctccttgggtctcccaccacccctagctttgtgtgtagtgtagtgattttctggctgtcactcatactcactgggcaccagccttgccctcttagcctccatccatccagacagcccttcccacctcct

SEQ ID NO: 2850 - DNA, 3047 bp, Homo sapiens
  source 1..3047: mol_type = unassigned DNA
cggagggtgcgggtttggctgcggtggtttctgtggcggttgctgtggcggagtttggaggttggagagaaatccagtttgcactcagaaggggcacggaacacagtggttccactgtaccttccattttgaacaggatgcagacaaaccagactcccccaacctataacaaaaccaacaagtttacctatggctttcagaacatagtagatgcttatggaattggaacttaccgagagataaatccagctccgtatactattatcacgttcccttttctatttgctgtgatgtttggagacttcggtcatggcattttaatgaccctttttgctgtgtggatggtactgagggagagccggatcctttcccagaagaatgagaatgagatgtttagcactgtgttcagtggtcgatacattattttattgatgggtgtgttctccatgtacactggcctcatctacaatgattgcttttccaagtctcttaatatctttgggtcatcctggagtgtacggccgatgtttacttataattggactgaagagacgcttcgggggaaccctgttctacagctgaacccagccctccctggagtgtttggtggaccatacccttttggcattgatccaatttggaacattgctaccaataaactgacgttcttgaactcctttaagatgaagatgtctgttatccttggtatcatccatatgctgtttggagtcagcctgagtctgttcaaccatatctatttcaagaagcccctgaatatctactttggatttattcctgaaataatcttcatgacctctttgtttggctatttggttatccttattttttacaagtggacggcctatgatgctcatacctctgagaatgcaccaagccttctgatccatttcataaacatgttcctcttttcctacccagagtctggttattcaatgttgtattctggacagaaaggaattcagtgtttcctggtagtggttgcactactgtgtgtaccttggatgctgctgtttaaaccattggtccttcgccgtcagtatttgaggagaaagcatttgggaactctcaactttggtgggatcagggtgggcaacggaccgacagaggaggatgctgagattattcagcatgaccagctctccacccactcagaggacgcagacgagccttccgaggacgaagtgtttgactttggggacaccatggtccaccaggccatccacaccatcgagtactgcctgggctgcatctccaacactgcctcctacttgcggctctgggccctcagcctcgctcatgcgcagctgtctgaggtgctttggaccatggtgatccacatcggcctgagcgtgaagagcttggcgggaggtttggtgctgttcttcttcttcactgcctttgccaccctgaccgtggccatcctcctgatcatggagggcctctcggcctttctccacgcactgcgcttacactgggttgagttccagaataaattctacagcgggaccggtttcaagttcttacccttctccttcgagcatattcgggaagggaagtttgaagagtgagtccctgtgagggccgtgtgccccatgctaccctccccgcctccctccacagtgatcagctgtgcctctctgcctgttggttgtgatctgtgggcaccagctcattcgtgtcaccctgtctgtgagtcatttagatagaatagtcctccttgggtctcccaccacccctagctttgtgtgtagtgtagtgattttctggctgtcactcatactcactgggcaccagccttgccctcttagcctccatccatccagacagcccttcccacctcctggtggtgagccagtctgcattcccacgccatcccaaagccctttcatcttccccgtgcattgtagatggaaggagcacccatgccattcacatctagactttgagttccctgcatctgccaccgtagtttctagcaggagtagtggggggagtaatacagattcttccctagaaggggacactggtaacatgtcccactcttggattagcaggggtgggtccaggaagatgatatttgcgtcttttgcccacccccctggcattcagctggacccaactaggccatcatgagtggcttctccctgtcatccccaggggtcataggatatctacaccgcctttctgaccccaccctgcactcccatcctttcctctctccccgttcatgccctgcactacatagcacagccgggatgcttggaacagaggccttggctgctccgcagtgcacagggcttccctctctcggggttggcttcttcccaggccttgcatgggccctgcccacaagcacaccctcaggccgagggtgcagactgatgctcttccctgatggagaccctgagatcttccccacccccaatcatgatgtcttcagtgtgggactggggtcctcttggttctgcctgcagcctgcctggctccgcccctagtgccccctcctcaccacactggccccaggtctcaggaggggtgtcctgggcagggaaggtcagtgtcactgatggtttgctgtttggaagccattggcagggctgccgtgcatgtggctgtgagggctgcacagtcctgccaaggggcttcctccttgtcaccccgaaccttgtaatcgtgtgctggcgtggcagccctggctaagttaatccccaccgctttcagtggtagaaagaattccctgagtgggccaggctggtgccctcctcctaccctggcttttctgagtgagctgcctggagccctcatcccctctcccaggctgggctggccctgggcggggccactgtgtgctggcccactgtgacctgacccgaccttgtgcagcccccctgccctggtgtcctgggttttcgtgatgatctttgctctgtttccagtggggtttgaagcagagttcagggaaccctgcccaaggtcctcctgttcagacattcctatgttgaataaagtatgtttgacttccccgg

SEQ ID NO: 2851 - DNA, 3046 bp, Homo sapiens
  source 1..3046: mol_type = unassigned DNA
ggcggcgcaggggcggggctttacggacgcaagcacgtcgaagcgctgctcctggagccgcggagggtgcgggtttggctgcggtggtttctgtggcggttgctgtggcggagtttggaggttggagagaaatccaggtactcactagactggtaccttctgccaccatgggggagcttttccggagtgaagaaatgacactggcccagctttttctacagtcagaggctgcttattgttgtgtcagtgaattaggagaacttggaaaggttcagtttcgtgacttaaatccagatgtgaatgttttccaacggaaatttgtgaatgaagttagaagatgtgaagaaatggatcgaaagcttcgatttgttgagaaagagataagaaaagctaacattccgattatggacaccggtgaaaacccagaggttcccttcccccgggacatgattgacttagaggccaattttgagaagattgaaaatgaactgaaggaaatcaacacaaaccaggaagctctgaagagaaacttcctggaactgaccgaattaaaatttatacttcgcaaaactcagcaattttttgatgagatggcggatccagacttgttggaagagtcctcatccctcttggagccaagtgagatgggaagaggcactcctttaagacttggcttcgtggctggtgtcattaaccgggagcgcatccctacttttgagcgcatgctttggcgggtatgccggggaaatgtgttcctgcgacaggctgaaatcgagaaccccctggaggatcctgtgactggcgactacgtgcacaagtctgtgtttatcattttcttccaaggcgatcagctgaaaaacagagtcaagaaaatctgtgaagggttccgagcctcactctatccctgtcctgagacaccacaggagaggaaggaaatggcttctggagtgaataccaggattgatgatctccaaatggttctgaatcaaacggaggatcaccgccagagggttctgcaggcagctgctaagaacatccgtgtctggttcatcaaagtgcggaagatgaaggccatctatcacaccctgaacctgtgcaacatagatgtgactcagaaatgcttgattgcagaggtctggtgccctgtcaccgaccttgactccatccagtttgcactcagaaggggcacggaacacagtggttccactgtaccttccattttgaacaggatgcagacaaaccagactcccccaacctataacaaaaccaacaagtttacctatggctttcagaacatagtagatgcttatggaattggaacttaccgagagataaatccagctccgtatactattatcacgttcccttttctatttgctgtgatgtttggagacttcggtcatggcattttaatgaccctttttgctgtgtggatggtactgagggagagccggatcctttcccagaagaatgagaatgagatgtttagcactgtgttcagtggtcgatacattattttattgatgggtgtgttctccatgtacactggcctcatctacaatgattgcttttccaagtctcttaatatctttgggtcatcctggagtgtacggccgatgtttacttataattggactgaagagacgcttcgggggaaccctgttctacagctgaacccagccctccctggagtgtttggtggaccatacccttttggcattgatccaatttggaacattgctaccaataaactgacgttcttgaactcctttaagatgaagatgtctgttatccttggtatcatccatatgctgtttggagtcagcctgagtctgttcaaccatatctatttcaagaagcccctgaatatctactttggatttattcctgaaataatcttcatgacctctttgtttggctatttggttatccttattttttacaagtggacggcctatgatgctcatacctctgagaatgcaccaagccttctgatccatttcataaacatgttcctcttttcctacccagagtctggttattcaatgttgtattctggacagaaaggaattcagtgtttcctggtagtggttgcactactgtgtgtaccttggatgctgctgtttaaaccattggtccttcgccgtcagtatttgaggagaaagcatttgggaactctcaactttggtgggatcagggtgggcaacggaccgacagaggaggatgctgagattattcagcatgaccagctctccacccactcagaggacgcagacgagccttccacctcgggacagtttgactttggggacaccatggtccaccaggccatccacaccatcgagtactgcctgggctgcatctccaacactgcctcctacttgcggctctgggccctcagcctcgctcatgcgcagctgtctgaggtgctttggaccatggtgatccacatcggcctgagcgtgaagagcttggcgggaggtttggtgctgttcttcttcttcactgcctttgccaccctgaccgtggccatcctcctgatcatggagggcctctcggcctttctccacgcactgcgcttacactgggttgagttccagaataaattctacagcgggaccggtttcaagttcttacccttctccttcgagcatattcgggaagggaagtttgaagagtgagtccctgtgagggccgtgtgccccatgctaccctccccgcctccctccacagtgatcagctgtgcctctctgcctgttggttgtgatctgtgggcaccagctcattcgtgtcaccctgtctgtgagtcatttagatagaatagtcctccttgggtctcccaccacccctagctttgtgtgtagtgtagtgattttctggctgtcactcatactcactgggcaccagccttgccctcttagcctccatccatccagacagcccttcccacctcctggtggtgagccagtctgcattcccacgccatcccaaagccctttcatcttccccgtgcattgtagatggaaggagcacccatgccattcac

SEQ ID NO: 2852 - DNA, 5789 bp, Homo sapiens
  source 1..5789: mol_type = unassigned DNA
gggggcggaaccggaaccggcagtggcttgggggcgggacctcgcggactgctgtggcggcagctggagcggcggccgcggtggcagaaccgggggcggccgctgcagtctggagccccatagtgcggggccgcggccaggccacaggaagagctcgaggcccgggccgcaccggctgagtgtgcgggcccgcgcggctcggagccgccgccgcccatcgagcccctccgggcgcgggtcggcccgccatggggtccctgttccggagcgagaccatgtgcctggcgcagctcttcctgcagtcgggcacggcctacgagtgcctcagcgccctgggcgagaaaggcctggtccagttccgagacctcaaccagaacgtaagttctttccaaagaaaatttgttggtgaggtgaagaggtgtgaagagctagagcgaatattggtgtatttggtacaggaaattaatagagctgatattccccttcctgaaggagaggccagccctcctgcgccacccctgaaacaggttctagaaatgcaggagcagttgcagaagctcgaggttgaactgagagaagtcactaagaacaaggagaaactgaggaaaaacttgctggaactgatagagtacactcacatgctgagagtgacaaagacctttgtgaaacgcaatgttgagtttgaacccacttatgaagaattcccttccttagagagtgattctttgttggattacagctgtatgcagaggctgggagcaaaactgggatttgtgtctggcctaattaaccaaggaaaagtggaagcatttgaaaaaatgttgtggagagtctgcaaagggtacaccatcgtgtcctatgcagaactggatgaatcccttgaagaccctgaaacaggggaagtcataaaatggtatgtctttttaatatccttttggggagagcagattggccacaaggttaagaagatatgtgattgctaccactgccacgtgtacccctatccaaacacagccgaggagcggagggagatccaggaggggctgaacacccgcatccaggatctctacactgtactgcacaaaaccgaggactatttgaggcaagtgctatgtaaagccgccgagtctgtctacagccgtgtgatccaggtgaagaaaatgaaggccatctatcacatgctgaacatgtgcagctttgacgtgaccaacaagtgcctcattgctgaggtctggtgtcccgaggcggatctgcaggacctgcgccgggcactggaggagggctcgagagagagtggtgctacaatcccctcattcatgaatataatccccacaaaagaaacaccccccactcggatccgcaccaacaaattcaccgagggatttcagaacatcgtggatgcttatggagtcggaagctacagagaagtcaatccagctctctttaccatcatcaccttcccgtttttatttgctgtgatgtttggagacttcggacatggctttgtgatgtttttatttgccctcttgttggtgttaaatgaaaatcatcccagactaaatcagtcacaagagatcatgaggatgttttttaatggccggtacatcctcctgctgatggggctgttctcagtgtacactggcctcatctacaacgactgcttttcaaagtcagtcaacctgttcggctctgggtggaacgtgtcggccatgtacagctccagccacccacccgcagagcataagaagatggtgctttggaatgacagcgtcgttagacacaacagcattttgcagctggatccaagcattcctggagtgttccgaggcccttatccccttggcattgatcctatttggaacttggccacaaatcgcctcacttttctaaactctttcaaaatgaaaatgtccgtgattttaggaatcattcatatgacttttggagtcattctgggaatatttaaccacttgcacttcaggaagaagttcaacatttacctggtttccatcccggaacttctcttcatgctctgtatctttggataccttatatttatgattttctacaagtggctggttttttcagcagaaacctccagagttgctcccagcattctgattgaatttattaacatgtttttattcccagccagtaaaacaagtggcctttacacagggcaggagtatgtccagagagtgctgctggttgtcacagcattgtctgtccctgtcctcttcttgggaaagccactgtttttgttgtggcttcacaatgggcgtagttgcttcggggtgaaccggagtggctacacacttataaggaaagatagtgaggaagaagtttcattgctgggaagccaagatatagaagagggaaatcaccaggtggaagatggatgtagagaaatggcgtgtgaagagtttaattttggagaaatattaatgacccaagtaatccattccatcgagtactgtctgggatgcatctccaacaccgcctcctacctgaggctctgggcgcttagcctggctcacgcacagttgtctgatgtcctgtgggccatgctgatgcgcgtgggcctccgcgttgacaccacctatggcgtcttgctactgctcccggttatcgcgctctttgcagttttgaccattttcatccttctgatcatggaagggctttctgcgtttcttcacgccatacgcctccactgggtagaatttcagaacaaattctacgttggtgcaggcaccaaatttgttcctttctcattcagtctactttcatcaaagttcaataacgacgacagtgtggcatgatcatattgctgtaaccaacaagctttcagatttatggagaatgaccatgttatagactttcacttatgtcagatttatgataggaaaaattccatcttcattactgccttatgacatagccaaataattctgtaagatatacctcttcctcatatgttaaatattttgtaaagtttaccaatttgagatataaaaatttcttttggttttttatgatgagcaaatataagttaatgccaaacgttatgttaaagttattttttcaaatacaggatttggggagagaagccaattttgcatggctagttgaaaatggtattagatacttatttcctttaaactttatttaaaacaaacaacagagttaatctgtcacctgaagttgccagataatattttccaacagctgaagtagggatagttttttaaaaaatttaatgatgggtaatcaaaacattcacatttattctgctggatttaaaaatatgtactttttttttttttttgagatgaagtcttgctgtgtcacgtaggctggagtgcaatggcacgatcgtgtctcattgcaacttccgcctcctggattcaggtgattctcctgtctcagcctcccgagtaactgggattacaggcatgcgccaccgtgaccagctaatttttttgtatttttgtagagatggggtttcaccatgttggccaggctggtctcgaacttctgacctcaagtgatccacctgcctcggcctccctaagtgctgggattacaggcgtgagccaccatgcctggccaaaatatgcaaatattttttatcctgtgctacctagaattacaagtagaggattgtttttacaattttgtcttgttttagtaattggggacaatgggataaaatgacatacaacaaatggttatcccacttgtatatttttttaaagactcttatcctgttacccttacataaaaccagttatgataattgtatgtttggaagataaattgtatgctgagccttaaaacccagtgtgactgtagaagatataatgcggacatgatttgaatttagtgacagcttggctgatgtcactgaaccagaagggtttatactgagtgaaggaaaggtaaaaagtagtattttgtatatttttgtaacaaaatataaatgaagatattttaccatgaagagattgcacttatccttgagaacagtctaaatataaatgaagatattttaccatgaagagattgcacttatccttgagaacagtctaatgatactttttttactttcagactgtttctagctaaagttctgataaaagtattgagttaatttaaactttcaaacactgtttagatcagttgaaaactaattcttaatagccattgttttataatctttagtttaaattcatctgtttgacatttggttttttgtgaacttgagtcagtcctattgaacattttgacctatattcttgcaaattatgttaatttttcatattttagtttgattttagacaattattttcaaaaagaaacctgactttttttcaccttcttgacattgtgagtgatacacgttaaaaggctatttgcccgcatcctcctctatcctgtttcgaggtagagagcttggcacttctgttacaagctgagagtctggaggtgctgagtttaacgtggctgtgcagctgatttcaaggcatgagctgaacagcgttgacacagccgtgacttacaattaaaccctttcaattacagtacagattctgtgtgctacttgatgagatgttacccaaggccagtttggacttactgctttttgtccctcatattaaattatcaaatgatgccgatgaaatgcttgaaaatgattctgctctcaaagttatgcttccctagaaaggtgtcatgtcgggcacttgtgttgggtgactatgacatcccagcagtgctggtcaggtctcagagttgctttcacctagagctgatgcttccacaaggggacatttgtgttactttgctccaggggtctgtcataaaaacaatggtaactacttcatccctaggaagcccaagacttcagggcactgttagctgattggtaaataagggacacgatattcacgggaattgtttactgctccccactagtaattctcatggggccacttttttaactctttctaattaacacctcttctcagcatagagcagaggatgcagtcatttctctgttgaaatctatgtagtatttatgtagaatgtcattatatgaaaagcgaattcagaatcctaactctgggaaagcgctctctggaaatgtagtttgataatagtgtcttataggggccacgggaatttgtttctctataaagcgatgggctccagtgtcatgttaccagagttatcgctcagttttgtttgttaaggcttttgctagaacctattatgtatccagtttttaaaacatacttcattcccttgatagcagagatccagagcacagatggcaagttgtgtggatgatactgaatatgtttattttcctaaagataaatgtcacgacacgacatttctcagtttttatttagatgtttattaccatgtgttaacagaatcttaaaacccaagggatttcttcagtaaactagactttgattcaacctgctgggctggagactgtaattgccgtggtcagttaaggagtgcaaagggtgttctgtctgataggatctgggtgagccctgcggactttccagcagcgaaaggacttggaactcctctttcgctgaatgctgctctgtttctggaatggatattttataacaacattctggtgtcagcatcccctcagcagttgtttatttaaaaatttttttattttttttgagacagtgtctcactctgtcacctaggctgaagtgcagtggtgcagtctcggctcactgcaacctctgcctcctggg

SEQ ID NO: 2853 - DNA, 1620 bp, Homo sapiens
  source 1..1620: mol_type = unassigned DNA
acctcgcggactgctgtggcggcagctggagcggcggccgcggtggcagaaccgggggcggccgctgcagtctggagccccatagtgcggggccgcggccaggccacaggaagagctcgaggcccgggccgcaccggctgagtgtgcgggcccgcgcggctcggagccgccgccgcccatcgagcccctccgggcgcgggtcggcccgccatggggtccctgttccggagcgagaccatgtgcctggcgcagctcttcctgcagtcgggcacggcctacgagtgcctcagcgccctgggcgagaaaggcctggtccagttccgagacctcaaccagaacgtaagttctttccaaagaaaatttgttggtgaggtgaagaggtgtgaagagctagagcgaatattggtgtatttggtacaggaaattaatagagctgatattccccttcctgaaggagaggccagccctcctgcgccacccctgaaacaggttctagaaatgcaggagcagttgcagaagctcgaggttgaactgagagaagtcactaagaacaaggagaaactgaggaaaaacttgctggaactgatagagtacactcacatgctgagagtgacaaagacctttgtgaaacgcaatgttgagtttgaacccacttatgaagaattcccttccttagagagtgattctttgttggattacagctgtatgcagaggctgggagcaaaactgggatttgtgtctggcctaattaaccaaggaaaagtggaagcatttgaaaaaatgttgtggagagtctgcaaagggtacaccatcgtgtcctatgcagaactggatgaatcccttgaagaccctgaaacaggggaagtcataaaatggtatgtctttttaatatccttttggggagagcagattggccacaaggttaagaagatatgtgattgctaccactgccacgtgtacccctatccaaacacagccgaggagcggagggagatccaggaggggctgaacacccgcatccaggatctctacactgtactgcacaaaaccgaggactatttgaggcaagtgctatgtaaagccgccgagtctgtctacagccgtgtgatccaggtgaagaaaatgaaggccatctatcacatgctgaacatgtgcagctttgacgtgaccaacaagtgcctcattgctgaggtctggtgtcccgaggcggatctgcaggacctgcgccgggcactggaggagggctcggtaaggctgccttcctctcctctgccaggaacagaagagagactgatggaactgataaattcagagaaaaaaaggaagtgagaatttcatagagtaatgagaatgcagtgtgttgactcttcttttgtttttttaaaatattaattaacaaaattaaaatagagatggggttttgctgtgttgcccaggctggtctcaaactcctggccccgagcgatcctcctgcctcagccttggctctgtttttgaactgaaattatggtgagctggtcattcaaagctgtatgtgagtacatgtgtttttaaattgctcttttgagtaattcattcacatggtgtaaaagtgaaaagaaataaaagagtatgaaagac

SEQ ID NO: 2854 - DNA, 3135 bp, Homo sapiens
  source 1..3135: mol_type = unassigned DNA
ataacgctacctgccgagcaagccgagtggagggaggcaaaggccaggctgaggatcagggtggcccgggtggcagcggggaggcgctgcatgctggaggctgtgctgagtgcccggtgcaggtgagccggtcctgcggagttgtgccgagtgcctgctgcagtctcatttccagttcctccatgacgtggcaagtgaagacaggaatgaaaggaatgtaaagcagcttttctctgaagagaagaagagagagagacacagccaagaccgaggctgggccaagatggtgtctgtgtttcgaagcgaggagatgtgtttgtcacaactgtttctccaggtggaagctgcatattgctgtgtggctgagctcggagagctcggattggttcagttcaaagatttaaatatgaatgtgaacagctttcaaaggaaatttgtgaatgaagtcagaaggtgtgaatcactggagagaatcctccgttttctggaagacgagatgcaaaatgagattgtagttcagttgctcgagaaaagcccactgaccccgctcccacgggaaatgattaccctggagactgttctagaaaaactggaaggagagttacaggaagccaaccagaaccagcaggccttgaaacaaagcttcctagaactgacagaactgaaatacctcctgaagaaaacccaagacttctttgagacggaaaccaatttagctgatgatttctttactgaggacacttctggcctcctggagttgaaagcagtgcctgcatatatgaccggaaagttggggttcatagccggtgtgatcaacagggagaggatggcttcctttgagcggttactgtggcgaatctgccgaggaaacgtgtacttgaagttcagtgagatggacgcccctctggaggatcctgtgacgaaagaagaaattcagaagaacatattcatcatattttaccaaggagagcagctcaggcagaaaatcaagaagatctgtgatgggtttcgagccactgtctacccttgcccagagcctgcggtggagcgcagagagatgttggagagcgtcaatgtgaggctggaagatttaatcaccgtcataacacaaacagagtctcaccgccagcgcctgctgcaggaagccgctgccaactggcactcctggctcatcaaggtgcagaagatgaaagctgtctaccacatcctgaacatgtgcaacatcgacgtcacccagcagtgtgtcatcgccgagatctggttcccggtggcagatgccacacgtatcaagagggcactggagcaaggcatggaactaagtggctcctccatggcccccatcatgaccacagtgcaatctaaaacagcccctcccacatttaacaggaccaataaattcacagctggcttccagaatattgttgatgcctatggtgtcggcagctaccgggagataaacccagccccctacaccatcatcactttccccttcctgttcgctgtgatgtttggagactgtggtcatggaaccgtgatgctcctggctgcactttggatgattctgaatgagagacgcttgctctcccagaagacagacaatgagatttggaacaccttcttccacgggcgctatctgatcctacttatgggcatcttctccatctacacgggtttgatctacaatgactgcttctccaagtccttgaacatctttggctcttcttggagtgtccaacccatgttcagaaacggcacatggaatactcatgtaatggaggaaagtctatatctgcagctggacccagccataccaggagtgtattttggaaatccatacccgtttgggattgatccgatttggaacttggcttcaaacaaactcacatttctgaactcgtataaaatgaagatgtcggtgatcctgggaattgtccagatggttttcggtgtcatcctcagccttttcaatcacatatacttcagaagaactctcaacatcattctgcaatttatccctgagatgatttttatcctgtgtctgtttggatacctggttttcatgatcattttcaaatggtgctgctttgacgtccatgtatctcagcacgcccccagcatcctcatccacttcatcaacatgtttctgtttaactacagtgactcttccaacgcacccctctacaaacatcagcaagaagtccaaagtttctttgtggttatggctttgatttctgtgccgtggatgcttctgattaagccgtttattcttagagccagtcatcggaaatcccagctgcaggcatccaggatccaagaagatgccactgagaacattgaaggtgatagctccagcccttctagccgttctggccagaggacttctgcagatacccacggggctctggacgaccatggagaagagttcaactttggagacgtctttgtccaccaagccatccacaccatcgagtactgcctgggctgcatttcaaacacagcctcctacctgcggctctgggccctcagcctggctcatgcacaactgtctgaagtgctctggactatggtgatgaacagcggccttcagacgcgaggctggggaggaatcgtcggggtttttattatttttgccgtatttgctgtcctgacagtagccatccttctgatcatggagggcctctctgctttcctgcacgccctgcgactgcactgggttgagttccagaacaagttctatgtcggggatggttacaagttttctccattctcctttaaacacatcctggatggcacagccgaggagtaggctgagggctgcacctcccacggtggtcaccatgccaatgaaggaagttcagtcttgtctttgatatcagcccctgcaaggcgctcaatgggaaggttgttcttggctcacctgaagcatgaaactgtgtattatttggacgtcagcctgtggatttgatacgacttaaccacgtcagaggaaggactttggcaagtgatattgtcttcatgtggggtattaattctcaaataataaagtaattgacaaatgaggggagaatgctaaacagatgtcttcttgcaatattttaaatattgtatttgagaaaataaacatctgagtcattc

SEQ ID NO: 2855 - DNA, 2709 bp, Homo sapiens
  source 1..2709: mol_type = unassigned DNA
gctggaggctgtgctgagtgcccggtgcaggtgagccggtcctgcggagttgtgccgagtgcctgctgcagaccgaggctgggccaagatggtgtctgtgtttcgaagcgaggagatgtgtttgtcacaactgtttctccaggtggaagctgcatattgctgtgtggctgagctcggagagctcggattggttcagttcaaagatttaaatatgaatgtgaacagctttcaaaggaaatttgtgaatgaagtcagaaggtgtgaatcactggagagaatcctccgttttctggaagacgagatgcaaaatgagattgtagttcagttgctcgagaaaagcccactgaccccgctcccacgggaaatgattaccctggagactgttctagaaaaactggaaggagagttacaggaagccaaccagaaccagcaggccttgaaacaaagcttcctagaactgacagaactgaaatacctcctgaagaaaacccaagacttctttgagacggaaaccaatttagctgatgatttctttactgaggacacttctggcctcctggagttgaaagcagtgcctgcatatatgaccggaaagttggggttcatagccggtgtgatcaacagggagaggatggcttcctttgagcggttactgtggcgaatctgccgaggaaacgtgtacttgaagttcagtgagatggacgcccctctggaggatcctgtgacgaaagaagaaattcagaagaacatattcatcatattttaccaaggagagcagctcaggcagaaaatcaagaagatctgtgatgggtttcgagccactgtctacccttgcccagagcctgcggtggagcgcagagagatgttggagagcgtcaatgtgaggctggaagatttaatcaccgtcataacacaaacagagtctcaccgccagcgcctgctgcaggaagccgctgccaactggcactcctggctcatcaaggtgcagaagatgaaagctgtctaccacatcctgaacatgtgcaacatcgacgtcacccagcagtgtgtcatcgccgagatctggttcccggtggcagatgccacacgtatcaagagggcactggagcaaggcatggaactaagtggctcctccatggcccccatcatgaccacagtgcaatctaaaacagcccctcccacatttaacaggaccaataaattcacagctggcttccagaatattgttgatgcctatggtgtcggcagctaccgggagataaacccagccccctacaccatcatcactttccccttcctgttcgctgtgatgtttggagactgtggtcatggaaccgtgatgctcctggctgcactttggatgattctgaatgagagacgcttgctctcccagaagacagacaatgagatttggaacaccttcttccacgggcgctatctgatcctacttatgggcatcttctccatctacacgggtttgatctacaatgactgcttctccaagtccttgaacatctttggctcttcttggagtgtccaacccatgttcagaaacggcacatggaatactcatgtaatggaggaaagtctatatctgcagctggacccagccataccaggagtgtattttggaaatccatacccgtttgggattgatccgatttggaacttggcttcaaacaaactcacatttctgaactcgtataaaatgaagatgtcggtgatcctgggaattgtccagatggttttcggtgtcatcctcagccttttcaatcacatatacttcagaagaactctcaacatcattctgcaatttatccctgagatgatttttatcctgtgtctgtttggatacctggttttcatgatcattttcaaatggtgctgctttgacgtccatgtatctcagcacgcccccagcatcctcatccacttcatcaacatgtttctgtttaactacagtgactcttccaacgcacccctctacaaacatcagcaagaagtccaaagtttctttgtggttatggctttgatttctgtgccgtggatgcttctgattaagccgtttattcttagagccagtcatcggaaatcccagctgcaggcatccaggatccaagaagatgccactgagaacattgaaggtgatagctccagcccttctagccgttctggccagaggacttctgcagatacccacggggctctggacgaccatggagaagagttcaactttggagacgtctttgtccaccaagccatccacaccatcgagtactgcctgggctgcatttcaaacacagcctcctacctgcggctctgggccctcagcctggctcatgcacaactgtctgaagtgctctggactatggtgatgaacagcggccttcagacgcgaggctggggaggaatcgtcggggtttttattatttttgccgtatttgctgtcctgacagtagccatccttctgatcatggagggcctctctgctttcctgcacgccctgcgactgcactgggttgagttccagaacaagttctatgtcggggatggttacaagttttctccattctcctttaaacacatcctggatggcacagccgaggagtaggctgagggctgcacctcccacggtggtcaccatgccaatgaaggaagttcagtcttgtctttgatatcagcccctgcaaggcgctcaatgggaaggtt

SEQ ID NO: 2856 - DNA, 3090 bp, Homo sapiens
  source 1..3090: mol_type = unassigned DNA
aacagagctgcctcctggctctttgggagcctgggaggagaaggagccgggaggggcgctgcggggaagccacctgcggattcactggctgctgctccgcccaggactgctagcaagcacggagggctgccagacctggggctccctgctccgtgcgtcaggttggggaaaccaccgtctgccccagaccctgacccaggacccgcctggaggaagctgggaccgaggctgggccaagatggtgtctgtgtttcgaagcgaggagatgtgtttgtcacaactgtttctccaggtggaagctgcatattgctgtgtggctgagctcggagagctcggattggttcagttcaaagatttaaatatgaatgtgaacagctttcaaaggaaatttgtgaatgaagtcagaaggtgtgaatcactggagagaatcctccgttttctggaagacgagatgcaaaatgagattgtagttcagttgctcgagaaaagcccactgaccccgctcccacgggaaatgattaccctggagactgttctagaaaaactggaaggagagttacaggaagccaaccagaaccagcaggccttgaaacaaagcttcctagaactgacagaactgaaatacctcctgaagaaaacccaagacttctttgagacggaaaccaatttagctgatgatttctttactgaggacacttctggcctcctggagttgaaagcagtgcctgcatatatgaccggaaagttggggttcatagccggtgtgatcaacagggagaggatggcttcctttgagcggttactgtggcgaatctgccgaggaaacgtgtacttgaagttcagtgagatggacgcccctctggaggatcctgtgacgaaagaagaaattcagaagaacatattcatcatattttaccaaggagagcagctcaggcagaaaatcaagaagatctgtgatgggtttcgagccactgtctacccttgcccagagcctgcggtggagcgcagagagatgttggagagcgtcaatgtgaggctggaagatttaatcaccgtcataacacaaacagagtctcaccgccagcgcctgctgcaggaagccgctgccaactggcactcctggctcatcaaggtgcagaagatgaaagctgtctaccacatcctgaacatgtgcaacatcgacgtcacccagcagtgtgtcatcgccgagatctggttcccggtggcagatgccacacgtatcaagagggcactggagcaaggcatggaactaagtggctcctccatggcccccatcatgaccacagtgcaatctaaaacagcccctcccacatttaacaggaccaataaattcacagctggcttccagaatattgttgatgcctatggtgtcggcagctaccgggagataaacccagccccctacaccatcatcactttccccttcctgttcgctgtgatgtttggagactgtggtcatggaaccgtgatgctcctggctgcactttggatgattctgaatgagagacgcttgctctcccagaagacagacaatgagatttggaacaccttcttccacgggcgctatctgatcctacttatgggcatcttctccatctacacgggtttgatctacaatgactgcttctccaagtccttgaacatctttggctcttcttggagtgtccaacccatgttcagaaacggcacatggaatactcatgtaatggaggaaagtctatatctgcagctggacccagccataccaggagtgtattttggaaatccatacccgtttgggattgatccgatttggaacttggcttcaaacaaactcacatttctgaactcgtataaaatgaagatgtcggtgatcctgggaattgtccagatggttttcggtgtcatcctcagccttttcaatcacatatacttcagaagaactctcaacatcattctgcaatttatccctgagatgatttttatcctgtgtctgtttggatacctggttttcatgatcattttcaaatggtgctgctttgacgtccatgtatctcagcacgcccccagcatcctcatccacttcatcaacatgtttctgtttaactacagtgactcttccaacgcacccctctacaaacatcagcaagaagtccaaagtttctttgtggttatggctttgatttctgtgccgtggatgcttctgattaagccgtttattcttagagccagtcatcggaaatcccagctgcaggcatccaggatccaagaagatgccactgagaacattgaaggtgatagctccagcccttctagccgttctggccagaggacttctgcagatacccacggggctctggacgaccatggagaagagttcaactttggagacgtctttgtccaccaagccatccacaccatcgagtactgcctgggctgcatttcaaacacagcctcctacctgcggctctgggccctcagcctggctcatgcacaactgtctgaagtgctctggactatggtgatgaacagcggccttcagacgcgaggctggggaggaatcgtcggggtttttattatttttgccgtatttgctgtcctgacagtagccatccttctgatcatggagggcctctctgctttcctgcacgccctgcgactgcactgggttgagttccagaacaagttctatgtcggggatggttacaagttttctccattctcctttaaacacatcctggatggcacagccgaggagtaggctgagggctgcacctcccacggtggtcaccatgccaatgaaggaagttcagtcttgtctttgatatcagcccctgcaaggcgctcaatgggaaggttgttcttggctcacctgaagcatgaaactgtgtattatttggacgtcagcctgtggatttgatacgacttaaccacgtcagaggaaggactttggcaagtgatattgtcttcatgtggggtattaattctcaaataataaagtaattgacaaatgaggggagaatgctaaacagatgtcttcttgcaatattttaaatattgtatttgagaaaataaacatctgagtcattc

SEQ ID NO: 2857 - DNA, 3558 bp, Homo sapiens
  source 1..3558: mol_type = unassigned DNA
gttgggtgggagcacaggcaccgggcaccatggggaaggccgagaactatgagctctactcggtggagctgggtcctggccctggcggggacatggctgccaagatgagcaagaagaagaaggcgggtggcgggggtggcaagaggaaggagaagctggagaacatgaagaaggagatggagattaacgaccaccagctgtcagtggcggagctggaacagaaataccagaccagtgccaccaagggcctctctgcgagcctggctgctgagctgctgctgcgggatgggcccaacgcactgcggccaccacggggcaccccagagtacgtcaagttcgcgaggcagctggccgggggcctgcagtgcctcatgtgggttgccgccgccatctgcctcatcgcctttgccatccaggctagtgagggggacctcaccaccgacgacaatctgtacctggcaatcgctctcattgctgtggttgtcgtcaccggctgctttggctactaccaggaattcaagagcaccaacatcatcgccagctttaagaaccttgtgccacagcaagccactgtcatccgcgatggagacaaattccagatcaacgctgaccaactggtggtgggcgacctggtggagatgaaaggtggggacagagtgcccgccgacatccgcatcctggcggcccagggctgcaaggtggacaactcctcgctgacaggggagtctgagccacagacccgctcacccgagtgcacgcacgagagccctctggagacccgcaacatcgccttcttctccaccatgtgccttgagggcaccgtgcagggcctggtggtgaacacgggcgaccgcaccatcattgggcgcatcgcatcgctggcgtcgggggtggaaaacgagaagacacccatcgctatcgagatcgagcattttgtggacatcatcgcgggcctggccattctcttcggtgccacattttttattgtggccatgtgcattggctacaccttcctgcgggccatggtcttcttcatggccatcgtggtggcctatgtgcctgaggggctgctggccactgtcacagtctgcctgtccctgacagccaagcgcctggccagtaagaactgcgtggtcaagaacctggaggcggtggagacattgggctccacttcggtgatctgctcggacaagacagggactctcactcagaaccgcatgactgtgtcccatctgtggtttgacaaccacatccacacagctgacaccacggaagaccagtcagggcagacgtttgaccagtcctcggagacgtggcgggcgctgtgccgggtgctcaccctgtgcaaccgcgccgccttcaagtccggccaggatgcagtgcctgtgcccaagcgcatcgtgattggagacgcatcggagacggcgctgctcaagttctcggagctgacgctgggcaacgccatgggctaccgggaccgcttcccaaaagtctgcgagatacccttcaactccaccaacaagttccagctgtccatccatacgctggaggacccgcgggacccgcgacacttgctggtgatgaagggcgcccccgagcgcgtgctggagcgctgcagctccatccttatcaagggccaggagctgccgctggacgagcagtggcgcgaggccttccagaccgcctacctcagcctgggaggcctgggcgaacgcgtgctcggcttctgccagctctacctgaatgagaaggactacccgcctggctatgccttcgacgtagaggccatgaactttccatctagcggcctctgctttgcgggacttgtatccatgattgacccaccccgggccaccgtccctgatgctgtgctcaagtgtcgcaccgcaggcatccgggtgatcatggtaacgggtgaccaccccatcaccgccaaggccattgcagccagtgtgggcatcatctcggaaggcagcgagacagtggaggacatcgctgcccgcctccgtgtgcccgtagaccaggttaatcgcaaggatgcccgtgcctgtgtgatcaatggcatgcagctgaaggacatggacccatcggaactggtcgaggccctgcgcacccaccccgagatggtgtttgcgcgcaccagcccccagcagaagctggtgatcgtggagagctgccagcggctgggtgcgattgtggccgtcacgggggatggtgtgaatgactccccagctctgaagaaggcagacatcggagtagccatgggcatcgctggctcagatgctgccaaaaatgcagctgacatgatcctgctggatgacaactttgcctccattgtgacaggcgtggagcagggtcgactgatcttcgacaacctgaagaagtctattgcctacacattgaccaagaacatcccagagctgacaccctacctcatctacatcaccgtcagcgtgcccctgcccctcgggtgcatcaccatcctcttcatcgaactctgcactgacattttcccatctgtgtccctggcatatgaaaaggccgagagtgacatcatgcacctgcgtccacgcaacccaaagcgtgacagattggtcaacgagcccctggctgcctactcctacttccagattggtgccattcagtcctttgctggcttcactgactacttcacggcaatggcccaggagggctggttcccactgctgtgcgtggggctgcgggcgcagtgggaggaccaccacctacaagatctgcaggacagctacggccaggagtggacattcgggcagcgcctgtaccagcagtacacctgctacaccgtgttcttcatcagcattgaggtgtgccagatcgccgatgtcctcatccgcaagacgcgccgtctctctgccttccagcaaggcttcttcaggaataagatcctggtgatcgccatcgtgttccaggtctgcatcggctgcttcctgtgctactgccccggcatgcccaacatcttcaacttcatgcccattcggttccagtggtggctggtccccctgccctacggcatcctcatcttcgtctatgatgagatccggaagcttggagttcgctgttgcccagggagctggtgggaccaggaactctactattagagggacgactgccttcaagcatccctgcaactgccacagcaggtgggggcagggctcgtgggaccctctggacagccaccaagatatctgagcaaccaagagtcccagccccaccagtatctgcttctgtagcccacggcaccccaaacttggagggacctgcccactcccctcccccattcccaaggttcgcacctcctggagcagcagcgcctgggcagtcctctgggctggcctcgggaaagccgccacctgtggtggcggtggggctctgacagggagtacagctgaccgcttctggagggtgtttctgttcttaggactccagtccaggctggacggctgcctgagggcccttcgttaaagacacgcttgtgtcctgggcgatggtaataaaaccagctcatgctgactgtgctgt

SEQ ID NO: 2858 - DNA, 1434 bp, Homo sapiens
  source 1..1434: mol_type = unassigned DNA
gagggtgcagggagcagacgggaggatctcaggccagggacgatggcggctctgcaggagaagaagacgtgtggccagcgcatggaggagttccagcgttactgctggaacccggacacggggcagatgctgggccgcaccctgtccaggtgggtgtggatcagcctgtactacgtggccttctacgtggtgatgactgggctcttcgccctgtgcctctatgtgctgatgcagacagtggacccgtacacaccggactaccaagaccagctacggtcaccaggggtaaccttaaggccggatgtttacggggagaaaggcctggaaattgtctacaacgtctctgataacagaacctgggcagacctcacacagactctccacgccttcctagcaggctactctccagcagcccaggaggacagcatcaactgcacctccgagcagtacttcttccaggagagtttccgcgctcccaaccacaccaagttctcctgcaagttcacggcagatatgctgcagaactgctcaggcctggcggatcccaacttcggctttgaagaaggaaagccatgttttattattaaaatgaacaggatcgtcaagttcctccccagcaacggctcggcccccagagtggactgcgccttcctggaccagccccgcgagctcggccagccgctgcaggtcaagtactaccctcccaacggcaccttcagtctgcactacttcccttattacgggaagaaagcccagccccactacagcaaccccctggtggcagcgaagctcctcaacatccccaggaacgctgaggtcgccatcgtgtgcaaggtcatggcggagcacgtgaccttcaacaatccccacgacccgtatgaagggaaagtggagttcaaactcaagattgagaagtgaaacggtttgcgcaggggtcctgggcacgcctgcggggtcgctcaaggacaccctcctggttgggcttaccttgcccgtcagttccctgccaaatcatccccaaagtggtttggagcaacggtgttgtcagtgtgcgaactccagagaagcgcccacatctgaaggacctgctcgcgagtatcagttcttccttgttgaattcttacagtttttagatggaatttgctgctataagaatgtccagctaccatgggaacgcaaggcagcaactctctaattaaccaggtcataaaaacgattcgtcttctatgtagacatcactttcttactataatttatttttctacacttcaatatgaactgccccccccacattaatataaaaactactaatgcactgatatgaaacacggcttacactaatgacattctgaattcttgcttttaaaattgcaattcctaagttgtaaacataaaatatattaaagttactcttattgtatgtaaaaaaagaaa

SEQ ID NO: 2859 - DNA, 3732 bp, Homo sapiens
  source 1..3732: mol_type = unassigned DNA
aatcctggactctcccgacccctagctgtcggtccccctccctgcgcgcgcgccggcgggtttcctaccctccgaggcgtccgctggcctgcgccctggcggggacgtgggcggggcgggcggcatttaaggctggtgccacctccccggtgcagcggctggcgatcggccgcggaggtgcgtgcagggcccgcgccgccgccggtatctccaccgccaacacctcagccactgccactgccacagccacacgaggccccccaccgtgcgctccgccgctgcggtcccggatccgcgctccacgcccgcagcccgcggcgccaccagcccagcatgcaccagaaaaccccagaaatttactccgtggagctcagcggaactaaggacatcgtgaaaacagacaagggggatggcaaggagaagtataggggtctgaagaacaactgcctggaactcaaaaagaaaaatcacaaagaggagtttcagaaagaactccatctggatgaccacaaactcagcaatagggaattggaagagaaatatggcacagacatcattatgggtctctccagcaccagagctgccgagctcctggcccgggatgggcccaactccctcacccctcccaagcagacgcctgagatcgtcaagttcctcaagcagatggtgggggggttctctatcctcctgtgggtgggcgcctttctctgttggattgcatatgggattcagtactccagcgacaagtctgcatccctgaacaacgtgtacttgggctgtgtgcttggtctggtggtcattttaacggggatctttgcttattaccaagaggcaaaaagcaccaacatcatgtccagcttcaataagatgatccctcagcaagctctcgtcatccgagattccgagaagaagaccatcccttcagagcagctggtggtgggggacattgtggaggtcaaaggaggagaccagatccctgcagacatcagggtgctgtcttctcaggggtgtcgggtggataactcatctctcacgggggagtctgagccccagccccgctcctctgagtttacccatgaaaaccccctggaaacaaagaacatctgcttctattccacaacgtgtctggaagcatctacttcccctgtaggcactgtcaccggcatggttatcaacacgggtgaccgcaccatcattggccatattgcctcattggcctcaggagttggaaatgagaagacgcccattgccattgagatcgagcactttgttcacattgtggcaggagtggctgtctccatcggcatccttttcttcatcatcgctgtgtccctgaagtatcaagtcctggactccatcatcttcctcattggcatcattgtggccaatgtgcccgagggcctcctggccactgtcactgtgaccctgtcgctgacagcaaaacggatggccaagaagaactgcctggtgaagaacctggaggctgtggagaccctcggctccacctccatcatctgctcggacaagactgggacactgacccagaacaggatgacagtggcccatctgtggttcgacaatcagatctttgtggctgacaccagtgaggaccattcaaaccaagtctttgaccaaagctctaggacttgggcctccttatccaagataataacattgtgtaaccgagcagagttcaagccaggacaggaaaatgtccccatcatgaagaaagctgtgattggagatgcctcagaaactgctcttttaaaattctcagaggtcattttgggtgatgtgatggaaattagaaaaagaaaccgcaaagtagctgaaatcccttttaactctactaataaatttcagctctccatccacgagatggatgacccccacggcaagcgcttcctcatggtgatgaagggggcccctgagcgcatcctagagaaatgcagcaccatcatgatcaacggcgaggagcacccactggacaagagcactgccaagaccttccacacagcctacatggagctgggcgggttgggcgagcgtgtgctgggtttctgtcatctctacctgccagcagacgagtttccagaaacctactcatttgacatagacgctatgaactttccgacctccaacctctgttttgtgggactcttgtcaatgatcgatccccctcggtccaccgtgccagatgcagtcaccaaatgccggagtgcagggatcaaggttattatggttactggtgatcatcccatcacagccaaagctattgccaagagtgtggggatcatttcagccaacagtgaaacagtggaagacattgcacatcgcctcaacattgctgtggagcaagttaacaaacgggatgccaaggccgctgtggtgactggcatggagctgaaggacatgagctcagaacagctggatgagatcttagccaactaccaggagattgtctttgcccggacatccccccagcagaagctgatcattgtggagggctgtcagaggcaggatgctgttgttgctgtgaccggggatggagttaatgactctccggctctaaagaaggcagacattgggattgccatggggatagcaggttctgatgcagccaaaaatgcagccgacatggtcttgctggacgacaacttcgcatccatcgtcacaggggtggaggaaggtcgcctgatctttgacaacctcaagaagactattgcttattccctgaccaagaacattgccgagctgtgcccctttctgatctacatcattgtcgggctccccctgcccattggcaccatcaccattctgttcattgacttggggacagacattatcccctccattgccttggcgtacgagaaagctgaaagtgacatcatgaacaggaagcctcgccacaagaataaggacaggctggtgaaccagccgctcgctgtgtactcatacctgcacattggcctcatgcaagccctgggagctttccttgtgtatttcaccgtctatgcacaagagggctttctgccccgcactctcattaacctgcgggtagaatgggagaaggactacgtgaatgacttgaaagacagctatgggcaggaatggacaaggtaccagagggaatacctagaatggacgggctacacggctttctttgttggcatcctagtccagcaaatagcagatctgatcatcaggaaaacccggaggaattccatcttccagcagggtctcttcagaaataaagtcatctgggtggggatcacctcacagatcatcattggtctgatcctctcctatggcctcggaagtgtcacagccttgagtttcaccatgcttagggctcagtactggtttgtggctgtgccgcacgccatcctgatctgggtgtatgatgaggtgcggaagctcttcatcaggctctaccctggaagctggtgggataagaacatgtattattaagaccacctcccttcctatgtctctcagcagcacgttggggcacacttgttcatcttctgaccgtttgctgggctattcccctgcagtgcagacatcgtcaaaattcagacaagaggaaattttcatgcagaaagctgtatgcaggatgctcactgatgttttgcactttaaaactgaaattcaactctttatataggattttcttttctatctccatctcctcattaaaaaatacgtacatttcgaggtaatggtataggg

SEQ ID NO: 2860 - DNA, 3538 bp, Homo sapiens
  source 1..3538: mol_type = unassigned DNA
cggccgcggaggtgcgtgcagggcccgcgccgccgccggtatctccaccgccaacacctcagccactgccactgccacagccacacgaggccccccaccgtgcgctccgccgctgcggtcccggatccgcgctccacgcccgcagcccgcggcgccaccagcccagcatgcaccagaaaaccccagaaatttactccgtggagctcagcggaactaaggacatcgtgaaaacagacaagggggatggcaaggagaagtataggggtctgaagaacaactgcctggaactcaaaaagaaaaatcacaaagaggagtttcagaaagaactccatctggatgaccacaaactcagcaatagggaattggaagagaaatatggcacagacatcattatgggtctctccagcaccagagctgccgagctcctggcccgggatgggcccaactccctcacccctcccaagcagacgcctgagatcgtcaagttcctcaagcagatggtgggggggttctctatcctcctgtgggtgggcgcctttctctgttggattgcatatgggattcagtactccagcgacaagtctgcatccctgaacaacgtgtacttgggctgtgtgcttggtctggtggtcattttaacggggatctttgcttattaccaagaggcaaaaagcaccaacatcatgtccagcttcaataagatgatccctcagcaagctctcgtcatccgagattccgagaagaagaccatcccttcagagcagctggtggtgggggacattgtggaggtcaaaggaggagaccagatccctgcagacatcagggtgctgtcttctcaggggtgtcgggtggataactcatctctcacgggggagtctgagccccagccccgctcctctgagtttacccatgaaaaccccctggaaacaaagaacatctgcttctattccacaacgtgtctggaaggcactgtcaccggcatggttatcaacacgggtgaccgcaccatcattggccatattgcctcattggcctcaggagttggaaatgagaagacgcccattgccattgagatcgagcactttgttcacattgtggcaggagtggctgtctccatcggcatccttttcttcatcatcgctgtgtccctgaagtatcaagtcctggactccatcatcttcctcattggcatcattgtggccaatgtgcccgagggcctcctggccactgtcactgtgaccctgtcgctgacagcaaaacggatggccaagaagaactgcctggtgaagaacctggaggctgtggagaccctcggctccacctccatcatctgctcggacaagactgggacactgacccagaacaggatgacagtggcccatctgtggttcgacaatcagatctttgtggctgacaccagtgaggaccattcaaaccaagtctttgaccaaagctctaggacttgggcctccttatccaagataataacattgtgtaaccgagcagagttcaagccaggacaggaaaatgtccccatcatgaagaaagctgtgattggagatgcctcagaaactgctcttttaaaattctcagaggtcattttgggtgatgtgatggaaattagaaaaagaaaccgcaaagtagctgaaatcccttttaactctactaataaatttcagctctccatccacgagatggatgacccccacggcaagcgcttcctcatggtgatgaagggggcccctgagcgcatcctagagaaatgcagcaccatcatgatcaacggcgaggagcacccactggacaagagcactgccaagaccttccacacagcctacatggagctgggcgggttgggcgagcgtgtgctgggtttctgtcatctctacctgccagcagacgagtttccagaaacctactcatttgacatagacgctatgaactttccgacctccaacctctgttttgtgggactcttgtcaatgatcgatccccctcggtccaccgtgccagatgcagtcaccaaatgccggagtgcagggatcaaggttattatggttactggtgatcatcccatcacagccaaagctattgccaagagtgtggggatcatttcagccaacagtgaaacagtggaagacattgcacatcgcctcaacattgctgtggagcaagttaacaaacgggatgccaaggccgctgtggtgactggcatggagctgaaggacatgagctcagaacagctggatgagatcttagccaactaccaggagattgtctttgcccggacatccccccagcagaagctgatcattgtggagggctgtcagaggcaggatgctgttgttgctgtgaccggggatggagttaatgactctccggctctaaagaaggcagacattgggattgccatggggatagcaggttctgatgcagccaaaaatgcagccgacatggtcttgctggacgacaacttcgcatccatcgtcacaggggtggaggaaggtcgcctgatctttgacaacctcaagaagactattgcttattccctgaccaagaacattgccgagctgtgcccctttctgatctacatcattgtcgggctccccctgcccattggcaccatcaccattctgttcattgacttggggacagacattatcccctccattgccttggcgtacgagaaagctgaaagtgacatcatgaacaggaagcctcgccacaagaataaggacaggctggtgaaccagccgctcgctgtgtactcatacctgcacattggcctcatgcaagccctgggagctttccttgtgtatttcaccgtctatgcacaagagggctttctgccccgcactctcattaacctgcgggtagaatgggagaaggactacgtgaatgacttgaaagacagctatgggcaggaatggacaaggtaccagagggaatacctagaatggacgggctacacggctttctttgttggcatcctagtccagcaaatagcagatctgatcatcaggaaaacccggaggaattccatcttccagcagggtctcttcagaaataaagtcatctgggtggggatcacctcacagatcatcattggtctgatcctctcctatggcctcggaagtgtcacagccttgagtttcaccatgcttagggctcagtactggtttgtggctgtgccgcacgccatcctgatctgggtgtatgatgaggtgcggaagctcttcatcaggctctaccctggaagctggtgggataagaacatgtattattaagaccacctcccttcctatgtctctcagcagcacgttggggcacacttgttcatcttctgaccgtttgctgggctattcccctgcagtgcagacatcgtcaaaattcagacaagaggaaattttcatgcagaaagctgtatgcaggatgctcactgatgttttgcactttaaaactgaaattcaactctttatataggattttcttttctatctccatctcctcattaaaaaatacgtacatttcgaggtaa

SEQ ID NO: 2861 - DNA, 3654 bp, Homo sapiens
  source 1..3654: mol_type = unassigned DNA
ctggggcgcagagcagcggcgggaggaggcggacacgtggcaacagcggtagcagcccgggcggcggcagcaacagcggcggcggcatcggcccgagccgccggccgccctcccaccctcccgccccgcggcagccctagctccctccacttggctcccctggtcccgctcgctcggccgggagctgctctgtgcttttctctctgattctccagcgacaggacccggcgccgggcactgagcaccgccaccatggggaagggggttggacgtgataagtatgagcctgcagctgtttcagaacaaggtgataaaaagggcaaaaagggcaaaaaagacagggacatggatgaactgaagaaagaagtttctatggatgatcataaacttagccttgatgaacttcatcgtaaatatggaacagacttgagccggggattaacatctgctcgtgcagctgagatcctggcgcgagatggtcccaacgccctcactccccctcccactactcctgaatggatcaagttttgtcggcagctctttggggggttctcaatgttactgtggattggagcgattctttgtttcttggcttatagcatccaagctgctacagaagaggaacctcaaaacgataatctgtacctgggtgtggtgctatcagccgttgtaatcataactggttgcttctcctactatcaagaagctaaaagttcaaagatcatggaatccttcaaaaacatggtccctcagcaagcccttgtgattcgaaatggtgagaaaatgagcataaatgcggaggaagttgtggttggggatctggtggaagtaaaaggaggagaccgaattcctgctgacctcagaatcatatctgcaaatggctgcaaggtggataactcctcgctcactggtgaatcagaaccccagactaggtctccagatttcacaaatgaaaaccccctggagacgaggaacattgccttcttttcaaccaattgtgttgaaggcaccgcacgtggtattgttgtctacactggggatcgcactgtgatgggaagaattgccacacttgcttctgggctggaaggaggccagacccccattgctgcagaaattgaacattttatccacatcatcacgggtgtggctgtgttcctgggtgtgtctttcttcatcctttctctcatccttgagtacacctggcttgaggctgtcatcttcctcatcggtatcatcgtagccaatgtgccggaaggtttgctggccactgtcacggtctgtctgacacttactgccaaacgcatggcaaggaaaaactgcttagtgaagaacttagaagctgtggagaccttggggtccacgtccaccatctgctctgataaaactggaactctgactcagaaccggatgacagtggcccacatgtggtttgacaatcaaatccatgaagctgatacgacagagaatcagagtggtgtctcttttgacaagacttcagctacctggcttgctctgtccagaattgcaggtctttgtaacagggcagtgtttcaggctaaccaggaaaacctacctattcttaagcgggcagttgcaggagatgcctctgagtcagcactcttaaagtgcatagagctgtgctgtggttccgtgaaggagatgagagaaagatacgccaaaatcgtcgagatacccttcaactccaccaacaagtaccagttgtctattcataagaaccccaacacatcggagccccaacacctgttggtgatgaagggcgccccagaaaggatcctagaccgttgcagctctatcctcctccacggcaaggagcagcccctggatgaggagctgaaagacgcctttcagaacgcctatttggagctggggggcctcggagaacgagtcctaggtttctgccacctctttctgccagatgaacagtttcctgaagggttccagtttgacactgacgatgtgaatttccctatcgataatctgtgctttgttgggctcatctccatgattgaccctccacgggcggccgttcctgatgccgtgggcaaatgtcgaagtgctggaattaaggtcatcatggtcacaggagaccatccaatcacagctaaagctattgccaaaggtgtgggcatcatctcagaaggcaatgagaccgtggaagacattgctgcccgcctcaacatcccagtcagccaggtgaaccccagggatgccaaggcctgcgtagtacacggcagtgatctaaaggacatgacctccgagcagctggatgacattttgaagtaccacactgagatagtgtttgccaggacctcccctcagcagaagctcatcattgtggaaggctgccaaagacagggtgctatcgtggctgtgactggtgacggtgtgaatgactctccagctttgaagaaagcagacattggggttgctatggggattgctggctcagatgtgtccaagcaagctgctgacatgattcttctggatgacaactttgcctcaattgtgactggagtagaggaaggtcgtctgatctttgataacttgaagaaatccattgcttataccttaaccagtaacattcccgagatcaccccgttcctgatatttattattgcaaacattccactaccactggggactgtcaccatcctctgcattgacttgggcactgacatggttcctgccatctccctggcttatgagcaggctgagagtgacatcatgaagagacagcccagaaatcccaaaacagacaaacttgtgaatgagcggctgatcagcatggcctatgggcagattggaatgatccaggccctgggaggcttctttacttactttgtgattctggctgagaacggcttcctcccaattcacctgttgggcctccgagtggactgggatgaccgctggatcaacgatgtggaagacagctacgggcagcagtggacctatgagcagaggaaaatcgtggagttcacctgccacacagccttcttcgtcagtatcgtggtggtgcagtgggccgacttggtcatctgtaagaccaggaggaattcggtcttccagcaggggatgaagaacaagatcttgatatttggcctctttgaagagacagccctggctgctttcctttcctactgccctggaatgggtgttgctcttaggatgtatcccctcaaacctacctggtggttctgtgccttcccctactctcttctcatcttcgtatatgacgaagtcagaaaactcatcatcaggcgacgccctggcggctgggtggagaaggaaacctactattagccccccgtcctgcacgccgtggagcatcaggccacacactctgcatccgacacccaccccctctttgtgtacttcagtcttggagtttggaactctaccctggtaggaaagcaccgcagcatgtggggaagcaagacgtcctggaatgaagcatgtagctctatggggggaggggggagggctgcctgaaaaccatccatctgtggaaatgacagcggggaaggtttttatgtgcctttttgtttttgtaaaaaaggaacacccggaaagactgaaagaatacattttatatctggatttttacaaataaagatggctattataatggaa

SEQ ID NO: 2862 - DNA, 2595 bp, Homo sapiens
  source 1..2595: mol_type = unassigned DNA
ggtaaagaggttggacgtgataagtatgagcctgcagctgtttcagaacaaggtgataaaaagggcaaaaagggcaaaaaagacagggacatggatgaactgaagaaagaagtttctatggatgatcataaacttagccttgatgaacttcatcgtaaatatggaacagacttgagccggggattaacatctgctcgtgcagctgagatcctggcgcgagatggtcccaacgccctcactccccctcccactactcctgaatggatcaagttttgtcggcagctctttggggggttctcaatgttactgtggattggagcgattctttgtttcttggcttatagcatccaagctgctacagaagaggaacctcaaaacgataatctgtacctgggtgtggtgctatcagccgttgtaatcataactggttgcttctcctactatcaagaagctaaaagttcaaagatcatggaatccttcaaaaacatggtccctcagcaagcccttgtgattcgaaatggtgagaaaatgagcataaatgcggaggaagttgtggttggggatctggtggaagtaaaaggaggagaccgaattcctgctgacctcagaatcatatctgcaaatggctgcaaggtggataactcctcgctcactggtgaatcagaaccccagactaggtctccagatttcacaaatgaaaaccccctggagacgaggaacattgccttcttttcaaccaattgtgttgaaggcaccgcacgtggtattgttgtctacactggggatcgcactgtgatgggaagaattgccacacttgcttctgggctggaaggaggccagacccccattgctgcagaaattgaacattttatccacatcatcacgggtgtggctgtgttcctgggtgtgtctttcttcatcctttctctcatccttgagtacacctggcttgaggctgtcatcttcctcatcggtatcatcgtagccaatgtgccggaaggtttgctggccactgtcacggtctgtctgacacttactgccaaacgcatggcaaggaaaaactgcttagtgaagaacttagaagctgtggagaccttggggtccacgtccaccatctgctctgataaaactggaactctgactcagaaccggatgacagtggcccacatgtggtttgacaatcaaatccatgaagctgatacgacagagaatcagagtggtgtctcttttgacaagacttcagctacctggcttgctctgtccagaattgcaggtctttgtaacagggcagtgtttcaggctaaccaggaaaacctacctattcttaagcgggcagttgcaggagatgcctctgagtcagcactcttaaagtgcatagagctgtgctgtggttccgtgaaggagatgagagaaagatacgccaaaatcgtcgagatacccttcaactccaccaacaagtaccagttgtctattcataagaaccccaacacatcggagccccaacacctgttggtgatgaagggcgccccagaaaggatcctagaccgttgcagctctatcctcctccacggcaaggagcagcccctggatgaggagctgaaagacgcctttcagaacgcctatttggagctggggggcctcggagaacgagtcctaggtttctgccacctctttctgccagatgaacagtttcctgaagggttccagtttgacactgacgatgtgaatttccctatcgataatctgtgctttgttgggctcatctccatgattgaccctccacgggcggccgttcctgatgccgtgggcaaatgtcgaagtgctggaattaaggtcatcatggtcacaggagaccatccaatcacagctaaagctattgccaaaggtgtgggcatcatctcagaaggcaatgaacctatgagcagaggaaaatcgtggagttcacctgccacacagccttcttcgtcagtatcgtggtggtgcagtgggccgacttggtcatctgtaagaccaggaggaattcggtcttccagcaggggatgaagaacaagatcttgatatttggcctctttgaagagacagccctggctgctttcctttcctactgccctggaatgggtgttgctcttaggatgtatcccctcaaacctacctggtggttctgtgccttcccctactctcttctcatcttcgtatatgacgaagtcagaaaactcatcatcaggcgacgccctggcggctgggtggagaaggaaacctactattagccccccgtcctgcacgccgtggagcatcaggccacacactctgcatccgacacccaccccctctttgtgtacttcagtcttggagtttggaactctaccctggtaggaaagcaccgcagcatgtggggaagcaagacgtcctggaatgaagcatgtagctctatggggggaggggggagggctgcctgaaaaccatccatctgtggaaatgacagcggggaaggtttttatgtgcctttttgtttttgtaaaaaaggaacacccggaaagactgaaagaatacattttatatctggatttttacaaataaagatggctattataatgg

SEQ ID NO: 2863 - DNA, 698 bp, Homo sapiens
  source 1..698: mol_type = unassigned DNA
caagagctgtaccgaaagaggcaccaacaaatgtggttgctccataatggagagaatgtcaagaatgttgactatctttagacctgcttcattaatagataagatagaaactaaagaacccacccagttggaagaagttattagtcaagtagtgctgcacacgtgaccacagaagttaaaaaggttggacgtgataagtatgagcctgcagctgtttcagaacaaggtgataaaaagggcaaaaagggcaaaaaagacagggacatggatgaactgaagaaagaagtttctatggatgatcataaacttagccttgatgaacttcatcgtaaatatggaacagacttgagccggggattaacatctgctcgtgcagctgagatcctggcgcgagatggtcccaacgccctcactccccctcccactactcctgaatggatcaagttttgtcggcagctctttggggggttctcaatgttactgtggattggagcgattctttgtttcttggcttatagcatccaagctgctacagaagaggaacctcaaaacgataatctgtacctgggtgtggtgctatcagccgttgtaatcataactggttgcttctcctactatcaagaagctaaaagttcaaagatcatggaatccttcaaaaacatggtccctcagcaagcccttgtgattcgaaatggtga

SEQ ID NO: 2864 - DNA, 3572 bp, Homo sapiens
  source 1..3572: mol_type = unassigned DNA
gatatgtaataatgtctttgcaaagcaaagaatataaacagtataaaagtactagcatttagatgtattgtatcatttaatccttaaaaacatgaaatgaggttggcactattctttatctccacgctgtggaagaggaaattgaaatgtagaagttagtaacttgcctaaggatacactgctggttggacgtgataagtatgagcctgcagctgtttcagaacaaggtgataaaaagggcaaaaagggcaaaaaagacagggacatggatgaactgaagaaagaagtttctatggatgatcataaacttagccttgatgaacttcatcgtaaatatggaacagacttgagccggggattaacatctgctcgtgcagctgagatcctggcgcgagatggtcccaacgccctcactccccctcccactactcctgaatggatcaagttttgtcggcagctctttggggggttctcaatgttactgtggattggagcgattctttgtttcttggcttatagcatccaagctgctacagaagaggaacctcaaaacgataatctgtacctgggtgtggtgctatcagccgttgtaatcataactggttgcttctcctactatcaagaagctaaaagttcaaagatcatggaatccttcaaaaacatggtccctcagcaagcccttgtgattcgaaatggtgagaaaatgagcataaatgcggaggaagttgtggttggggatctggtggaagtaaaaggaggagaccgaattcctgctgacctcagaatcatatctgcaaatggctgcaaggtggataactcctcgctcactggtgaatcagaaccccagactaggtctccagatttcacaaatgaaaaccccctggagacgaggaacattgccttcttttcaaccaattgtgttgaaggcaccgcacgtggtattgttgtctacactggggatcgcactgtgatgggaagaattgccacacttgcttctgggctggaaggaggccagacccccattgctgcagaaattgaacattttatccacatcatcacgggtgtggctgtgttcctgggtgtgtctttcttcatcctttctctcatccttgagtacacctggcttgaggctgtcatcttcctcatcggtatcatcgtagccaatgtgccggaaggtttgctggccactgtcacggtctgtctgacacttactgccaaacgcatggcaaggaaaaactgcttagtgaagaacttagaagctgtggagaccttggggtccacgtccaccatctgctctgataaaactggaactctgactcagaaccggatgacagtggcccacatgtggtttgacaatcaaatccatgaagctgatacgacagagaatcagagtggtgtctcttttgacaagacttcagctacctggcttgctctgtccagaattgcaggtctttgtaacagggcagtgtttcaggctaaccaggaaaacctacctattcttaagcgggcagttgcaggagatgcctctgagtcagcactcttaaagtgcatagagctgtgctgtggttccgtgaaggagatgagagaaagatacgccaaaatcgtcgagatacccttcaactccaccaacaagtaccagttgtctattcataagaaccccaacacatcggagccccaacacctgttggtgatgaagggcgccccagaaaggatcctagaccgttgcagctctatcctcctccacggcaaggagcagcccctggatgaggagctgaaagacgcctttcagaacgcctatttggagctggggggcctcggagaacgagtcctaggtttctgccacctctttctgccagatgaacagtttcctgaagggttccagtttgacactgacgatgtgaatttccctatcgataatctgtgctttgttgggctcatctccatgattgaccctccacgggcggccgttcctgatgccgtgggcaaatgtcgaagtgctggaattaaggtcatcatggtcacaggagaccatccaatcacagctaaagctattgccaaaggtgtgggcatcatctcagaaggcaatgagaccgtggaagacattgctgcccgcctcaacatcccagtcagccaggtgaaccccagggatgccaaggcctgcgtagtacacggcagtgatctaaaggacatgacctccgagcagctggatgacattttgaagtaccacactgagatagtgtttgccaggacctcccctcagcagaagctcatcattgtggaaggctgccaaagacagggtgctatcgtggctgtgactggtgacggtgtgaatgactctccagctttgaagaaagcagacattggggttgctatggggattgctggctcagatgtgtccaagcaagctgctgacatgattcttctggatgacaactttgcctcaattgtgactggagtagaggaaggtcgtctgatctttgataacttgaagaaatccattgcttataccttaaccagtaacattcccgagatcaccccgttcctgatatttattattgcaaacattccactaccactggggactgtcaccatcctctgcattgacttgggcactgacatggttcctgccatctccctggcttatgagcaggctgagagtgacatcatgaagagacagcccagaaatcccaaaacagacaaacttgtgaatgagcggctgatcagcatggcctatgggcagattggaatgatccaggccctgggaggcttctttacttactttgtgattctggctgagaacggcttcctcccaattcacctgttgggcctccgagtggactgggatgaccgctggatcaacgatgtggaagacagctacgggcagcagtggacctatgagcagaggaaaatcgtggagttcacctgccacacagccttcttcgtcagtatcgtggtggtgcagtgggccgacttggtcatctgtaagaccaggaggaattcggtcttccagcaggggatgaagaacaagatcttgatatttggcctctttgaagagacagccctggctgctttcctttcctactgccctggaatgggtgttgctcttaggatgtatcccctcaaacctacctggtggttctgtgccttcccctactctcttctcatcttcgtatatgacgaagtcagaaaactcatcatcaggcgacgccctggcggctgggtggagaaggaaacctactattagccccccgtcctgcacgccgtggagcatcaggccacacactctgcatccgacacccaccccctctttgtgtacttcagtcttggagtttggaactctaccctggtaggaaagcaccgcagcatgtggggaagcaagacgtcctggaatgaagcatgtagctctatggggggaggggggagggctgcctgaaaaccatccatctgtggaaatgacagcggggaaggtttttatgtgcctttttgtttttgtaaaaaaggaacacccggaaagactgaaagaatacattttatatctggatttttacaaataaagatggctattataatgg

SEQ ID NO: 2865 - DNA, 654 bp, Homo sapiens
  source 1..654: mol_type = unassigned DNA
agcgcccggggaggccatccgcaggtgggcgcggggcctggattccacagaggggcggagtccctcagtcaggcgctggctgcaatcacacccgagcgccagccccctccagcatccctgagtcccagaggagatcgccgaagcgctggaaaagccgttccgcccacgacttctggtgccgggtcggcggcgactgggggagcccagttccgagaccgtaccgcacccactgcggacctcctgggccctacatagttggacgtgataagtatgagcctgcagctgtttcagaacaaggtgataaaaagggcaaaaagggcaaaaaagacagggacatggatgaactgaagaaagaagtttctatggatgatcataaacttagccttgatgaacttcatcgtaaatatggaacagacttgagccggggattaacatctgctcgtgcagctgagatcctggcgcgagatggtcccaacgccctcactccccctcccactactcctgaatggatcaagttttgtcggcagctctttggggggttctcaatgttactgtggattggagcgattctttgtttcttggcttatagcatccaagctgctacagaagaggaacctcaaaacgataatctgtacctgggtgtggtgctatcag

SEQ ID NO: 2866 - DNA, 579 bp, Homo sapiens
  source 1..579: mol_type = unassigned DNA
agacagcccagaaatcccaaaacagacaaacttgtgaatgagcggctgatcagcatggcctatgggcagattggaatgatccaggccctgggaggcttctttacttactttgtgattctggctgagaacggcttcctcccaattcacctgttgggcctccgagtggactgggatgaccgctggatcaacgatgtggaagacagctacgggcagcagtggacctatgagcagaggaaaatcgtggagttcacctgccacacagccttcttcgtcagtatcgtggtggtgcagtgggccgacttggtcatctgtaagaccaggaggaattcggtcttccagcaggggatgaagaacaagatcttgatatttggcctctttgaagagacagccctggctgctttcctttcctactgccctggaatgggtgttgctcttaggatgtatcccctcaagactctgacgcagtacagttaatctgtgcacaggaaagaagagctgtttgaagaggttattcggtaaatgcagagaatgtctttgtagtataaattattgctctatataaaactgcttgtaagtttt

SEQ ID NO: 2867 - DNA, 3225 bp, Homo sapiens
  source 1..3225: mol_type = unassigned DNA
ctggggcgcagagcagcggcgggaggaggcggacacgtggcaacagcggtagcagcccgggcggcggcagcaacagcggcggcggcatcggcccgagccgccggccgccctcccaccctcccgccccgcggcagccctagctccctccacttggctcccctggtcccgctcgctcggccgggagctgctctgtgcttttctctctgattctccagcgacaggacccggcgccgggcactgagcaccgccaccatggggaagggggttggacgtgataagtatgagcctgcagctgtttcagaacaaggtgataaaaagggcaaaaagggcaaaaaagacagggacatggatgaactgaagaaagaagtttctatggatgatcataaacttagccttgatgaacttcatcgtaaatatggaacagacttgagccggggattaacatctgctcgtgcagctgagatcctggcgcgagatggtcccaacgccctcactccccctcccactactcctgaatggatcaagttttgtcggcagctctttggggggttctcaatgttactgtggattggagcgattctttgtttcttggcttatagcatccaagctgctacagaagaggaacctcaaaacgataatctgtacctgggtgtggtgctatcagccgttgtaatcataactggttgcttctcctactatcaagaagctaaaagttcaaagatcatggaatccttcaaaaacatggtccctcagcaagcccttgtgattcgaaatggtgagaaaatgagcataaatgcggaggaagttgtggttggggatctggtggaagtaaaaggaggagaccgaattcctgctgacctcagaatcatatctgcaaatggctgcaaggtggataactcctcgctcactggtgaatcagaaccccagactaggtctccagatttcacaaatgaaaaccccctggagacgaggaacattgccttcttttcaaccaattgtgttgaaggcaccgcacgtggtattgttgtctacactggggatcgcactgtgatgggaagaattgccacacttgcttctgggctggaaggaggccagacccccattgctgcagaaattgaacattttatccacatcatcacgggtgtggctgtgttcctgggtgtgtctttcttcatcctttctctcatccttgagtacacctggcttgaggctgtcatcttcctcatcggtatcatcgtagccaatgtgccggaaggtttgctggccactgtcacggtctgtctgacacttactgccaaacgcatggcaaggaaaaactgcttagtgaagaacttagaagctgtggagaccttggggtccacgtccaccatctgctctgataaaactggaactctgactcagaaccggatgacagtggcccacatgtggtttgacaatcaaatccatgaagctgatacgacagagaatcagagtggtgtctcttttgacaagacttcagctacctggcttgctctgtccagaattgcaggtctttgtaacagggcagtgtttcaggctaaccaggaaaacctacctattcttaagcgggcagttgcaggagatgcctctgagtcagcactcttaaagtgcatagagctgtgctgtggttccgtgaaggagatgagagaaagatacgccaaaatcgtcgagatacccttcaactccaccaacaagtaccagttgtctattcataagaaccccaacacatcggagccccaacacctgttggtgatgaagggcgccccagaaaggatcctagaccgttgcagctctatcctcctccacggcaaggagcagcccctggatgaggagctgaaagacgcctttcagaacgcctatttggagctggggggcctcggagaacgagtcctaggtttctgccacctctttctgccagatgaacagtttcctgaagggttccagtttgacactgacgatgtgaatttccctatcgataatctgtgctttgttgggctcatctccatgattgaccctccacgggcggccgttcctgatgccgtgggcaaatgtcgaagtgctggaattaaggtcatcatggtcacaggagaccatccaatcacagctaaagctattgccaaaggtgtgggcatcatctcagaaggcaatgagaccgtggaagacattgctgcccgcctcaacatcccagtcagccaggtgaaccccagggatgccaaggcctgcgtagtacacggcagtgatctaaaggacatgacctccgagcagctggatgacattttgaagtaccacactgagatagtgtttgccaggacctcccctcagcagaagctcatcattgtggaaggctgccaaagacagggtgctatcgtggctgtgactggtgacggtgtgaatgactctccagctttgaagaaagcagacattggggttgctatggggattgctggctcagatgtgtccaagcaagctgctgacatgattcttctggatgacaactttgcctcaattgtgactggagtagaggaaggtcgtctgatctttgataacttgaagaaatccattgcttataccttaaccagtaacattcccgagatcaccccgttcctgatatttattattgcaaacattccactaccactggggactgtcaccatcctctgcattgacttgggcactgacatggttcctgccatctccctggcttatgagcaggctgagagtgacatcatgaagagacagcccagaaatcccaaaacagacaaacttgtgaatgagcggctgatcagcatggcctatgggcagattggaatgatccaggccctgggaggcttctttacttactttgtgattctggctgagaacggcttcctcccaattcacctgttgggcctccgagtggactgggatgaccgctggatcaacgatgtggaagacagctacgggcagcagtggacctatgagcagaggaaaatcgtggagttcacctgccacacagccttcttcgtcagtatcgtggtggtgcagtgggccgacttggtcatctgtaagaccaggaggaattcggtcttccagcaggggatgaagaacaagatcttgatatttggcctctttgaagagacagccctggctgctttcctttcctactgccctggaatgggtgttgctcttaggatgtatcccctcaagactctgacgcagtacagttaa

SEQ ID NO: 2868 - DNA, 3763 bp, Homo sapiens
  source 1..3763: mol_type = unassigned DNA
agcagcgggggcggccccgggactgagccggcatccctgagcctggctcccctccctgcgaccgccgtcacctccttctccttccttttccctccgccctccgtgccctgaggaaaggcgcgctcctccccttcccctggggcgctccgccggggcctcctcccgggcctccgttcccgccgcggccccggttccggcgggggcagcctccgggttcggggctccttctcctggggacgctggggcttagcttgctccgcgcagaggcggccgccctcccccaaagaaaaaactggctgcttctaagtgcgaagccggctgggcgggctggtgccagaaagggtgtgtcttcactgccctaagatggcctttaaggttggacgtgataagtatgagcctgcagctgtttcagaacaaggtgataaaaagggcaaaaagggcaaaaaagacagggacatggatgaactgaagaaagaagtttctatggatgatcataaacttagccttgatgaacttcatcgtaaatatggaacagacttgagccggggattaacatctgctcgtgcagctgagatcctggcgcgagatggtcccaacgccctcactccccctcccactactcctgaatggatcaagttttgtcggcagctctttggggggttctcaatgttactgtggattggagcgattctttgtttcttggcttatagcatccaagctgctacagaagaggaacctcaaaacgataatctgtacctgggtgtggtgctatcagccgttgtaatcataactggttgcttctcctactatcaagaagctaaaagttcaaagatcatggaatccttcaaaaacatggtccctcagcaagcccttgtgattcgaaatggtgagaaaatgagcataaatgcggaggaagttgtggttggggatctggtggaagtaaaaggaggagaccgaattcctgctgacctcagaatcatatctgcaaatggctgcaaggtggataactcctcgctcactggtgaatcagaaccccagactaggtctccagatttcacaaatgaaaaccccctggagacgaggaacattgccttcttttcaaccaattgtgttgaaggcaccgcacgtggtattgttgtctacactggggatcgcactgtgatgggaagaattgccacacttgcttctgggctggaaggaggccagacccccattgctgcagaaattgaacattttatccacatcatcacgggtgtggctgtgttcctgggtgtgtctttcttcatcctttctctcatccttgagtacacctggcttgaggctgtcatcttcctcatcggtatcatcgtagccaatgtgccggaaggtttgctggccactgtcacggtctgtctgacacttactgccaaacgcatggcaaggaaaaactgcttagtgaagaacttagaagctgtggagaccttggggtccacgtccaccatctgctctgataaaactggaactctgactcagaaccggatgacagtggcccacatgtggtttgacaatcaaatccatgaagctgatacgacagagaatcagagtggtgtctcttttgacaagacttcagctacctggcttgctctgtccagaattgcaggtctttgtaacagggcagtgtttcaggctaaccaggaaaacctacctattcttaagcgggcagttgcaggagatgcctctgagtcagcactcttaaagtgcatagagctgtgctgtggttccgtgaaggagatgagagaaagatacgccaaaatcgtcgagatacccttcaactccaccaacaagtaccagttgtctattcataagaaccccaacacatcggagccccaacacctgttggtgatgaagggcgccccagaaaggatcctagaccgttgcagctctatcctcctccacggcaaggagcagcccctggatgaggagctgaaagacgcctttcagaacgcctatttggagctggggggcctcggagaacgagtcctaggtttctgccacctctttctgccagatgaacagtttcctgaagggttccagtttgacactgacgatgtgaatttccctatcgataatctgtgctttgttgggctcatctccatgattgaccctccacgggcggccgttcctgatgccgtgggcaaatgtcgaagtgctggaattaaggtcatcatggtcacaggagaccatccaatcacagctaaagctattgccaaaggtgtgggcatcatctcagaaggcaatgagaccgtggaagacattgctgcccgcctcaacatcccagtcagccaggtgaaccccagggatgccaaggcctgcgtagtacacggcagtgatctaaaggacatgacctccgagcagctggatgacattttgaagtaccacactgagatagtgtttgccaggacctcccctcagcagaagctcatcattgtggaaggctgccaaagacagggtgctatcgtggctgtgactggtgacggtgtgaatgactctccagctttgaagaaagcagacattggggttgctatggggattgctggctcagatgtgtccaagcaagctgctgacatgattcttctggatgacaactttgcctcaattgtgactggagtagaggaaggtcgtctgatctttgataacttgaagaaatccattgcttataccttaaccagtaacattcccgagatcaccccgttcctgatatttattattgcaaacattccactaccactggggactgtcaccatcctctgcattgacttgggcactgacatggttcctgccatctccctggcttatgagcaggctgagagtgacatcatgaagagacagcccagaaatcccaaaacagacaaacttgtgaatgagcggctgatcagcatggcctatgggcagattggaatgatccaggccctgggaggcttctttacttactttgtgattctggctgagaacggcttcctcccaattcacctgttgggcctccgagtggactgggatgaccgctggatcaacgatgtggaagacagctacgggcagcagtggacctatgagcagaggaaaatcgtggagttcacctgccacacagccttcttcgtcagtatcgtggtggtgcagtgggccgacttggtcatctgtaagaccaggaggaattcggtcttccagcaggggatgaagaacaagatcttgatatttggcctctttgaagagacagccctggctgctttcctttcctactgccctggaatgggtgttgctcttaggatgtatcccctcaaacctacctggtggttctgtgccttcccctactctcttctcatcttcgtatatgacgaagtcagaaaactcatcatcaggcgacgccctggcggctgggtggagaaggaaacctactattagccccccgtcctgcacgccgtggagcatcaggccacacactctgcatccgacacccaccccctctttgtgtacttcagtcttggagtttggaactctaccctggtaggaaagcaccgcagcatgtggggaagcaagacgtcctggaatgaagcatgtagctctatggggggaggggggagggctgcctgaaaaccatccatctgtggaaatgacagcggggaaggtttttatgtgcctttttgtttttgtaaaaaaggaacacccggaaagactgaaagaatacattttatatctggatttttacaaataaagatggctattataatgg

SEQ ID NO: 2869 - DNA, 5421 bp, Homo sapiens
  source 1..5421: mol_type = unassigned DNA
gtctccgactgtcccagacgggctggtgtgggcttgggatcctcctggtgacctctcccgctaaggtccctcagccactctgccccaagatgggccgtggggctggccgtgagtactcacctgccgccaccacggcagagaatgggggcggcaagaagaaacagaaggagaaggaactggatgagctgaagaaggaggtggcaatggatgaccacaagctgtccttggatgagctgggccgcaaataccaagtggacctgtccaagggcctcaccaaccagcgggctcaggacgttctggctcgagatgggcccaacgccctcacaccacctcccacaacccctgagtgggtcaagttctgccgtcagcttttcggggggttctccatcctgctgtggattggggctatcctctgcttcctggcctacggcatccaggctgccatggaggatgaaccatccaacgacaatctatatctgggtgtggtgctggcagctgtggtcattgtcactggctgcttctcctactaccaggaggccaagagctccaagatcatggattccttcaagaacatggtacctcagcaagcccttgtgatccgggagggagagaagatgcagatcaacgcagaggaagtggtggtgggagacctggtggaggtgaagggtggagaccgcgtccctgctgacctccggatcatctcttctcatggctgtaaggtggataactcatccttaacaggagagtcggagccccagacccgctcccccgagttcacccatgagaaccccctggagacccgcaatatctgtttcttctccaccaactgtgttgaaggcactgccaggggcattgtgattgccacaggagaccggacggtgatgggccgcatagctactctcgcctcaggcctggaggttgggcggacacccatagcaatggagattgaacacttcatccagctgatcacaggggtcgctgtattcctgggggtctccttcttcgtgctctccctcatcctgggctacagctggctggaggcagtcatcttcctcatcggcatcatagtggccaacgtgcctgaggggcttctggccactgtcactgtgtgcctgaccctgacagccaagcgcatggcacggaagaactgcctggtgaagaacctggaggcggtggagacgctgggctccacgtccaccatctgctcggacaagacgggcaccctcacccagaaccgcatgaccgtcgcccacatgtggttcgacaaccaaatccatgaggctgacaccaccgaagatcagtctggggccacttttgacaaacgatcccctacgtggacggccctgtctcgaattgctggtctctgcaaccgcgccgtcttcaaggcaggacaggagaacatctccgtgtctaagcgggacacagctggtgatgcctctgagtcagctctgctcaagtgcattgagctctcctgtggctcagtgaggaaaatgagagacagaaaccccaaggtggcagagattcctttcaactctaccaacaagtaccagctgtctatccacgagcgagaagacagcccccagagccacgtgctggtgatgaagggggccccagagcgcattctggaccggtgctccaccatcctggtgcagggcaaggagatcccgctcgacaaggagatgcaagatgcctttcaaaatgcctacatggagctggggggacttggggagcgtgtgctgggattctgtcaactgaatctgccatctggaaagtttcctcggggcttcaaattcgacacggatgagctgaactttcccacggagaagctttgctttgtggggctcatgtctatgattgaccctccccgggctgctgtgccagatgctgtgggcaagtgccgaagcgcaggcatcaaggtgatcatggtaaccggggatcaccctatcacagccaaggccattgccaaaggcgtgggcatcatatcagagggtaacgagactgtggaggacattgcagcccggctcaacattcccatgagtcaagtcaaccccagagaagccaaggcatgcgtggtgcacggctctgacctgaaggacatgacatcggagcagctcgatgagatcctcaagaaccacacagagatcgtctttgctcgaacgtctccccagcagaagctcatcattgtggagggatgtcagaggcagggagccattgtggccgtgacgggtgacggggtgaacgactcccctgcattgaagaaggctgacattggcattgccatgggcatctctggctctgacgtctctaagcaggcagccgacatgatcctgctggatgacaactttgcctccatcgtcacgggggtggaggagggccgcctgatctttgacaacttgaagaaatccatcgcctacaccctgaccagcaacatccccgagatcacccccttcctgctgttcatcattgccaacatccccctacctctgggcactgtgaccatcctttgcattgacctgggcacagatatggtccctgccatctccttggcctatgaggcagctgagagtgatatcatgaagcggcagccacgaaactcccagacggacaagctggtgaatgagaggctcatcagcatggcctacggacagatcgggatgatccaggcactgggtggcttcttcacctactttgtgatcctggcagagaacggtttcctgccatcacggctactgggaatccgcctcgactgggatgaccggaccatgaatgatctggaggacagctatggacaggagtggacctatgagcagcggaaggtggtggagttcacgtgccacacggcattctttgccagcatcgtggtggtgcagtgggctgacctcatcatctgcaagacccgccgcaactcagtcttccagcagggcatgaagaacaagatcctgatttttgggctcctggaggagacggcgttggctgcctttctctcttactgcccaggcatgggtgtagccctccgcatgtacccgctcaaagtcacctggtggttctgcgccttcccctacagcctcctcatcttcatctatgatgaggtccgaaagctcatcctgcggcggtatcctggtggctgggtggagaaggagacatactactgaccccattggaagaagaaccaggcatggaaagatggggagctctggaggtgttgtggggatggtgatggagagggatggaaataacgggtggcattgggtggcaacatttggggagagataatgaggcaactcagcaggctaagttgcggggtatataaattggggtgatgaccccatagacctaactgtgaacaatcagattagacactatgtgttagagtccccccgaccagatccttttccatcccactccactatgttgtctattttttctgaggaattaagggttaccccaccctgcccactcccatcccttcaaccccacttcctactgtaatagatcagcatccaaaagcaggaacccatctaaaccagaaggaagccctctcagatcaccccagcctcactccatttcccacttccacccccgttagcttcctgcaggactctatccctggcttccccttcagaccttgcaatcacaaaaggttcttctggtgagtgcaagagcctgagactggaaaaggtggacttgtctcccagtcgaggctggtaagggaccttcagggagagctgggcagacaggtgggagatggaggtagggctggctggaggaaggaaacaacaaaggaagtgaggtagtgccaatgacaggacatttgacatgagtctccagatagatgtcgtggactccagctctacgtcccacattttagaataccccaccagcagaacaaactcagatctcatcagggtagcagcagaggcaggaccagaaggcaatcaagagcttccagaaatgccacacttgtgtgccacagagttccccgctgacccttggttaggggtcctcttagtccacaaggtccggatgtcactcatgtacttaataacacttcaccttctgtaatactaagtcctcagagctccatgctgttctgaaagggatggccacaagttctttcccagcctcttccattccctttcttttcatgcccatcccgatgaacctgcatcattccccgacactgccaagccaaccctggaaaaggagttcgctggccattggctagaatcagggtggagaagttccctgaaccttcctgtctcccagggacatgtatgcttccagggacaagcttaggtcatgaacatggtcagaacctttggacaagaggaaaaatactaagagatttgctttttctgggtgcggtggctcatgcctgtaatcccagcactttgggaggccgaggcaggtggatcatgaggtcaggagttcgaggcgagcctggccaacatggtgaaaccctgtctctactaaaagtacaaaaaattagccagtcatggtggcacacgcctgtaatctcagctactcaggaggctgaggcaggagaattgcttgaacctgtgaggaagaggttgcagtgagctgagatcgtgccattacactccagcctgggcgaaagggtgagactccatctcaaaaaaaaaaaaaatgatttgcttttgacgtcttaggtggcagggctgttccctccaggcaaatgcccttcaaaccgacgatcattgtgcccacttaccctgggctggagagttggtttcaggttcctacaggagatagctttctttcccttactccctatctaacacttttgctctgcaggcagccttgcccattctctaagcctggcttagaaggcactgggaatgtcctgtagagagagacctagataggtcatgcaagtgagaaagacatctgaggaaaatggaagacctaaggcagacaggaaggaagcacaaaagacaagcattgggtcagacccataaaccacctcccaaaggctgtcatttcattgcactggaattttgctttatcagaagcaaggaagtaagggagtcattgccttgggcctgggaatctaagtgggagacaatattaatttggatccgattaattggagattactaactgtggacaaaagtttatctttgcacaatcaataaaaatggcatttttttagtaaattaagagcataaacaatattgctagaggtggcatgtttagtctaccaaaaacaatacttttcaggcactttagaaatatccttttagaagcagcgagtgcatgggctaattatcatcaatctttatgtatttgttaaagaaacatctacaggatctttattggtgaccttttgtaagacattagtttgaggtactacctatgtacttgaaaataataaagtggcatttctttatgaaaaaaaaa

SEQ ID NO: 2870 - DNA, 3338 bp, Homo sapiens
  source 1..3338: mol_type = unassigned DNA
ccgactgtcccagacgggctggtgtgggcttgggatcctcctggtgacctctcccgctaaggtccctcagccactctgccccaagatgggccgtggggctggccgtgagtactcacctgccgccaccacggcagagaatgggggcggcaagaagaaacagaaggagaaggaactggatgagctgaagaaggaggtggcaatggatgaccacaagctgtccttggatgagctgggccgcaaataccaagtggacctgtccaagggcctcaccaaccagcgggctcaggacgttctggctcgagatgggcccaacgccctcacaccacctcccacaacccctgagtgggtcaagttctgccgtcagcttttcggggggttctccatcctgctgtggattggggctatcctctgcttcctggcctacggcatccaggctgccatggaggatgaaccatccaacgacaatctatatctgggtgtggtgctggcagctgtggtcattgtcactggctgcttctcctactaccaggaggccaagagctccaagatcatggattccttcaagaacatggtacctcagcaagcccttgtgatccgggagggagagaagatgcagatcaacgcagaggaagtggtggtgggagacctggtggaggtgaagggtggagaccgcgtccctgctgacctccggatcatctcttctcatggctgtaaggtggataactcatccttaacaggagagtcggagccccagacccgctcccccgagttcacccatgagaaccccctggagacccgcaatatctgtttcttctccaccaactgtgttgaaggcactgccaggggcattgtgattgccacaggagaccggacggtgatgggccgcatagctactctcgcctcaggcctggaggttgggcggacacccatagcaatggagattgaacacttcatccagctgatcacaggggtcgctgtattcctgggggtctccttcttcgtgctctccctcatcctgggctacagctggctggaggcagtcatcttcctcatcggcatcatagtggccaacgtgcctgaggggcttctggccactgtcactgtgtgcctgaccctgacagccaagcgcatggcacggaagaactgcctggtgaagaacctggaggcggtggagacgctgggctccacgtccaccatctgctcggacaagacgggcaccctcacccagaaccgcatgaccgtcgcccacatgtggttcgacaaccaaatccatgaggctgacaccaccgaagatcagtctggggccacttttgacaaacgatcccctacgtggacggccctgtctcgaattgctggtctctgcaaccgcgccgtcttcaaggcaggacaggagaacatctccgtgtctaagcgggacacagctggtgatgcctctgagtcagctctgctcaagtgcattgagctctcctgtggctcagtgaggaaaatgagagacagaaaccccaaggtggcagagattcctttcaactctaccaacaagtaccagctgtctatccacgagcgagaagacagcccccagagccacgtgctggtgatgaagggggccccagagcgcattctggaccggtgctccaccatcctggtgcagggcaaggagatcccgctcgacaaggagatgcaagatgcctttcaaaatgcctacatggagctggggggacttggggagcgtgtgctgggattctgtcaactgaatctgccatctggaaagtttcctcggggcttcaaattcgacacggatgagctgaactttcccacggagaagctttgctttgtggggctcatgtctatgattgaccctccccgggctgctgtgccagatgctgtgggcaagtgccgaagcgcaggcatcaaggtgatcatggtaaccggggatcaccctatcacagccaaggccattgccaaaggcgtgggcatcatatcagagggtaacgagactgtggaggacattgcagcccggctcaacattcccatgagtcaagtcaaccccagagaagccaaggcatgcgtggtgcacggctctgacctgaaggacatgacatcggagcagctcgatgagatcctcaagaaccacacagagatcgtctttgctcgaacgtctccccagcagaagctcatcattgtggagggatgtcagaggcagggagccattgtggccgtgacgggtgacggggtgaacgactcccctgcattgaagaaggctgacattggcattgccatgggcatctctggctctgacgtctctaagcaggcagccgacatgatcctgctggatgacaactttgcctccatcgtcacgggggtggaggagggccgcctgatctttgacaacttgaagaaatccatcgcctacaccctgaccagcaacatccccgagatcacccccttcctgctgttcatcattgccaacatccccctacctctgggcactgtgaccatcctttgcattgacctgggcacagatatggtccctgccatctccttggcctatgaggcagctgagagtgatatcatgaagcggcagccacgaaactcccagacggacaagctggtgaatgagaggctcatcagcatggcctacggacagatcgggatgatccaggcactgggtggcttcttcacctactttgtgatcctggcagagaacggtttcctgccatcacggctactgggaatccgcctcgactgggatgaccggaccatgaatgatctggaggacagctatggacaggagtggacctatgagcagcggaaggtggtggagttcacgtgccacacggcattctttgccagcatcgtggtggtgcagtgggctgacctcatcatctgcaagacccgccgcaactcagtcttccagcagggcatgaagaacaagatcctgatttttgggctcctggaggagacggcgttggctgcctttctctcttactgcccaggcatgggtgtagccctccgcatgtacccgctcaacctcctcatcttcatctatgatgaggtccgaaagctcatcctgcggcggtatcctggtggctgggtggagaaggagacatactactgaccccattggaagaagaaccaggcatggaaagatggggagctctggaggtgttgtggggatggtgatggagagggatggaaataacgggtggcattgggtggcaacatttggggagagataatgaggcaactcagcaggctaagttgcggggtatataaattggggtgatgaccccatagacctaactgtgaacaatcagattagacactatgtgttagagtcc

SEQ ID NO: 2871 - DNA, 2308 bp, Homo sapiens
  source 1..2308: mol_type = unassigned DNA
atgctcagctctgctctggccctctctggagctctagtcaaacgtcttaaaccccctaatgggcatttcatcttaacagatactcatgatctcaacacatctaaaattgaacattcattatttacagtgtgcctgaccctgacagccaagcgcatggcacggaagaactgcctggtgaagaacctggaggcggtggagacgctgggctccacgtccaccatctgctcggacaagacgggcaccctcacccagaaccgcatgaccgtcgcccacatgtggttcgacaaccaaatccatgaggctgacaccaccgaagatcagtctggggccacttttgacaaacgatcccctacgtggacggccctgtctcgaattgctggtctctgcaaccgcgccgtcttcaaggcaggacaggagaacatctccgtgtctaagcgggacacagctggtgatgcctctgagtcagctctgctcaagtgcattgagctctcctgtggctcagtgaggaaaatgagagacagaaaccccaaggtggcagagattcctttcaactctaccaacaagtaccagctgtctatccacgagcgagaagacagcccccagagccacgtgctggtgatgaagggggccccagagcgcattctggaccggtgctccaccatcctggtgcagggcaaggagatcccgctcgacaaggagatgcaagatgcctttcaaaatgcctacatggagctggggggacttggggagcgtgtgctgggattctgtcaactgaatctgccatctggaaagtttcctcggggcttcaaattcgacacggatgagctgaactttcccacggagaagctttgctttgtggggctcatgtctatgattgaccctccccgggctgctgtgccagatgctgtgggcaagtgccgaagcgcaggcatcaaggtgatcatggtaaccggggatcaccctatcacagccaaggccattgccaaaggcgtgggcatcatatcagagggtaacgagactgtggaggacattgcagcccggctcaacattcccatgagtcaagtcaaccccagagaagccaaggcatgcgtggtgcacggctctgacctgaaggacatgacatcggagcagctcgatgagatcctcaagaaccacacagagatcgtctttgctcgaacgtctccccagcagaagctcatcattgtggagggatgtcagaggcagggagccattgtggccgtgacgggtgacggggtgaacgactcccctgcattgaagaaggctgacattggcattgccatgggcatctctggctctgacgtctctaagcaggcagccgacatgatcctgctggatgacaactttgcctccatcgtcacgggggtggaggagggccgcctgatctttgacaacttgaagaaatccatcgcctacaccctgaccagcaacatccccgagatcacccccttcctgctgttcatcattgccaacatccccctacctctgggcactgtgaccatcctttgcattgacctgggcacagatatggtccctgccatctccttggcctatgaggcagctgagagtgatatcatgaagcggcagccacgaaactcccagacggacaagctggtgaatgagaggctcatcagcatggcctacggacagatcgggatgatccaggcactgggtggcttcttcacctactttgtgatcctggcagagaacggtttcctgccatcacggctactgggaatccgcctcgactgggatgaccggaccatgaatgatctggaggacagctatggacaggagtggacctatgagcagcggaaggtggtggagttcacgtgccacacggcattctttgccagcatcgtggtggtgcagtgggctgacctcatcatctgcaagacccgccgcaactcagtcttccagcagggcatgaagaacaagatcctgatttttgggctcctggaggagacggcgttggctgcctttctctcttactgcccaggcatgggtgtagccctccgcatgtacccgctcaaagtcacctggtggttctgcgccttcccctacagcctcctcatcttcatctatgatgaggtccgaaagctcatcctgcggcggtatcctggtggctgggtggagaaggagacatactactgaccccattggaagaagaaccaggcatggaaagatggggagctctggaggtgttgtggggatggtgatggagagggatggaaataacgggtggcattgggtggcaacatttggggagagataatgaggcaactcagca

SEQ ID NO: 2872 - DNA, 4413 bp, Homo sapiens
  source 1..4413: mol_type = unassigned DNA
tccagctgatcacaggggtcgctgtattcctgggggtctccttcttcgtgctctccctcatcctgggctacagctggctggaggcagtcatcttcctcatcggcatcatagtggccaacgtgcctgaggggcttctggccactgtcactgtgtgcctgaccctgacagccaagcgcatggcacggaagaactgcctggtgaagaacctggaggcggtggagacgctgggctccacgtccaccatctgctcggacaagacgggcaccctcacccagaaccgcatgaccgtcgcccacatgtggttcgacaaccaaatccatgaggctgacaccaccgaagatcagtctggggccacttttgacaaacgatcccctacgtggacggccctgtctcgaattgctggtctctgcaaccgcgccgtcttcaaggcaggacaggagaacatctccgtgtctaagcgggacacagctggtgatgcctctgagtcagctctgctcaagtgcattgagctctcctgtggctcagtgaggaaaatgagagacagaaaccccaaggtggcagagattcctttcaactctaccaacaagtaccagctgtctatccacgagcgagaagacagcccccagagccacgtgctggtgatgaagggggccccagagcgcattctggaccggtgctccaccatcctggtgcagggcaaggagatcccgctcgacaaggagatgcaagatgcctttcaaaatgcctacatggagctggggggacttggggagcgtgtgctgggattctgtcaactgaatctgccatctggaaagtttcctcggggcttcaaattcgacacggatgagctgaactttcccacggagaagctttgctttgtggggctcatgtctatgattgaccctccccgggctgctgtgccagatgctgtgggcaagtgccgaagcgcaggcatcaaggtgatcatggtaaccggggatcaccctatcacagccaaggccattgccaaaggcgtgggcatcatatcagagggtaacgagactgtggaggacattgcagcccggctcaacattcccatgagtcaagtcaaccccagagaagccaaggcatgcgtggtgcacggctctgacctgaaggacatgacatcggagcagctcgatgagatcctcaagaaccacacagagatcgtctttgctcgaacgtctccccagcagaagctcatcattgtggagggatgtcagaggcagggagccattgtggccgtgacgggtgacggggtgaacgactcccctgcattgaagaaggctgacattggcattgccatgggcatctctggctctgacgtctctaagcaggcagccgacatgatcctgctggatgacaactttgcctccatcgtcacgggggtggaggagggccgcctgatctttgacaacttgaagaaatccatcgcctacaccctgaccagcaacatccccgagatcacccccttcctgctgttcatcattgccaacatccccctacctctgggcactgtgaccatcctttgcattgacctgggcacagatatggtccctgccatctccttggcctatgaggcagctgagagtgatatcatgaagcggcagccacgaaactcccagacggacaagctggtgaatgagaggctcatcagcatggcctacggacagatcgagaacggtttcctgccatcacggctactgggaatccgcctcgactgggatgaccggaccatgaatgatctggaggacagctatggacaggagtggacctatgagcagcggaaggtggtggagttcacgtgccacacggcattctttgccagcatcgtggtggtgcagtgggctgacctcatcatctgcaagacccgccgcaactcagtcttccagcagggcatgaagaacaagatcctgatttttgggctcctggaggagacggcgttggctgcctttctctcttactgcccaggcatgggtgtagccctccgcatgtacccgctcaaagtcacctggtggttctgcgccttcccctacagcctcctcatcttcatctatgatgaggtccgaaagctcatcctgcggcggtatcctggtggctgggtggagaaggagacatactactgaccccattggaagaagaaccaggcatggaaagatggggagctctggaggtgttgtggggatggtgatggagagggatggaaataacgggtggcattgggtggcaacatttggggagagataatgaggcaactcagcaggctaagttgcggggtatataaattggggtgatgaccccatagacctaactgtgaacaatcagattagacactatgtgttagagtccccccgaccagatccttttccatcccactccactatgttgtctattttttctgaggaattaagggttaccccaccctgcccactcccatcccttcaaccccacttcctactgtaatagatcagcatccaaaagcaggaacccatctaaaccagaaggaagccctctcagatcaccccagcctcactccatttcccacttccacccccgttagcttcctgcaggactctatccctggcttccccttcagaccttgcaatcacaaaaggttcttctggtgagtgcaagagcctgagactggaaaaggtggacttgtctcccagtcgaggctggtaagggaccttcagggagagctgggcagacaggtgggagatggaggtagggctggctggaggaaggaaacaacaaaggaagtgaggtagtgccaatgacaggacatttgacatgagtctccagatagatgtcgtggactccagctctacgtcccacattttagaataccccaccagcagaacaaactcagatctcatcagggtagcagcagaggcaggaccagaaggcaatcaagagcttccagaaatgccacacttgtgtgccacagagttccccgctgacccttggttaggggtcctcttagtccacaaggtccggatgtcactcatgtacttaataacacttcaccttctgtaatactaagtcctcagagctccatgctgttctgaaagggatggccacaagttctttcccagcctcttccattccctttcttttcatgcccatcccgatgaacctgcatcattccccgacactgccaagccaaccctggaaaaggagttcgctggccattggctagaatcagggtggagaagttccctgaaccttcctgtctcccagggacatgtatgcttccagggacaagcttaggtcatgaacatggtcagaacctttggacaagaggaaaaatactaagagatttgctttttctgggtgcggtggctcatgcctgtaatcccagcactttgggaggccgaggcaggtggatcatgaggtcaggagttcgaggcgagcctggccaacatggtgaaaccctgtctctactaaaagtacaaaaaattagccagtcatggtggcacacgcctgtaatctcagctactcaggaggctgaggcaggagaattgcttgaacctgtgaggaagaggttgcagtgagctgagatcgtgccattacactccagcctgggcgaaagggtgagactccatctcaaaaaaaaaaaaaatgatttgcttttgacgtcttaggtggcagggctgttccctccaggcaaatgcccttcaaaccgacgatcattgtgcccacttaccctgggctggagagttggtttcaggttcctacaggagatagctttctttcccttactccctatctaacacttttgctctgcaggcagccttgcccattctctaagcctggcttagaaggcactgggaatgtcctgtagagagagacctagataggtcatgcaagtgagaaagacatctgaggaaaatggaagacctaaggcagacaggaaggaagcacaaaagacaagcattgggtcagacccataaaccacctcccaaaggctgtcatttcattgcactggaattttgctttatcagaagcaaggaagtaagggagtcattgccttgggcctgggaatctaagtgggagacaatattaatttggatccgattaattggagattactaactgtggacaaaagtttatctttgcacaatcaataaaaatggcatttttttagtaaattaagagcataaacaatattgctagaggtggcatgtttagtctaccaaaaacaatacttttcaggcactttagaaatatccttttagaagcagcgagtgcatgggctaattatcatcaatctttatgtatttgttaaagaaacatctacaggatctttattggtgaccttttgtaagacattagtttgaggtactacctatgtacttgaaaataataaagtggcatttctttatgaaaaaaaaa

SEQ ID NO: 2873 - DNA, 945 bp, Homo sapiens
  source 1..945: mol_type = unassigned DNA
ctctgtctgccagggtctccgactgtcccagacgggctggtgtgggcttgggatcctcctggtgacctctcccgctaaggtccctcagccactctgccccaagatcatggattccttcaagaacatggtacctcagcaagcccttgtgatccgggagggagagaagatgcagatcaacgcagaggaagtggtggtgggagacctggtggaggtgaagggtggagaccgcgtccctgctgacctccggatcatctcttctcatggctgtaaggtggataactcatccttaacaggagagtcggagccccagacccgctcccccgagttcacccatgagaaccccctggagacccgcaatatctgtttcttctccaccaactgtgttgaaggcactgccaggggcattgtgattgccacaggagaccggacggtgatgggccgcatagctactctcgcctcaggcctggaggttgggcggacacccatagcaatggagattgaacacttcatccagctgatcacaggggtcgctgtattcctgggggtctccttcttcgtgctctccctcatcctgggctacagctggctggaggcagtcatcttcctcatcggcatcatagtggccaacgtgcctgaggggcttctggccactgtcactgtgtgcctgaccctgacagccaagcgcatggcacggaagaactgcctggtgaagaacctggaggcggtggagacgctgggctccacgtccaccatctgctcggacaagacgggcaccctcacccagaaccgcatgaccgtcgcccacatgtggttcgacaaccaaatccatgaggctgacaccaccgaagatcagtctggtgattgggtgctccagagggggtggataggattagaggaggctgagggcagtggcgtggtggggtgagtggttgagataaaggctct

SEQ ID NO: 2874 - DNA, 3548 bp, Homo sapiens
  source 1..3548: mol_type = unassigned DNA
ctctgtgcggtgggaccaacggacggacggacggacgcgcgcacctaccgaggcgcgggcgctgcagaggctcccagcccaagcctgagcctgagcccgccccgaggtccccgccccgcccgcctggctctctcgccgcggagccgccaagatgggggacaagaaagatgacaaggactcacccaagaagaacaagggcaaggagcgccgggacctggatgacctcaagaaggaggtggctatgacagagcacaagatgtcagtggaagaggtctgccggaaatacaacacagactgtgtgcagggtttgacccacagcaaagcccaggagatcctggcccgggatgggcctaacgcactcacgccaccgcctaccaccccagagtgggtcaagttttgccggcagctcttcgggggcttctccatcctgctgtggatcggggctatcctctgcttcctggcctacggtatccaggcgggcaccgaggacgacccctctggtgacaacctgtacctgggcatcgtgctggcggccgtggtgatcatcactggctgcttctcctactaccaggaggccaagagctccaagatcatggagtccttcaagaacatggtgccccagcaagccctggtgatccgggaaggtgagaagatgcaggtgaacgctgaggaggtggtggtcggggacctggtggagatcaagggtggagaccgagtgccagctgacctgcggatcatctcagcccacggctgcaaggtggacaactcctccctgactggcgaatccgagccccagactcgctctcccgactgcactcacgacaaccccttggagactcggaacatcaccttcttttccaccaactgtgtggaaggcacggctcggggcgtggtggtggccacgggcgaccgcactgtcatgggccgtatcgccaccctggcatcagggctggaggtgggcaagacgcccatcgccatcgagattgagcacttcatccagctcatcaccggcgtggctgtcttcctgggtgtctccttcttcatcctctccctcattctcggatacacctggcttgaggctgtcatcttcctcatcggcatcatcgtggccaatgtcccagagggtctgctggccactgtcactgtgtgtctgacgctgaccgccaagcgcatggcccggaagaactgcctggtgaagaacctggaggctgtagaaaccctgggctccacgtccaccatctgctcagataagacagggaccctcactcagaaccgcatgacagtcgcccacatgtggtttgacaaccagatccacgaggctgacaccactgaggaccagtcagggacctcatttgacaagagttcgcacacctgggtggccctgtctcacatcgctgggctctgcaatcgcgctgtcttcaagggtggtcaggacaacatccctgtgctcaagagggatgtggctggggatgcgtctgagtctgccctgctcaagtgcatcgagctgtcctctggctccgtgaagctgatgcgtgaacgcaacaagaaagtggctgagattcccttcaattccaccaacaaataccagctctccatccatgagaccgaggaccccaacgacaaccgatacctgctggtgatgaagggtgcccccgagcgcatcctggaccgctgctccaccatcctgctacagggcaaggagcagcctctggacgaggaaatgaaggaggccttccagaatgcctaccttgagctcggtggcctgggcgagcgcgtgcttggtttctgccattattacctgcccgaggagcagttccccaagggctttgccttcgactgtgatgacgtgaacttcaccacggacaacctctgctttgtgggcctcatgtccatgatcgacccaccccgggcagccgtccctgacgcggtgggcaagtgtcgcagcgcaggcatcaaggtcatcatggtcaccggcgatcaccccatcacggccaaggccattgccaagggtgtgggcatcatctctgagggcaacgagactgtggaggacatcgccgcccggctcaacattcccgtcagccaggttaacccccgggatgccaaggcctgcgtgatccacggcaccgacctcaaggacttcacctccgagcaaatcgacgagatcctgcagaatcacaccgagatcgtcttcgcccgcacatccccccagcagaagctcatcattgtggagggctgtcagagacagggtgcaattgtggctgtgaccggggatggtgtgaacgactcccccgctctgaagaaggccgacattggggtggccatgggcatcgctggctctgacgtctccaagcaggcagctgacatgatcctgctggacgacaactttgcctccatcgtcacaggggtggaggagggccgcctgatcttcgacaacctaaagaagtccattgcctacaccctgaccagcaatatcccggagatcacgcccttcctgctgttcatcatggccaacatcccgctgcccctgggcaccatcaccatcctctgcatcgatctgggcactgacatggtccctgccatctcactggcgtacgaggctgccgaaagcgacatcatgaagagacagcccaggaacccgcggacggacaaattggtcaatgagagactcatcagcatggcctacgggcagattggaatgatccaggctctcggtggcttcttctcttactttgtgatcctggcagaaaatggcttcttgcccggcaacctggtgggcatccggctgaactgggatgaccgcaccgtcaatgacctggaagacagttacgggcagcagtggacatacgagcagaggaaggtggtggagttcacctgccacacggccttctttgtgagcatcgttgtcgtccagtgggccgatctgatcatctgcaagacccggaggaactcggtcttccagcagggcatgaagaacaagatcctgatcttcgggctgtttgaggagacggccctggctgccttcctgtcctactgccccggcatggacgtggccctgcgcatgtaccctctcaagcccagctggtggttctgtgccttcccctacagtttcctcatcttcgtctacgacgaaatccgcaaactcatcctgcgcaggaacccagggggttgggtggagaaggaaacctactactgacctcagccccaccacatcgcccatctcttccccgtcccccaggcccaggaccgcccctgtcagtccccccaattttgtattctggggggaggagccctctcttcctgtggccccaccttggcccccaccccctccactatctcctgccgcccccactctggctggcttctctcccctgccccaaacctctctcctctctcttttctgtgtcagtttctctccctctcctcacccctctatccattcctcccgccccagccacctccctgggctcttttttactccccttcagccccccggctgatgccatctctggttctggacaattatcaaatatatcagtggggagagagaa

SEQ ID NO: 2875 - DNA, 3418 bp, Homo sapiens
  source 1..3418: mol_type = unassigned DNA
gtaggtgctgagccggctgggcgccgcttccgtgtgacattgtggggccggtgacattgggacaagaaagatgacaaggactcacccaagaagaacaagggcaaggagcgccgggacctggatgacctcaagaaggaggtggctatgacagagcacaagatgtcagtggaagaggtctgccggaaatacaacacagactgtgtgcagggtttgacccacagcaaagcccaggagatcctggcccgggatgggcctaacgcactcacgccaccgcctaccaccccagagtgggtcaagttttgccggcagctcttcgggggcttctccatcctgctgtggatcggggctatcctctgcttcctggcctacggtatccaggcgggcaccgaggacgacccctctggtgacaacctgtacctgggcatcgtgctggcggccgtggtgatcatcactggctgcttctcctactaccaggaggccaagagctccaagatcatggagtccttcaagaacatggtgccccagcaagccctggtgatccgggaaggtgagaagatgcaggtgaacgctgaggaggtggtggtcggggacctggtggagatcaagggtggagaccgagtgccagctgacctgcggatcatctcagcccacggctgcaaggtggacaactcctccctgactggcgaatccgagccccagactcgctctcccgactgcactcacgacaaccccttggagactcggaacatcaccttcttttccaccaactgtgtggaaggcacggctcggggcgtggtggtggccacgggcgaccgcactgtcatgggccgtatcgccaccctggcatcagggctggaggtgggcaagacgcccatcgccatcgagattgagcacttcatccagctcatcaccggcgtggctgtcttcctgggtgtctccttcttcatcctctccctcattctcggatacacctggcttgaggctgtcatcttcctcatcggcatcatcgtggccaatgtcccagagggtctgctggccactgtcactgtgtgtctgacgctgaccgccaagcgcatggcccggaagaactgcctggtgaagaacctggaggctgtagaaaccctgggctccacgtccaccatctgctcagataagacagggaccctcactcagaaccgcatgacagtcgcccacatgtggtttgacaaccagatccacgaggctgacaccactgaggaccagtcagggacctcatttgacaagagttcgcacacctgggtggccctgtctcacatcgctgggctctgcaatcgcgctgtcttcaagggtggtcaggacaacatccctgtgctcaagagggatgtggctggggatgcgtctgagtctgccctgctcaagtgcatcgagctgtcctctggctccgtgaagctgatgcgtgaacgcaacaagaaagtggctgagattcccttcaattccaccaacaaataccagctctccatccatgagaccgaggaccccaacgacaaccgatacctgctggtgatgaagggtgcccccgagcgcatcctggaccgctgctccaccatcctgctacagggcaaggagcagcctctggacgaggaaatgaaggaggccttccagaatgcctaccttgagctcggtggcctgggcgagcgcgtgcttggtttctgccattattacctgcccgaggagcagttccccaagggctttgccttcgactgtgatgacgtgaacttcaccacggacaacctctgctttgtgggcctcatgtccatgatcgacccaccccgggcagccgtccctgacgcggtgggcaagtgtcgcagcgcaggcatcaaggtcatcatggtcaccggcgatcaccccatcacggccaaggccattgccaagggtgtgggcatcatctctgagggcaacgagactgtggaggacatcgccgcccggctcaacattcccgtcagccaggttaacccccgggatgccaaggcctgcgtgatccacggcaccgacctcaaggacttcacctccgagcaaatcgacgagatcctgcagaatcacaccgagatcgtcttcgcccgcacatccccccagcagaagctcatcattgtggagggctgtcagagacagggtgcaattgtggctgtgaccggggatggtgtgaacgactcccccgctctgaagaaggccgacattggggtggccatgggcatcgctggctctgacgtctccaagcaggcagctgacatgatcctgctggacgacaactttgcctccatcgtcacaggggtggaggagggccgcctgatcttcgacaacctaaagaagtccattgcctacaccctgaccagcaatatcccggagatcacgcccttcctgctgttcatcatggccaacatcccgctgcccctgggcaccatcaccatcctctgcatcgatctgggcactgacatggtccctgccatctcactggcgtacgaggctgccgaaagcgacatcatgaagagacagcccaggaacccgcggacggacaaattggtcaatgagagactcatcagcatggcctacgggcagattggaatgatccaggctctcggtggcttcttctcttactttgtgatcctggcagaaaatggcttcttgcccggcaacctggtgggcatccggctgaactgggatgaccgcaccgtcaatgacctggaagacagttacgggcagcagtggacatacgagcagaggaaggtggtggagttcacctgccacacggccttctttgtgagcatcgttgtcgtccagtgggccgatctgatcatctgcaagacccggaggaactcggtcttccagcagggcatgaagaacaagatcctgatcttcgggctgtttgaggagacggccctggctgccttcctgtcctactgccccggcatggacgtggccctgcgcatgtaccctctcaagcccagctggtggttctgtgccttcccctacagtttcctcatcttcgtctacgacgaaatccgcaaactcatcctgcgcaggaacccagggggttgggtggagaaggaaacctactactgacctcagccccaccacatcgcccatctcttccccgtcccccaggcccaggaccgcccctgtcagtccccccaattttgtattctggggggaggagccctctcttcctgtggccccaccttggcccccaccccctccactatctcctgccgcccccactctctcctctctcttttctgtgtcagtttctctccctctcctcacccctctatccattcctcccgccccagccacctccctgggctcttttttactccccttcagccccccggctgatgccatctctggttctggacaattatcaaatatatcagtggggagagag

SEQ ID NO: 2876 - DNA, 3818 bp, Homo sapiens
  source 1..3818: mol_type = unassigned DNA
gaccaacggacggacggacggacgcgcgcacctaccgaggcgcgggcgctgcagaggctcccagcccaagcctgagcctgagcccgccccgaggtccccgccccgcccgcctggctctctcgccgcggagccgccaagatgggggacaagaaagatgacaaggactcacccaagaagaacaagggcaaggagcgccgggacctggatgacctcaagaaggaggtggctatgacagagcacaagatgtcagtggaagaggtctgccggaaatacaacacagactgtgtgcagggtttgacccacagcaaagcccaggagatcctggcccgggatgggcctaacgcactcacgccaccgcctaccaccccagagtgggtcaagttttgccggcagctcttcgggggcttctccatcctgctgtggatcggggctatcctctgcttcctggcctacggtatccaggcgggcaccgaggacgacccctctggtgacaacctgtacctgggcatcgtgctggcggccgtggtgatcatcactggctgcttctcctactaccaggaggccaagagctccaagatcatggagtccttcaagaacatggtgccccagcaagccctggtgatccgggaaggtgagaagatgcaggtgaacgctgaggaggtggtggtcggggacctggtggagatcaagggtggagaccgagtgccagctgacctgcggatcatctcagcccacggctgcaaggtggacaactcctccctgactggcgaatccgagccccagactcgctctcccgactgcactcacgacaaccccttggagactcggaacatcaccttcttttccaccaactgtgtggaaggcacggctcggggcgtggtggtggccacgggcgaccgcactgtcatgggccgtatcgccaccctggcatcagggctggaggtgggcaagacgcccatcgccatcgagattgagcacttcatccagctcatcaccggcgtggctgtcttcctgggtgtctccttcttcatcctctccctcattctcggatacacctggcttgaggctgtcatcttcctcatcggcatcatcgtggccaatgtcccagagggtctgctggccactgtcactgtgtgtctgacgctgaccgccaagcgcatggcccggaagaactgcctggtgaagaacctggaggctgtagaaaccctgggctccacgtccaccatctgctcagataagacagggaccctcactcagaaccgcatgacagtcgcccacatgtggtttgacaaccagatccacgaggctgacaccactgaggaccagtcagggacctcatttgacaagagttcgcacacctgggtggccctgtctcacatcgctgggctctgcaatcgcgctgtcttcaagggtggtcaggacaacatccctgtgctcaagagggatgtggctggggatgcgtctgagtctgccctgctcaagtgcatcgagctgtcctctggctccgtgaagctgatgcgtgaacgcaacaagaaagtggctgagattcccttcaattccaccaacaaataccagctctccatccatgagaccgaggaccccaacgacaaccgatacctgctggtgatgaagggtgcccccgagcgcatcctggaccgctgctccaccatcctgctacagggcaaggagcagcctctggacgaggaaatgaaggaggccttccagaatgcctaccttgagctcggtggcctgggcgagcgcgtgcttggtttctgccattattacctgcccgaggagcagttccccaagggctttgccttcgactgtgatgacgtgaacttcaccacggacaacctctgctttgtgggcctcatgtccatgatcgacccaccccgggcagccgtccctgacgcggtgggcaagtgtcgcagcgcaggcatcaaggtcatcatggtcaccggcgatcaccccatcacggccaaggccattgccaagggtgtgggcatcatctctgagggcaacgagactgtggaggacatcgccgcccggctcaacattcccgtcagccaggttaacccccgggatgccaaggcctgcgtgatccacggcaccgacctcaaggacttcacctccgagcaaatcgacgagatcctgcagaatcacaccgagatcgtcttcgcccgcacatccccccagcagaagctcatcattgtggagggctgtcagagacagggtgcaattgtggctgtgaccggggatggtgtgaacgactcccccgctctgaagaaggccgacattggggtggccatgggcatcgctggctctgacgtctccaagcaggcagctgacatgatcctgctggacgacaactttgcctccatcgtcacaggggtggaggagggccgcctgatcttcgacaacctaaagaagtccattgcctacaccctgaccagcaatatcccggagatcacgcccttcctgctgttcatcatggccaacatcccgctgcccctgggcaccatcaccatcctctgcatcgatctgggcactgacatggtccctgccatctcactggcgtacgaggctgccgaaagcgacatcatgaagagacagcccaggaacccgcggacggacaaattggtcaatgagagactcatcagcatggcctacgggcagattggaatgatccaggctctcggtggcttcttctcttactttgtgatcctggcagaaaatggcttcttgcccggcaacctggtgggcatccggctgaactgggatgaccgcaccgtcaatgacctggaagacagttacgggcagcagtggacatacgagcagaggaaggtggtggagttcacctgccacacggccttctttgtgagcatcgttgtcgtccagtgggccgatctgatcatctgcaagacccggaggaactcggtcttccagcagggcatgaagaacaagatcctgatcttcgggctgtttgaggagacggccctggctgccttcctgtcctactgccccggcatggacgtggccctgcgcatgtaccctctcaagcccagctggtggttctgtgccttcccctacagtttcctcatcttcgtctacgacgaaatccgcaaactcatcctgcgcaggaacccagggggtgagggagctcggcaaggcagccgaggggggcggggggcagcagggtctcaggcagctggtcccaggctcccctcgccctgctggatggctctgccacctggttcccactcttctctctcttcccatctctccgggcacccactctgtcttctcacgggtctctgtctgtgtggtttccttgtctctctccctctctgtccctctctctgctgggcggctcgccttgcctgtctctctccatctcttactctgtctctttctttccttctttgtctctccaggttgggtggagaaggaaacctactactgacctcagccccaccacatcgcccatctcttccccgtcccccaggcccaggaccgcccctgtcagtccccccaattttgtattctggggggaggagccctctcttcctgtggccccaccttggcccccaccccctccactatctcctgccgcccccactctggctggcttctctcccctgccccaaacctctctcctctctcttttctgtgtcagtttctctccctctcctcacccctctatccattcctcccgccccagccacctccctgggctcttttttactccccttcagccccccggctgatgccatctctggttctggacaattatcaaatatatcagtggggagagagaa

SEQ ID NO: 2877 - DNA, 598 bp, Homo sapiens
  source 1..598: mol_type = unassigned DNA
gcagcctctgtgcggtgggaccaacggacggacggacggacgcgcgcacctaccgaggcgcgggcgctgcagaggctcccagcccaagcctgagcctgagcccgccccgaggtccccgccccgcccgcctggctctctcgccgcggagccgccaagatggggtctggtggctctgacagctatcgtatcgccacctcgcaggacaagaaagatgacaaggactcacccaagaagaacaagggcaaggagcgccgggacctggatgacctcaagaaggaggtggctatgacagagcacaagatgtcagtggaagaggtctgccggaaatacaacacagactgtgtgcagggtttgacccacagcaaagcccaggagatcctggcccgggatgggcctaacgcactcacgccaccgcctaccaccccagagtgggtcaagttttgccggcagctcttcgggggcttctccatcctgctgtggatcggggctatcctctgcttcctggcctacggtatccaggcgggcaccgaggacgacccctctggtgacaacctgtacctgggcatcgtgctggcggccgtggtgatcatcactggct

SEQ ID NO: 2878 - DNA, 2428 bp, Homo sapiens
  source 1..2428: mol_type = unassigned DNA
ttggagactcggaacatcaccttcttttccaccaactgtgtggaaggcacggctcggggcgtggtggtggccacgggcgaccgcactgtcatgggccgtatcgccaccctggcatcagggctggaggtgggcaagacgcccatcgccatcgagattgagcacttcatccagctcatcaccggcgtggctgtcttcctgggtgtctccttcttcatcctctccctcattctcggatacacctggcttgaggctgtcatcttcctcatcggcatcatcgtggccaatgtcccagagggtctgctggccactgtcactgtgtgtctgacgctgaccgccaagcgcatggcccggaagaactgcctggtgaagaacctggaggctgtagaaaccctgggctccacgtccaccatctgctcagataagacagggaccctcactcagaaccgcatgacagtcgcccacatgtggtttgacaaccagatccacgaggctgacaccactgaggaccagtcagggacctcatttgacaagagttcgcacacctgggtggccctgtctcacatcgctgggctctgcaatcgcgctgtcttcaagggtggtcaggacaacatccctgtgctcaagagggatgtggctggggatgcgtctgagtctgccctgctcaagtgcatcgagctgtcctctggctccgtgaagctgatgcgtgaacgcaacaagaaagtggctgagattcccttcaattccaccaacaaataccagctctccatccatgagaccgaggaccccaacgacaaccgatacctgctggtgatgaagggtgcccccgagcgcatcctggaccgctgctccaccatcctgctacagggcaaggagcagcctctggacgaggaaatgaaggaggccttccagaatgcctaccttgagctcggtggcctgggcgagcgcgtgcttggtttctgccattattacctgcccgaggagcagttccccaagggctttgccttcgactgtgatgacgtgaacttcaccacggacaacctctgctttgtgggcctcatgtccatgatcgacccaccccgggcagccgtccctgacgcggtgggcaagtgtcgcagcgcaggcatcaaggtcatcatggtcaccggcgatcaccccatcacggccaaggccattgccaagggtgtgggcatcatctctgagggcaacgagactgtggaggacatcgccgcccggctcaacattcccgtcagccaggttaacccccgggatgccaaggcctgcgtgatccacggcaccgacctcaaggacttcacctccgagcaaatcgacgagatcctgcagaatcacaccgagatcgtcttcgcccgcacatccccccagcagaagctcatcattgtggagggctgtcagagacagggtgcaattgtggctgtgaccggggatggtgtgaacgactcccccgctctgaagaaggccgacattggggtggccatgggcatcgctggctctgacgtctccaagcaggcagctgacatgatcctgctggacgacaactttgcctccatcgtcacaggggtggaggagggccgcctgatcttcgacaacctaaagaagtccattgcctacaccctgaccagcaatatcccggagatcacgcccttcctgctgttcatcatggccaacatcccgctgcccctgggcaccatcaccatcctctgcatcgatctgggcactgacatggtccctgccatctcactggcgtacgaggctgccgaaagcgacatcatgaagagacagcccaggaacccgcggacggacaaattggtcaatgagagactcatcagcatggcctacgggcagattggaatgatccaggctctcggtggcttcttctcttactttgtgatcctggcagaaaatggcttcttgcccggcaacctggtgggcatccggctgaactgggatgaccgcaccgtcaatgacctggaagacagttacgggcagcagtggacatacgagcagaggaaggtggtggagttcacctgccacacggccttctttgtgagcatcgttgtcgtccagtgggccgatctgatcatctgcaagacccggaggactcggtcttccagcagggcatgaagaacaagatcctgatcttcgggctgtttgaggagacggccctggctgccttcctgtcctactgccccggcatggacgtggccctgcgcatgtaccctctcaagcccagctggtggttctgtgccttcccctacagtttcctcatcttcgtctacgacgaaatccgcaaactcatcctgcgcaggaacccagggggttgggtggagaaggaaacctactactgacctcagccccccggctgatgccatctctggttctggacaattatcaaatatatcagtggggagag

SEQ ID NO: 2879 - DNA, 3427 bp, Homo sapiens
  source 1..3427: mol_type = unassigned DNA
gtgtgtgtgtgcagcccctcatgtaggggagcaggcatgggaggctgggaggaggagaggaacaggagagccacggacaagaaagatgacaaggactcacccaagaagaacaagggcaaggagcgccgggacctggatgacctcaagaaggaggtggctatgacagagcacaagatgtcagtggaagaggtctgccggaaatacaacacagactgtgtgcagggtttgacccacagcaaagcccaggagatcctggcccgggatgggcctaacgcactcacgccaccgcctaccaccccagagtgggtcaagttttgccggcagctcttcgggggcttctccatcctgctgtggatcggggctatcctctgcttcctggcctacggtatccaggcgggcaccgaggacgacccctctggtgacaacctgtacctgggcatcgtgctggcggccgtggtgatcatcactggctgcttctcctactaccaggaggccaagagctccaagatcatggagtccttcaagaacatggtgccccagcaagccctggtgatccgggaaggtgagaagatgcaggtgaacgctgaggaggtggtggtcggggacctggtggagatcaagggtggagaccgagtgccagctgacctgcggatcatctcagcccacggctgcaaggtggacaactcctccctgactggcgaatccgagccccagactcgctctcccgactgcactcacgacaaccccttggagactcggaacatcaccttcttttccaccaactgtgtggaaggcacggctcggggcgtggtggtggccacgggcgaccgcactgtcatgggccgtatcgccaccctggcatcagggctggaggtgggcaagacgcccatcgccatcgagattgagcacttcatccagctcatcaccggcgtggctgtcttcctgggtgtctccttcttcatcctctccctcattctcggatacacctggcttgaggctgtcatcttcctcatcggcatcatcgtggccaatgtcccagagggtctgctggccactgtcactgtgtgtctgacgctgaccgccaagcgcatggcccggaagaactgcctggtgaagaacctggaggctgtagaaaccctgggctccacgtccaccatctgctcagataagacagggaccctcactcagaaccgcatgacagtcgcccacatgtggtttgacaaccagatccacgaggctgacaccactgaggaccagtcagggacctcatttgacaagagttcgcacacctgggtggccctgtctcacatcgctgggctctgcaatcgcgctgtcttcaagggtggtcaggacaacatccctgtgctcaagagggatgtggctggggatgcgtctgagtctgccctgctcaagtgcatcgagctgtcctctggctccgtgaagctgatgcgtgaacgcaacaagaaagtggctgagattcccttcaattccaccaacaaataccagctctccatccatgagaccgaggaccccaacgacaaccgatacctgctggtgatgaagggtgcccccgagcgcatcctggaccgctgctccaccatcctgctacagggcaaggagcagcctctggacgaggaaatgaaggaggccttccagaatgcctaccttgagctcggtggcctgggcgagcgcgtgcttggtttctgccattattacctgcccgaggagcagttccccaagggctttgccttcgactgtgatgacgtgaacttcaccacggacaacctctgctttgtgggcctcatgtccatgatcgacccaccccgggcagccgtccctgacgcggtgggcaagtgtcgcagcgcaggcatcaaggtcatcatggtcaccggcgatcaccccatcacggccaaggccattgccaagggtgtgggcatcatctctgagggcaacgagactgtggaggacatcgccgcccggctcaacattcccgtcagccaggttaacccccgggatgccaaggcctgcgtgatccacggcaccgacctcaaggacttcacctccgagcaaatcgacgagatcctgcagaatcacaccgagatcgtcttcgcccgcacatccccccagcagaagctcatcattgtggagggctgtcagagacagggtgcaattgtggctgtgaccggggatggtgtgaacgactcccccgctctgaagaaggccgacattggggtggccatgggcatcgctggctctgacgtctccaagcaggcagctgacatgatcctgctggacgacaactttgcctccatcgtcacaggggtggaggagggccgcctgatcttcgacaacctaaagaagtccattgcctacaccctgaccagcaatatcccggagatcacgcccttcctgctgttcatcatggccaacatcccgctgcccctgggcaccatcaccatcctctgcatcgatctgggcactgacatggtccctgccatctcactggcgtacgaggctgccgaaagcgacatcatgaagagacagcccaggaacccgcggacggacaaattggtcaatgagagactcatcagcatggcctacgggcagattggaatgatccaggctctcggtggcttcttctcttactttgtgatcctggcagaaaatggcttcttgcccggcaacctggtgggcatccggctgaactgggatgaccgcaccgtcaatgacctggaagacagttacgggcagcagtggacatacgagcagaggaaggtggtggagttcacctgccacacggccttctttgtgagcatcgttgtcgtccagtgggccgatctgatcatctgcaagacccggaggaactcggtcttccagcagggcatgaagaacaagatcctgatcttcgggctgtttgaggagacggccctggctgccttcctgtcctactgccccggcatggacgtggccctgcgcatgtaccctctcaagcccagctggtggttctgtgccttcccctacagtttcctcatcttcgtctacgacgaaatccgcaaactcatcctgcgcaggaacccagggggttgggtggagaaggaaacctactactgacctcagccccaccacatcgcccatctcttccccgtcccccaggcccaggaccgcccctgtcagtccccccaattttgtattctggggggaggagccctctcttcctgtggccccaccttggcccccaccccctccactatctcctgccgcccccactctggctggcttctctcccctgccccaaacctctctcctctctcttttctgtgtcagtttctctccctctcctcacccctctatccattcctcccgccccagccacctccctgggctcttttttactccccttcagccccccggctgatgccatctctgg

SEQ ID NO: 2880 - DNA, 3588 bp, Homo sapiens
  source 1..3588: mol_type = unassigned DNA
agcctctgtgcggtgggaccaacggacggacggacggacgcgcgcacctaccgaggcgcgggcgctgcagaggctcccagcccaagcctgagcctgagcccgccccgaggtccccgccccgcccgcctggctctctcgccgcggagccgccaagatggggtctggtggctctgacagctatcgtatcgccacctcgcaggacaagaaagatgacaaggactcacccaagaagaacaagggcaaggagcgccgggacctggatgacctcaagaaggaggtggctatgacagagcacaagatgtcagtggaagaggtctgccggaaatacaacacagactgtgtgcagggtttgacccacagcaaagcccaggagatcctggcccgggatgggcctaacgcactcacgccaccgcctaccaccccagagtgggtcaagttttgccggcagctcttcgggggcttctccatcctgctgtggatcggggctatcctctgcttcctggcctacggtatccaggcgggcaccgaggacgacccctctggtgacaacctgtacctgggcatcgtgctggcggccgtggtgatcatcactggctgcttctcctactaccaggaggccaagagctccaagatcatggagtccttcaagaacatggtgccccagcaagccctggtgatccgggaaggtgagaagatgcaggtgaacgctgaggaggtggtggtcggggacctggtggagatcaagggtggagaccgagtgccagctgacctgcggatcatctcagcccacggctgcaaggtggacaactcctccctgactggcgaatccgagccccagactcgctctcccgactgcactcacgacaaccccttggagactcggaacatcaccttcttttccaccaactgtgtggaaggcacggctcggggcgtggtggtggccacgggcgaccgcactgtcatgggccgtatcgccaccctggcatcagggctggaggtgggcaagacgcccatcgccatcgagattgagcacttcatccagctcatcaccggcgtggctgtcttcctgggtgtctccttcttcatcctctccctcattctcggatacacctggcttgaggctgtcatcttcctcatcggcatcatcgtggccaatgtcccagagggtctgctggccactgtcactgtgtgtctgacgctgaccgccaagcgcatggcccggaagaactgcctggtgaagaacctggaggctgtagaaaccctgggctccacgtccaccatctgctcagataagacagggaccctcactcagaaccgcatgacagtcgcccacatgtggtttgacaaccagatccacgaggctgacaccactgaggaccagtcagggacctcatttgacaagagttcgcacacctgggtggccctgtctcacatcgctgggctctgcaatcgcgctgtcttcaagggtggtcaggacaacatccctgtgctcaagagggatgtggctggggatgcgtctgagtctgccctgctcaagtgcatcgagctgtcctctggctccgtgaagctgatgcgtgaacgcaacaagaaagtggctgagattcccttcaattccaccaacaaataccagctctccatccatgagaccgaggaccccaacgacaaccgatacctgctggtgatgaagggtgcccccgagcgcatcctggaccgctgctccaccatcctgctacagggcaaggagcagcctctggacgaggaaatgaaggaggccttccagaatgcctaccttgagctcggtggcctgggcgagcgcgtgcttggtttctgccattattacctgcccgaggagcagttccccaagggctttgccttcgactgtgatgacgtgaacttcaccacggacaacctctgctttgtgggcctcatgtccatgatcgacccaccccgggcagccgtccctgacgcggtgggcaagtgtcgcagcgcaggcatcaaggtcatcatggtcaccggcgatcaccccatcacggccaaggccattgccaagggtgtgggcatcatctctgagggcaacgagactgtggaggacatcgccgcccggctcaacattcccgtcagccaggttaacccccgggatgccaaggcctgcgtgatccacggcaccgacctcaaggacttcacctccgagcaaatcgacgagatcctgcagaatcacaccgagatcgtcttcgcccgcacatccccccagcagaagctcatcattgtggagggctgtcagagacagggtgcaattgtggctgtgaccggggatggtgtgaacgactcccccgctctgaagaaggccgacattggggtggccatgggcatcgctggctctgacgtctccaagcaggcagctgacatgatcctgctggacgacaactttgcctccatcgtcacaggggtggaggagggccgcctgatcttcgacaacctaaagaagtccattgcctacaccctgaccagcaatatcccggagatcacgcccttcctgctgttcatcatggccaacatcccgctgcccctgggcaccatcaccatcctctgcatcgatctgggcactgacatggtccctgccatctcactggcgtacgaggctgccgaaagcgacatcatgaagagacagcccaggaacccgcggacggacaaattggtcaatgagagactcatcagcatggcctacgggcagattggaatgatccaggctctcggtggcttcttctcttactttgtgatcctggcagaaaatggcttcttgcccggcaacctggtgggcatccggctgaactgggatgaccgcaccgtcaatgacctggaagacagttacgggcagcagtggacatacgagcagaggaaggtggtggagttcacctgccacacggccttctttgtgagcatcgttgtcgtccagtgggccgatctgatcatctgcaagacccggaggaactcggtcttccagcagggcatgaagaacaagatcctgatcttcgggctgtttgaggagacggccctggctgccttcctgtcctactgccccggcatggacgtggccctgcgcatgtaccctctcaagcccagctggtggttctgtgccttcccctacagtttcctcatcttcgtctacgacgaaatccgcaaactcatcctgcgcaggaacccagggggttgggtggagaaggaaacctactactgacctcagccccaccacatcgcccatctcttccccgtcccccaggcccaggaccgcccctgtcagtccccccaattttgtattctggggggaggagccctctcttcctgtggccccaccttggcccccaccccctccactatctcctgccgcccccactctggctggcttctctcccctgccccaaacctctctcctctctcttttctgtgtcagtttctctccctctcctcacccctctatccattcctcccgccccagccacctccctgggctcttttttactccccttcagccccccggctgatgccatctctggttctggacaattatcaaatatatcagtggggagagag

SEQ ID NO: 2881 - DNA, 3839 bp, Homo sapiens
  source 1..3839: mol_type = unassigned DNA
agcaaccacagggcctgggactggggggttcccagatccttgaagctcactccgcctcctcactctcactgcatttcccaccttcctgtgggccttgcggcatcttcatcactgaggcacctggttacgcttcacctcttgtttcctgccctcactgcattccctcacctctacctttttatccttccaccctaggcttctctcctccctcttccctcactcctgactcttcctcttcccagcggacggctggaggaccgctcagtctctcctctctcacttcccttcctctctctcaccttcaccacccaacacctccctccctgcctctttctttctgctccctcattctctccccaccactctcttctcgtggcccccttgcccgcgcgccctcttcccttccccttgcctcactctctcagctttcttcccacagttgagctcgggcagctctttctggggatagctatggggctttgggggaagaaagggacagtggctccccatgaccagagtccaagacgaagacctaaaaaagggcttatcaagaaaaaaatggtgaagagggaaaaacagaagcgcaatatggaggaactgaagaaggaagtggtcatggatgatcacaaattaaccttggaagagctgagcaccaagtactccgtggacctgacaaagggccatagccaccaaagggcaaaggaaatcctgactcgaggtggacccaatactgttaccccaccccccaccactccagaatgggtcaaattctgtaagcaactgttcggaggcttctccctcctactatggactggggccattctctgctttgtggcctacagcatccagatatatttcaatgaggagcctaccaaagacaacctctacctgagcatcgtactgtccgtcgtggtcatcgtcactggctgcttctcctattatcaggaggccaagagctccaagatcatggagtcttttaagaacatggtgcctcagcaagctctggtaattcgaggaggagagaagatgcaaattaatgtacaagaggtggtgttgggagacctggtggaaatcaagggtggagaccgagtccctgctgacctccggcttatctctgcacaaggatgtaaggtggacaactcatccttgactggggagtcagaaccccagagccgctcccctgacttcacccatgagaaccctctggagacccgaaacatctgcttcttttccaccaactgtgtggaaggaaccgcccggggtattgtgattgctacgggagactccacagtgatgggcagaattgcctccctgacgtcaggcctggcggttggccagacacctatcgctgctgagatcgaacacttcatccatctgatcactgtggtggccgtcttccttggtgtcactttttttgcgctctcacttctcttgggctatggttggctggaggctatcatttttctcattggcatcattgtggccaatgtgcctgaggggctgttggccacagtcactgtgtgcctgaccctcacagccaagcgcatggcgcggaagaactgcctggtgaagaacctggaggcggtggagacgctgggctccacgtccaccatctgctcagacaagacgggcaccctcacccagaaccgcatgaccgtcgcccacatgtggtttgatatgaccgtgtatgaggccgacaccactgaagaacagactggaaaaacatttaccaagagctctgatacctggtttatgctggcccgaatcgctggcctctgcaaccgggctgactttaaggctaatcaggagatcctgcccattgctaagagggccacaacaggtgatgcttccgagtcagccctcctcaagttcatcgagcagtcttacagctctgtggcggagatgagagagaaaaaccccaaggtggcagagattccctttaattctaccaacaagtaccagatgtccatccaccttcgggaggacagctcccagacccacgtactgatgatgaagggtgctccggagaggatcttggagttttgttctacctttcttctgaatgggcaggagtactcaatgaacgatgaaatgaaggaagccttccaaaatgcctacttagaactgggaggtctgggggaacgtgtgctaggcttctgcttcttgaatctgcctagcagcttctccaagggattcccatttaatacagatgaaataaatttccccatggacaacctttgttttgtgggcctcatatccatgattgaccctccccgagctgcagtgcctgatgctgtgagcaagtgtcgcagtgcaggaattaaggtgatcatggtaacaggagatcatcccattacagctaaggccattgccaagggtgtgggcatcatctcagaaggcactgagacggcagaggaagtcgctgcccggcttaagatccctatcagcaaggtcgatgccagtgctgccaaagccattgtggtgcatggtgcagaactgaaggacatacagtccaagcagcttgatcagatcctccagaaccaccctgagatcgtgtttgctcggacctcccctcagcagaagctcatcattgtcgagggatgtcagaggctgggagccgttgtggccgtgacaggtgacggggtgaacgactcccctgcgctgaagaaggctgacattggcattgccatgggcatctctggctctgacgtctctaagcaggcagccgacatgatcctgctggatgacaactttgcctccatcgtcacgggggtggaggagggccgcctgatctttgacaacctgaagaaatccatcatgtacaccctgaccagcaacatccccgagatcacgcccttcctgatgttcatcatcctcggtatacccctgcctctgggaaccataaccatcctctgcattgatctcggcactgacatggtccctgccatctccttggcttatgagtcagctgaaagcgacatcatgaagaggcttccaaggaacccaaagacggataatctggtgaaccaccgtctcattggcatggcctatggacagattgggatgatccaggctctggctggattctttacctactttgtaatcctggctgagaatggttttaggcctgttgatctgctgggcatccgcctccactgggaagataaatacttgaatgacctggaggacagctacggacagcagtggacctatgagcaacgaaaagttgtggagttcacatgccaaacggccttttttgtcaccatcgtggttgtgcagtgggcggatctcatcatctccaagactcgccgcaactcacttttccagcagggcatgagaaacaaagtcttaatatttgggatcctggaggagacactcttggctgcatttctgtcctacactccaggcatggacgtggccctgcgaatgtacccactcaagataacctggtggctctgtgccattccctacagtattctcatcttcgtctatgatgaaatcagaaaactcctcatccgtcagcacccggatggctgggtggaaagggagacgtactactaaactcagcagatgaagagcttcatgtgacacaggggtgttgtgagagctgggatggggccagagattataagtttgacacaacatctgagacactaggatgaattatcttggatgagaaagatgggcaatcctgggctggcttgagggaatcatgggcagaggatgaggtgggctgaagggaagcccagcctgcatctagctggagccccgcagggaggggcatggtcctgctgaatcccgtagccagtctagacagtaaatgtctggaaaagccctca

SEQ ID NO: 2882 - DNA, 886 bp, Homo sapiens
  source 1..886: mol_type = unassigned DNA
caccagcccagccagaagcaagtcccagcccccagccctcccctggcctaccttttggggcccttctctgaaccaggctcccctgtcctgcaactctgtcattcacagggatgatccaggctctggctggattctttacctactttgtaatcctggctgagaatggttttaggcctgttgatctgctgggcatccgcctccactgggaagataaatacttgaatgacctggaggacagctacggacagcagtggacctatgagcaacgaaaagttgtggagttcacatgccaaacggccttttttgtcaccatcgtggttgtgcagtgggcggatctcatcatctccaagactcgccgcaactcacttttccagcagggcatgagaaacaaagtcttaatatttgggatcctggaggagacactcttggctgcatttctgtcctacactccaggcatggacgtggccctgcgaatgtacccactcaagataacctggtggctctgtgccattccctacagtattctcatcttcgtctatgatgaaatcagaaaactcctcatccgtcagcacccggatggctgggtggaaagggagacgtactactaaactcagcagatgaagagcttcatgtgacacaggggtgttgtgagagctgggatggggccagagattataagtttgacacaacatctgagacactaggatgaattatcttggatgagaaagatgggcaatcctgggctggcttgagggaatcatgggcagaggatgaggtgggctgaagggaagcccagcctgcatctagctggagccccgcagggaggggcatggtcctgctgaatcccgtagccagtctagacagtaaatgtctggaaaagccctca

SEQ ID NO: 2883 - DNA, 1382 bp, Homo sapiens
  source 1..1382: mol_type = unassigned DNA
tatttcagcctccatcctgttgtcttgttaactatgggaaaaagaaaatgcagcccagcaagtcagtcattattcttgttccagttccagaagatggaattaaaatttaagatccttctattctacgtaatattttatggctgcctggctggcatcttcatcggaaccatccaagtgatgctgctcaccatcagtgaatttaagcccacatatcaggaccgagtggccccgccaggattaacacagattcctcagatccagaagactgaaatttcctttcgtcctaatgatcccaagagctatgaggcatatgtactgaacatagttaggttcctggaaaagtacaaagattcagcccagagggatgacatgatttttgaagattgtggcgatgtgcccagtgaaccgaaagaacgaggagactttaatcatgaacgaggagagcgaaaggtctgcagattcaagcttgaatggctgggaaattgctctggattaaatgatgaaacttatggctacaaagagggcaaaccgtgcattattataaagctcaaccgagttctaggcttcaaacctaagcctcccaagaatgagtccttggagacttacccagtgatgaagtataacccaaatgtccttcccgttcagtgcactggcaagcgagatgaagataaggataaagttggaaatgtggagtattttggactgggcaactcccctggttttcctctgcagtattatccgtactatggcaaactcctgcagcccaaatacctgcagcccctgctggccgtacagttcaccaatcttaccatggacactgaaattcgcatagagtgtaaggcgtacggtgagaacattgggtacagtgagaaagaccgttttcagggacgttttgatgtaaaaattgaagttaagagctgatcacaagcacaaatctttcccactagccatttaataagttaaaaaaagatacaaaaacaaaaacctactagtcttgaacaaactgtcatacgtatgggacctacacttaatctatatgctttacactagctttctgcatttaataggttagaatgtaaattaaagtgtagcaatagcaacaaaatatttattctactgtaaatgacaaaagaaaaagaaaaattgagccttgggacgtgcccatttttactgtaaattatgattccgtaactgacttgtagtaagcagtgtttctggcccctaagtattgctgccttgtgtattttatttagtgtacagtactacaggtgcatactctggtcatttttcaagccatgttttattgtatctgttttctactttatgtgagcaaggtttgctgtccaaggtgtaaatattcaacgggaataaaactggcatgg

SEQ ID NO: 2884 - DNA, 2589 bp, Homo sapiens
  source 1..2589: mol_type = unassigned DNA
gccaattcctcggctcctggcgggagtgccggtggcgccccgcagtccgcttgtccgtccttccctctctgactctcctaccccgggcctgtctctgcagaggtcaggggaggcgggggcccagcacacgtccccagtggcagcgggagcggcagctacgggttcgcggagcccccgaccccccaagggctagaggagcgctcggcggaccaaagaaagcccgcgagcggctgcgcgcccaccaataggtgcggggctcggagccgcgcagcctgcgccgtccctccctccgcccccgccccgccgccgccgccgccgccgcctccccctcctcctgctcctgccttggctcctccgccgcgcgtctcgcactccgagagccgcagcggcagcggcgcgtcctgcctgcagagagccaggccggagaagccgagcggcgcagaggacgccagggcgcgcgccgcagccacccaccctccggaccgcggcagctgctgacccgccatcgccatggcccgcgggaaagccaaggaggagggcagctggaagaaattcatctggaactcagagaagaaggagtttctgggcaggaccggtggcagttggtttaagatccttctattctacgtaatattttatggctgcctggctggcatcttcatcggaaccatccaagtgatgctgctcaccatcagtgaatttaagcccacatatcaggaccgagtggccccgccaggattaacacagattcctcagatccagaagactgaaatttcctttcgtcctaatgatcccaagagctatgaggcatatgtactgaacatagttaggttcctggaaaagtacaaagattcagcccagagggatgacatgatttttgaagattgtggcgatgtgcccagtgaaccgaaagaacgaggagactttaatcatgaacgaggagagcgaaaggtctgcagattcaagcttgaatggctgggaaattgctctggattaaatgatgaaacttatggctacaaagagggcaaaccgtgcattattataaagctcaaccgagttctaggcttcaaacctaagcctcccaagaatgagtccttggagacttacccagtgatgaagtataacccaaatgtccttcccgttcagtgcactggcaagcgagatgaagataaggataaagttggaaatgtggagtattttggactgggcaactcccctggttttcctctgcagtattatccgtactatggcaaactcctgcagcccaaatacctgcagcccctgctggccgtacagttcaccaatcttaccatggacactgaaattcgcatagagtgtaaggcgtacggtgagaacattgggtacagtgagaaagaccgttttcagggacgttttgatgtaaaaattgaagttaagagctgatcacaagcacaaatctttcccactagccatttaataagttaaaaaaagatacaaaaacaaaaacctactagtcttgaacaaactgtcatacgtatgggacctacacttaatctatatgctttacactagctttctgcatttaataggttagaatgtaaattaaagtgtagcaatagcaacaaaatatttattctactgtaaatgacaaaagaaaaagaaaaattgagccttgggacgtgcccatttttactgtaaattatgattccgtaactgacttgtagtaagcagtgtttctggcccctaagtattgctgccttgtgtattttatttagtgtacagtactacaggtgcatactctggtcatttttcaagccatgttttattgtatctgttttctactttatgtgagcaaggtttgctgtccaaggtgtaaatattcaacgggaataaaactggcatggtaattttttttttttttttttttttgttttttggctctttcaaaggtaatggcccatcgatgagcatttttaacatactccatagtcttttcctgtggtgttaggtctttatttttatttttttcctgggggctggggtgggggtttgtcatgggggaactgccctttaaattttaagtgacactacagaaaaacacaaaaaggtgatgggttgtgttatgcttgtattgaatgctgtcttgacatctcttgccttgtcctccggtatgttctaaagctgtgtctgagatctggatctgcccatcactttggctagtgacagggctaattaatttgctttatacattttcttttactttccttttttcctttctggaggcatcacatgctggtgctgtgtctttatgaatgttttaaccattttcatggtggaagaattttatatttatgcagttgtacaattttatttttttctgcaagaaaaagtgtaatgtatgaaataaaccaaagtcacttgtttgaaaataaatctttattttgaactttataaaaagcaatgcagtaccccatagactggtgttaaatgttgtctacagtgcaaaatccatgttctaacatatgtaataattgccaggagtacagtgctcttgttgatcttgtattcagtcaggttaaaacaacggacaataaaagaatgaacacattc

SEQ ID NO: 2885 - DNA, 2608 bp, Homo sapiens
  source 1..2608: mol_type = unassigned DNA
gcccacaaggggcacagccgggcagtcaggaaccggggctgccggctgggctggcctgcaaagaagagggaagggccggaactgcaaccgcagtggcggggagtgcgagggggcggcagaggtcaggggaggcgggggcccagcacacgtccccagtggcagcgggagcggcagctacgggttcgcggagcccccgaccccccaagggctagaggagcgctcggcggaccaaagaaagcccgcgagcggctgcgcgcccaccaataggtgcggggctcggagccgcgcagcctgcgccgtccctccctccgcccccgccccgccgccgccgccgccgccgcctccccctcctcctgctcctgccttggctcctccgccgcgcgtctcgcactccgagagccgcagcggcagcggcgcgtcctgcctgcagagagccaggccggagaagccgagcggcgcagaggacgccagggcgcgcgccgcagccacccaccctccggaccgcggcagctgctgacccgccatcgccatggcccgcgggaaagccaaggaggagggcagctggaagaaattcatctggaactcagagaagaaggagtttctgggcaggaccggtggcagttggtttaagatccttctattctacgtaatattttatggctgcctggctggcatcttcatcggaaccatccaagtgatgctgctcaccatcagtgaatttaagcccacatatcaggaccgagtggccccgccaggattaacacagattcctcagatccagaagactgaaatttcctttcgtcctaatgatcccaagagctatgaggcatatgtactgaacatagttaggttcctggaaaagtacaaagattcagcccagagggatgacatgatttttgaagattgtggcgatgtgcccagtgaaccgaaagaacgaggagactttaatcatgaacgaggagagcgaaaggtctgcagattcaagcttgaatggctgggaaattgctctggattaaatgatgaaacttatggctacaaagagggcaaaccgtgcattattataaagctcaaccgagttctaggcttcaaacctaagcctcccaagaatgagtccttggagacttacccagtgatgaagtataacccaaatgtccttcccgttcagtgcactggcaagcgagatgaagataaggataaagttggaaatgtggagtattttggactgggcaactcccctggttttcctctgcagtattatccgtactatggcaaactcctgcagcccaaatacctgcagcccctgctggccgtacagttcaccaatcttaccatggacactgaaattcgcatagagtgtaaggcgtacggtgagaacattgggtacagtgagaaagaccgttttcagggacgttttgatgtaaaaattgaagttaagagctgatcacaagcacaaatctttcccactagccatttaataagttaaaaaaagatacaaaaacaaaaacctactagtcttgaacaaactgtcatacgtatgggacctacacttaatctatatgctttacactagctttctgcatttaataggttagaatgtaaattaaagtgtagcaatagcaacaaaatatttattctactgtaaatgacaaaagaaaaagaaaaattgagccttgggacgtgcccatttttactgtaaattatgattccgtaactgacttgtagtaagcagtgtttctggcccctaagtattgctgccttgtgtattttatttagtgtacagtactacaggtgcatactctggtcatttttcaagccatgttttattgtatctgttttctactttatgtgagcaaggtttgctgtccaaggtgtaaatattcaacgggaataaaactggcatggtaattttttttttttttttttttttgttttttggctctttcaaaggtaatggcccatcgatgagcatttttaacatactccatagtcttttcctgtggtgttaggtctttatttttatttttttcctgggggctggggtgggggtttgtcatgggggaactgccctttaaattttaagtgacactacagaaaaacacaaaaaggtgatgggttgtgttatgcttgtattgaatgctgtcttgacatctcttgccttgtcctccggtatgttctaaagctgtgtctgagatctggatctgcccatcactttggctagtgacagggctaattaatttgctttatacattttcttttactttccttttttcctttctggaggcatcacatgctggtgctgtgtctttatgaatgttttaaccattttcatggtggaagaattttatatttatgcagttgtacaattttatttttttctgcaagaaaaagtgtaatgtatgaaataaaccaaagtcacttgtttgaaaataaatctttattttgaactttataaaaagcaatgcagtaccccatagactggtgttaaatgttgtctacagtgcaaaatccatgttctaacatatgtaataattgccaggagtacagtgctcttgttgatcttgtattcagtcaggttaaaacaacggacaataaaagaatgaacacattc

SEQ ID NO: 2886 - DNA, 1738 bp, Homo sapiens
  source 1..1738: mol_type = unassigned DNA
agtcattcagggagtcctgaacagaggccgattggtgttcctgcttgggaggatctgtgggaatcggcaggagaatgagtcagggaaatagtgcttagctgacattttgaaatggaagaagctggaatatatgaatttttgtaaagaaaaaaaaatgcagcctttaagatccttctattctacgtaatattttatggctgcctggctggcatcttcatcggaaccatccaagtgatgctgctcaccatcagtgaatttaagcccacatatcaggaccgagtggccccgccaggattaacacagattcctcagatccagaagactgaaatttcctttcgtcctaatgatcccaagagctatgaggcatatgtactgaacatagttaggttcctggaaaagtacaaagattcagcccagagggatgacatgatttttgaagattgtggcgatgtgcccagtgaaccgaaagaacgaggagactttaatcatgaacgaggagagcgaaaggtctgcagattcaagcttgaatggctgggaaattgctctggattaaatgatgaaacttatggctacaaagagggcaaaccgtgcattattataaagctcaaccgagttctaggcttcaaacctaagcctcccaagaatgagtccttggagacttacccagtgatgaagtataacccaaatgtccttcccgttcagtgcactggcaagcgagatgaagataaggataaagttggaaatgtggagtattttggactgggcaactcccctggttttcctctgcagtattatccgtactatggcaaactcctgcagcccaaatacctgcagcccctgctggccgtacagttcaccaatcttaccatggacactgaaattcgcatagagtgtaaggcgtacggtgagaacattgggtacagtgagaaagaccgttttcagggacgttttgatgtaaaaattgaagttaagagctgatcacaagcacaaatctttcccactagccatttaataagttaaaaaaagatacaaaaacaaaaacctactagtcttgaacaaactgtcatacgtatgggacctacacttaatctatatgctttacactagctttctgcatttaataggttagaatgtaaattaaagtgtagcaatagcaacaaaatatttattctactgtaaatgacaaaagaaaaagaaaaattgagccttgggacgtgcccatttttactgtaaattatgattccgtaactgacttgtagtaagcagtgtttctggcccctaagtattgctgccttgtgtattttatttagtgtacagtactacaggtgcatactctggtcatttttcaagccatgttttattgtatctgttttctactttatgtgagcaaggtttgctgtccaaggtgtaaatattcaacgggaataaaactggcatggtaattttttttttttttttttttttgttttttggctctttcaaaggtaatggcccatcgatgagcatttttaacatactccatagtcttttcctgtggtgttaggtctttatttttatttttttcctgggggctggggtgggggtttgtcatgggggaactgccctttaaattttaagtgacactacagaaaaacacaaaaaggtgatgggttgtgttatgcttgtattgaatgctgtcttgacatctcttgccttgtcctccggtatgttctaaagctgtgtctgagatctggatctg

SEQ ID NO: 2887 - DNA, 3330 bp, Homo sapiens
  source 1..3330: mol_type = unassigned DNA
ggagcggagcctccgcctggggggccccccatccctggctgtcccccagctgcgcgtccccgccccacccccgcggctgagccaccaccggtgcagtggtctccgcttggcggagcgagccttgagcttcgttccacagcttctttgcatcttggatttcggggcggccccctcccccacctctctctgcctttttgtaccccgctttttttctgcgttctgctcggtttttgtagccgtctgtttttgcaccccatttcgttttgtttctagacggtttggtggggggtgaagctgcattcataccccttcctcttgttattctcccctgctctgacagcaccccttttcatcgcagttggggggcctaggatcggtgcatcttccgccgcgctgccagcaccccgcagcgcgtggtcgtgcaccccggaatctgcagcagctgcatatctgaggggggtctcctttgcccgcgccgccttcgctccccgtgcttttgggtgtgtggagggcttcagcgcgcggcgcccccgcttctccgcaaccccccgccccgcgcccggactcgccccgcgccaccaagatggtcatccagaaagagaagaagagctgcgggcaggtggttgaggagtggaaggagttcgtgtggaacccgaggacgcaccagtttatgggccgcaccgggaccagctgggcctttatcctcctcttctacctcgttttttatgggttcctcaccgccatgttcaccctcaccatgtgggtgatgctgcagactgtctccgaccatacccccaagtaccaggaccgactggccacaccgggcttgatgattcgccccaagactgagaaccttgatgtcattgtcaatgtcagtgacactgaaagctgggaccagcatgttcagaagctcaacaagttcttggagccttacaacgactctatccaagcccaaaagaatgatgtctgccgccctggacgctattacgaacagccagataatggagtcctcaactaccccaaacgtgcctgccaattcaaccggacccagctgggcaactgctccggcattggggactccacccactatggttacagcactgggcagccctgtgtcttcatcaagatgaaccgggtcatcaacttctatgcaggagcaaaccagagcatgaatgttacctgtgctgggaagcgagatgaagatgctgagaatctcggcaacttcgtcatgttccccgccaacggcaacatcgacctcatgtacttcccctactatggcaaaaagttccacgtgaactacacacagcccctggtggctgtgaagttcctgaatgtgacccccaacgtggaggtgaatgtagaatgtcgcatcaacgccgccaacatcgccacagacgatgagcgagacaagttcgccggccgcgtggccttcaaactccgcatcaacaaaacctgaggccccttcctcccaccccatctctctcctgtggatgctcctggaatgtccctgaccctgcctgatccctccctcacccaccccaaaggtatttttgataacagagctatgacttgtctgagcctcacatccttttccttgacttctcaacccagcctgaagtccattgcggttccgtcactcgcctttcccaccaacttctcccaacctcagatcagtcagacagggagctgggctaagatggccacggaggagttaggagcctttctagttctggtttagctgtgagagctatccactctcctgcctgcatatcccctgagagttataggaagtgcccactgacccacccacccacctacaccccccgccacacacacacacaaacgtgcacacgcgtctcatttgacccctttgcttccagagatgaatgtggcactccctccttccattcctaagctctggccaccgtcccttgatctctcatactttctccctgtctacacagtcgccatcttggtgactttgaatttatctggctcctgggcaggtcttctcctcctctccatccctattccctcctctgaaatgcacccctttgtaattgaggacaaggtggttctgtggccttttccctctttgctggcacgttctgcttctcaccctctggtgactctgtgagctgggaaatgagggactggaagtgaggcctgtgttgacccttcctgaaaatcctctagcagcccccgacttcagcagtttctttctttgtttttttgagatggagtttcgctcttgttgcccaggctggagtgcaatggtgcaatctcagctcactgcaacttccgcatcccaggttcaagcgattctcccgcctcaggttcccgagtagctgggactacaggcatgtgccaccatgcccggctaatttctttctttctttttttttttttttgcattttttagtagagatgggggtttctccttgttggtcaggctggtctcgaactcccgacctcaggtgatccacctgcctcggcctcccaaagtgttgggattacaggcgtgagccaccgcgcccggccttcagtttcttcctaggccgttctgtcacccaaatagctgctacccagaggggcggggttgacctaggctgaatatccactttgtttttatggatggctcccttcccccattcgccttcccagaatatccttcaagttccacttcccagggagctctgggggaggggcggccattctggctccgtccccagtggccaccttggaaacatcggctggctttgggactattccacctccttcccctgagcccagatctgcccccaccatcctttctctggcttcttttagcaagttatcaactaatcactaactccttccttttcctctgcatgccagcctgaaaattccaaatctagcctctgaatgtcttggctccatctcttcagacccctttgcctttaaaaaaaaaacaaaaacaaaaacaaaaaaacccataatgcccacagaatgtcaaatgaggggcctcctgcctcctgctctgaatattctgtagctgtagaggcattttaaccctttgtcctccagcatcccttcacttcctcatcctctctaacctcctttttctttttttaatgctgcagcctccacactccacccacaggtggacccttccctttttctctagctggatctgtgtttcttcccttcgggcccccatgttttcctgcacccgccctaccatggtctctctctgcagttatttaatgcctgtgtcagatctactgtaaaaagaggattaagtaaaataaaatgagagcaattatatatataaatatatatcatacacag

SEQ ID NO: 2888 - DNA, 1811 bp, Homo sapiens
  source 1..1811: mol_type = unassigned DNA
ccaagcggccgcccggcgcggcgcggcgcagtcggctcgagtactccccgtaacgaggaggtgttctcggccgtcccacccttcactgccgtctccgggctgcgccgccggagccgggacgcgcctccgcagccctcgccgcctccatccccgcggccgcagctcctctcgccgtccgcgcgcacaccatgacgaagaacgagaagaagtccctcaaccagagcctggccgagtggaagctcttcatctacaacccgaccaccggagaattcctggggcgcaccgccaagagctggggtttgatcttgctcttctacctagttttttatgggttcctggctgcactcttctcattcacgatgtgggttatgcttcagactctcaacgatgaggttccaaaataccgtgaccagattcctagcccaggactcatggtttttccaaaaccagtgaccgcattggaatatacattcagtaggtctgatccaacttcgtatgcagggtacattgaagaccttaagaagtttctaaaaccatatactttagaagaacagaagaacctcacagtctgtcctgatggagcactttttgaacagaagggtccagtttatgttgcatgtcagtttcctatttcattacttcaagcatgcagtggtatgaatgatcctgattttggctattctcaaggaaacccttgtattcttgtgaaaatgaacagaataattggattaaagcctgaaggagtgccaaggatagattgtgtttcaaagaatgaagatataccaaatgtagcagtttatcctcataatggaatgatagacttaaaatatttcccatattatgggaaaaaactgcatgttgggtatctacagccattggttgctgttcaggtcagctttgctcctaacaacactgggaaagaagtaacagttgagtgcaagattgatggatcagccaacctaaaaagtcaggatgatcgtgacaagtttttgggacgagttatgttcaaaatcacagcacgtgcatagtatgagtaggatatctccacagagtaaatgttgtgttgtctgtcttcattttgtaacagctggaccttccattctagaattatgagaccaccttggagaaaggtgtgtggtacatgacattgggttacatcataacgtgcttccagatcatagtgttcagtgtcctctgaagtaactgcctgttgcctctgctgccctttgaaccagtgtacagtcgccagatagggaccggtgaacacctgattccaaacatgtaggatgggggtcttgtcctctttttatgtggtttaattgccaagtgtctaaagcttaatatgccgtgctatgtaaatattttatggatataacaactgtcatattttgatgtcaacagagttttagggataaaatggtacccggccaacatcaagtgactttatagctgcaagaaatgtggtatgtggagaagttctgtatgtgaggaaggaaaaaaagaaaataaaagtgtgtttgaaaaatattatcttgggttctttgtaaaatttattttttacatgctgaattagcctcgatctttttgattaagagcacaaacttttttttgtaaaacatgtaaaaaaaaaaactgggattaatttttagtgttggaactgcctcttattttaggctgtagataaaatagcatttttaggttagccagtgtgactatgcacctaattttttatgagattaaattcataagacttaatttgtacaatagtttgtgaaatatcttgttactgcttttatttagcagactgtgga

SEQ ID NO: 2889 - DNA, 1924 bp, Homo sapiens
  source 1..1924: mol_type = unassigned DNA
agtcggctcgagtactccccgtaacgaggaggtgttctcggccgtcccacccttcactgccgtctccgggctgcgccgccggagccgggacgcgcctccgcagccctcgccgcctccatccccgcggccgcagctcctctcgccgtccgcgcgcacaccatgacgaagaacgagaagaagtccctcaaccagagcctggccgagtggaagctcttcatctacaacccgaccaccggagaattcctggggcgcaccgccaagagctggggatcgcagtatgtggtagggaagtgatgctgtctgaaggtgacatcctgttctcctctcttctgtcctctccatccttattttggccacctggtttgatcttgctcttctacctagttttttatgggttcctggctgcactcttctcattcacgatgtgggttatgcttcagactctcaacgatgaggttccaaaataccgtgaccagattcctagcccaggactcatggtttttccaaaaccagtgaccgcattggaatatacattcagtaggtctgatccaacttcgtatgcagggtacattgaagaccttaagaagtttctaaaaccatatactttagaagaacagaagaacctcacagtctgtcctgatggagcactttttgaacagaagggtccagtttatgttgcatgtcagtttcctatttcattacttcaagcatgcagtggtatgaatgatcctgattttggctattctcaaggaaacccttgtattcttgtgaaaatgaacagaataattggattaaagcctgaaggagtgccaaggatagattgtgtttcaaagacaaataatgtaaaagatggaatgaagatataccaaatgtagcagtttatcctcataatggaatgatagacttaaaatatttcccatattatgggaaaaaactgcatgttgggtatctacagccattggttgctgttcaggtcagctttgctcctaacaacactgggaaagaagtaacagttgagtgcaagattgatggatcagccaacctaaaaagtcaggatgatcgtgacaagtttttgggacgagttatgttcaaaatcacagcacgtgcatagtatgagtaggatatctccacagagtaaatgttgtgttgtctgtcttcattttgtaacagctggaccttccattctagaattatgagaccaccttggagaaaggtgtgtggtacatgacattgggttacatcataacgtgcttccagatcatagtgttcagtgtcctctgaagtaactgcctgttgcctctgctgccctttgaaccagtgtacagtcgccagatagggaccggtgaacacctgattccaaacatgtaggatgggggtcttgtcctctttttatgtggtttaattgccaagtgtctaaagcttaatatgccgtgctatgtaaatattttatggatataacaactgtcatattttgatgtcaacagagttttagggataaaatggtacccggccaacatcaagtgactttatagctgcaagaaatgtggtatgtggagaagttctgtatgtgaggaaggaaaaaaagaaaataaaagtgtgtttgaaaaatattatcttgggttctttgtaaaatttattttttacatgctgaattagcctcgatctttttgattaagagcacaaacttttttttgtaaaacatgtaaaaaaaaaaactgggattaatttttagtgttggaactgcctcttattttaggctgtagataaaatagcatttttaggttagccagtgtgactatgcacctaattttttatgagattaaattcataagacttaatttgtacaatagtttgtgaaatatcttgttactgcttttatttagcagactgtggactgtaataaagtatataaattgtgaaatat

SEQ ID NO: 2890 - DNA, 2234 bp, Homo sapiens
  source 1..2234: mol_type = unassigned DNA
gctcaagatggcgctgctcgcgatgcattcttggcgctgggcggccgcggcggctgctttcgaaaagcgccggcactccgcgattctgatccggcctttagtctctgttagcggctcaggtccgcagtggaggccacatcaactcggcgccttgggaaccgctcgagcctaccagattccagagtcattaaaaagtatcacatggcagagattgggaaaaggcaattcaggacagttcttagatgctgcaaaggctctccaggtatggccactgatagaaaagaggacatgttggcatggtcatgcaggaggaggactccacacagacccaaaagaaggggccatgaatattgtggttcccttcatgtttaaatatgctgtagacagcctcaaccagatgtcgggaaacatgctgaacctgagtgatgcaccaaatacagttgcaaccatggcaacagcagttctgattggctatggtgtatcaagagctggagctgctttttttaacgaagttcgaaatgcagtatttggcaaggtagcccagaattcaatccgaagaatagccaaaaatgtctttctccatcttcacaacctggatctgggttttcacctgagcagacagacgggagctttatctaaggctattgacagaggaacaaggggtatcagttttgtcctgagtgctttggtatttaatcttcttcccatcatgtttgaagtgatgcttgtcagtggtgttttgtattacaaatgcggtgcccagtttgctttggtaacccttggaacacttggtacatacacagcattcacagttgcagtcacacggtggagaactagatttagaatagaaatgaacaaagcagataatgatgcaggtaatgctgctatagactcactgctgaattatgaaactgtgaagtattttaataatgaaagatatgaagcacagagatatgatggatttttgaagacgtatgagactgcttcattgaaaagtacctctactctggctatgctgaactttggtcaaagtgctattttcagtgtcggtttaacagctataatggtgctcgccagtcagggaattgtggcaggtacccttactgttggagatctagtaatggtgaatggactgctttttcagctttcattacccctgaactttctgggaactgtatatagagagactagacaagcactcatagatatgaacaccttgtttactctactcaaggtagacacccaaattaaagacaaagtgatggcatctccccttcagatcacaccacagacagctaccgtggcctttgataatgtgcattttgaatacattgagggccagaaagtccttagtggaatatcctttgaagtccctgcaggaaagaaagtggccattgtaggaggtagtgggtcagggaaaagcacaatagtgaggctattatttcgcttctatgagcctcaaaagggtagcatttatcttgctggtcaaaatatacaagatgtgagcctggaaagccttcggagggcagtgggagtggtacctcaggatgctgtcctcttccataatactatttattacaacctcttatatggaaacatcagtgcttcacctgaggaagtgtatgcagtggcaaaattagctggacttcatgatgcaattcttcgaatgccacatggatatgacacccaagtaggggaacgaggactcaagctttcaggaggagaaaagcaaagagtagcaattgcaagagccattttgaaggaccccccagtcatactctatgatgaagctacttcatcgttagattcgattactgaagagactattcttggtgccatgaaggatgtggtcaaacacagaacttctattttcattgcacacagattgtcaacagtggttgatgcagatgaaatcattgtcttggatcagggtaaggtagccgaacgtggtacccaccatggtttgcttgctaaccctcatagtatctattcagaaatgtggcatacacagagcagccgtgtgcagaaccatgataaccccaaatgggaagcaaagaaagaaaatatatccaaagaggaggaaagaaagaaactacaagaagaaattgtcaatagtgtgaaaggctgtggaaactgttcgtgctaagtcacataagacattttctttttttgttgttttggactacatatttgcactgaagcagaattgttttattaaaaaaatcatacattcc

SEQ ID NO: 2891 - DNA, 2394 bp, Homo sapiens
  source 1..2394: mol_type = unassigned DNA
ctcagctccgaccttgcagcggcgcagcgcgggtgggaggcggggaggagcagcgggaagagcggagcgaggaccgcgtccggcgcagtcttcaatgagcagcgcggaaactgcaccccagacccgagcctgctgcgcgccccctcccagagctcacctggtgccaggtaacaggcctggcctcgccctgtggatgatgatggccttgcccccgtgagctacaacctggccttcagcacccgcccacctccaaccagcaggatgcggctgtggaaggcggtggtggtgactttggccttcatgagtgtggacatctgcgtgaccacggccatctatgtcttcagccacctggaccgcagcctcctggaggacatccgccacttcaacatctttgactcggtgctggatctctgggcagcctgcctgtaccgcagctgcctgctgctgggagccaccattggtgtggccaagaacagtgcgctggggccccggcggctgcgggcctcgtggctggtcatcaccctcgtgtgcctcttcgtgggcatctatgccatggtgaagctgctgctcttctcagaggtgcgcaggcccatccgggacccctggttttgggccctgttcgtgtggacgtacatttcactcggcgcatccttcctgctctggtggctgctgtccaccgtgcggccaggcacccaggccctggagccaggggcggccaccgaggctgagggcttccctgggagcggccggccaccgcccgagcaggcgtctggggccacgctgcagaagctgctctcctacaccaagcccgacgtggccttcctcgtggccgcctccttcttcctcatcgtggcagctctgggagagaccttcctgccctactacacgggccgcgccattgatggcatcgtcatccagaaaagcatggatcagttcagcacggctgtcgtcatcgtgtgcctgctggccattggcagctcatttgccgcaggtattcggggcggcatttttaccctcatatttgccagactgaacattcgccttcgaaactgtctcttccgctcactggtgtcccaggagacaagcttctttgatgagaaccgcacaggggacctcatctcccgcctgacctcggacaccaccatggtcagcgacctggtctcccagaacatcaatgtcttcctgcggaacacagtcaaggtcacgggcgtggtggtcttcatgttcagcctctcatggcagctctccttggtcaccttcatgggcttccccatcatcatgatggtgtccaacatctacggcaagtactacaagaggctctccaaagaggtccagaatgccctggccagagcgagcaacacggcggaggagaccatcagtgccatgaagactgtccggagcttcgccaatgaggaggaggaggcagaggtgtacctgcggaagctgcagcaggtgtacaagctgaacaggaaggaggcagctgcctacatgtactacgtctggggcagcgggctcacactgctggtggtccaggtcagcatcctctactacgggggccaccttgtcatctcaggccagatgaccagcggcaacctcatcgccttcatcatctacgagtttgtcctgggagattgtatggagtccgtgggctccgtctacagtggcctgatgcagggagtgggggctgctgagaaggtgttcgagttcatcgaccggcagccgaccatggtgcacgatggcagcttggcccccgaccacctggagggccgggtggactttgagaatgtgaccttcacctaccgcactcggccccacacccaggtcctgcagaatgtctccttcagcctgtcccccggcaaggtgacggccctggtggggccctcgggcagtgggaagagctcctgtgtcaacatcctggagaacttctaccccctggaggggggccgggtgctgctggacggcaagcccatcagcgcctacgaccacaagtacttgcaccgtgtgatctccctggtgagccaggagcccgtgctgttcgcccgctccatcacggataacatctcctacggcctgcccactgtgcctttcgagatggtggtggaggccgcacagaaggccaatgcccacggcttcatcatggaactccaggacggctacagcacagagacaggggagaagggcgcccagctgtcaggtggccagaagcagcgggtggccatggcccgggctctggtgcggaaccccccagtcctcatcctggatgaagccaccagcgctttggatgccgagagcgagtatctgatctgaatgaccagcctgcagatatcagaaccgagatggattgatgatgatgacaatgataaccattcaggtataaaacattttcagtgcagc

SEQ ID NO: 2892 - DNA, 2587 bp, Homo sapiens
  source 1..2587: mol_type = unassigned DNA
ctcagctccgaccttgcagcggcgcagcgcgggtgggaggcggggaggagcagcgggaagagcggagcgaggaccgcgtccggcgcagtcttcaatgagcagcgcggaaactgcaccccagacccgagcctgctgcgcgccccctcccagagctcacctggtgccaggtaacaggcctggcctcgccctgtggatgatgatggccttgcccccgtgagctacaacctggccttcagcacccgcccacctccaaccagcaggatgcggctgtggaaggcggtggtggtgactttggccttcatgagtgtggacatctgcgtgaccacggccatctatgtcttcagccacctggaccgcagcctcctggaggacatccgccacttcaacatctttgactcggtgctggatctctgggcagcctgcctgtaccgcagctgcctgctgctgggagccaccattggtgtggccaagaacagtgcgctggggccccggcggctgcgggcctcgtggctggtcatcaccctcgtgtgcctcttcgtgggcatctatgccatggtgaagctgctgctcttctcagaggtgcgcaggcccatccgggacccctggttttgggccctgttcgtgtggacgtacatttcactcggcgcatccttcctgctctggtggctgctgtccaccgtgcggccaggcacccaggccctggagccaggggcggccaccgaggctgagggcttccctgggagcggccggccaccgcccgagcaggcgtctggggccacgctgcagaagctgctctcctacaccaagcccgacgtggccttcctcgtggccgcctccttcttcctcatcgtggcagctctgggagagaccttcctgccctactacacgggccgcgccattgatggcatcgtcatccagaaaagcatggatcagttcagcacggctgtcgtcatcgtgtgcctgctggccattggcagctcatttgccgcaggtattcggggcggcatttttaccctcatatttgccagactgaacattcgccttcgaaactgtctcttccgctcactggtgtcccaggagacaagcttctttgatgagaaccgcacaggggacctcatctcccgcctgacctcggacaccaccatggtcagcgacctggtctcccagaacatcaatgtcttcctgcggaacacagtcaaggtcacgggcgtggtggtcttcatgttcagcctctcatggcagctctccttggtcaccttcatgggcttccccatcatcatgatggtgtccaacatctacggcaagtactacaagaggctctccaaagaggtccagaatgccctggccagagcgagcaacacggcggaggagaccatcagtgccatgaagactgtccggagcttcgccaatgaggaggaggaggcagaggtgtacctgcggaagctgcagcaggtgtacaagctgaacaggaaggaggcagctgcctacatgtactacgtctggggcagcgggctcacactgctggtggtccaggtcagcatcctctactacgggggccaccttgtcatctcaggccagatgaccagcggcaacctcatcgccttcatcatctacgagtttgtcctgggagattgtatggagtccgtgggctccgtctacagtggcctgatgcagggagtgggggctgctgagaaggtgttcgagttcatcgaccggcagccgaccatggtgcacgatggcagcttggcccccgaccacctggagggccgggtggactttgagaatgtgaccttcacctaccgcactcggccccacacccaggtcctgcagaatgtctccttcagcctgtcccccggcaaggtgacggccctggtggggccctcgggcagtgggaagagctcctgtgtcaacatcctggagaacttctaccccctggaggggggccgggtgctgctggacggcaagcccatcagcgcctacgaccacaagtacttgcaccgtgtgatctccctggtgagccaggagcccgtgctgttcgcccgctccatcacggataacatctcctacggcctgcccactgtgcctttcgagatggtggtggaggccgcacagaaggccaatgcccacggcttcatcatggaactccaggacggctacagcacagagacaggggagaagggcgcccagctgtcaggtggccagaagcagcgggtggccatggcccgggctctggtgcggaaccccccagtcctcatcctggatgaagccaccagcgctttggatgccgagagcgagtatctgtgtgctgggtaaaccaggagaaagtaattgcagtcgagggctttgggaacagcacagttggccagagagacagatgaggaaaacaagcagggatgagagagaatgaagaggagcacggcaccccagggctggcttagtcctggcgccaggacttagtttactctgtcattgtttctttcccacattagagtttgtcttcatcactgctgtattccccagtgcctagaacagtggctgacacatagtatgtgctcagtaaacagccattaaagaaatgtttgagctg

SEQ ID NO: 2893 - DNA, 714 bp, Homo sapiens
  source 1..714: mol_type = unassigned DNA
agacgctgggacccacgacgacagaaggcgccgatggccgcgcctgctgagccctgcgcggggcagggggtctggaaccagacagagcctgaacctgccgccaccagcctgctgagcctgtgcttcctgagaacagcaggggtctgggtaccccccatgtacctctgggtccttggtcccatctacctcctcttcatccaccaccatggccggggctacctccggatgtccccactcttcaaagccaagatggtagctgccatccctgggagcctggaaccaggcaatgttcgggggaggcaggggacaggctggaacctggtgaagtcttaaagtagactcctcctatcggggtgtagaagggaatctgttaatcaaacagagcaatattagaaaggctacagaggtcaactcagtggaacacggttctcccaaacagattttgtaattccgaaaatccacgcatgcgcaaacatacgcatacactcccatgttcctggacagtttatagctaccataacctggcattttccaaaacataccatgtagactcttggatacacaaggtaattttagagccacattaggatgaaccttttaaaaagttatgcatttatttttatgttcccccactggctgtattataggacaatttttatatgtgatatgtatttaccttagtgtgttaaataaacactggcattccaagtgtga

SEQ ID NO: 2894 - DNA, 923 bp, Homo sapiens
  source 1..923: mol_type = unassigned DNA
gtgagtggggccgggacccgcagagccgagccgacccttctctcccgggctgcggcagggcagggcggggagctccgcgcaccaacagagccggttctcagggcgctttgctccttgttttttccccggttctgttttctccccttctccggaaggcttgtcaaggggtaggagaaagagacgcaaacacaaaagtggaaaacagtgtcagctgctgctggaagtggcctggcctctatttatcttcctgatcctgatctctgttcggctgagctacccaccctatgaacaacatgaatgccattttccaaataaagccatgccctctgcaggaacacttccttgggttcaggggattatctgtaatgccaacaacccctgtttccgttacccgactcctggggaggctcccggagttgttggaaactttaacaaatccattgtggctcgcctgttctcagatgctcggaggcttcttttatacagccagaaagacaccagcatgaaggacatgcgcaaagttctgagaacattacagcagatcaagaaatccagctcaaacttgaagcttcaagatttcctggtggacaatgaaaccttctctgggttcctgtatcacaacctctctctcccaaagtctactgtggacaagatgctgagggctgatgtcattctccacaaggtaagctgatgcctccagcttcctcagtagggctgatggcaattacgttgtgcagctactggaaagaaatgaataaacccttgtccttgtaatggtggtgaaggggagggaggtagtttgaatacaacttcacttaattttacttccctattcaggcaggaattgccaaaccatccaggagtggaatatgcaacctggcgtcatgggccagctggttaaaataaaattgatttctggctta

SEQ ID NO: 2895 - DNA, 10494 bp, Homo sapiens
  source 1..10494: mol_type = unassigned DNA
agagcacaggctttgaccgatagtaacctctgcgctcggtgcagccgaatctataaaaggaactagtcccggcaaaaaccccgtaattgcgagcgagagtgagtggggccgggacccgcagagccgagccgacccttctctcccgggctgcggcagggcagggcggggagctccgcgcaccaacagagccggttctcagggcgctttgctccttgttttttccccggttctgttttctccccttctccggaaggcttgtcaaggggtaggagaaagagacgcaaacacaaaagtggaaaacagttaatgaccagccacggcgtccctgctgtgagctctggccgctgccttccagggctcccgagccacacgctgggggtgctggctgagggaacatggcttgttggcctcagctgaggttgctgctgtggaagaacctcactttcagaagaagacaaacatgtcagctgctgctggaagtggcctggcctctatttatcttcctgatcctgatctctgttcggctgagctacccaccctatgaacaacatgaatgccattttccaaataaagccatgccctctgcaggaacacttccttgggttcaggggattatctgtaatgccaacaacccctgtttccgttacccgactcctggggaggctcccggagttgttggaaactttaacaaatccattgtggctcgcctgttctcagatgctcggaggcttcttttatacagccagaaagacaccagcatgaaggacatgcgcaaagttctgagaacattacagcagatcaagaaatccagctcaaacttgaagcttcaagatttcctggtggacaatgaaaccttctctgggttcctgtatcacaacctctctctcccaaagtctactgtggacaagatgctgagggctgatgtcattctccacaaggtatttttgcaaggctaccagttacatttgacaagtctgtgcaatggatcaaaatcagaagagatgattcaacttggtgaccaagaagtttctgagctttgtggcctaccaagggagaaactggctgcagcagagcgagtacttcgttccaacatggacatcctgaagccaatcctgagaacactaaactctacatctcccttcccgagcaaggagctggctgaagccacaaaaacattgctgcatagtcttgggactctggcccaggagctgttcagcatgagaagctggagtgacatgcgacaggaggtgatgtttctgaccaatgtgaacagctccagctcctccacccaaatctaccaggctgtgtctcgtattgtctgcgggcatcccgagggaggggggctgaagatcaagtctctcaactggtatgaggacaacaactacaaagccctctttggaggcaatggcactgaggaagatgctgaaaccttctatgacaactctacaactccttactgcaatgatttgatgaagaatttggagtctagtcctctttcccgcattatctggaaagctctgaagccgctgctcgttgggaagatcctgtatacacctgacactccagccacaaggcaggtcatggctgaggtgaacaagaccttccaggaactggctgtgttccatgatctggaaggcatgtgggaggaactcagccccaagatctggaccttcatggagaacagccaagaaatggaccttgtccggatgctgttggacagcagggacaatgaccacttttgggaacagcagttggatggcttagattggacagcccaagacatcgtggcgtttttggccaagcacccagaggatgtccagtccagtaatggttctgtgtacacctggagagaagctttcaacgagactaaccaggcaatccggaccatatctcgcttcatggagtgtgtcaacctgaacaagctagaacccatagcaacagaagtctggctcatcaacaagtccatggagctgctggatgagaggaagttctgggctggtattgtgttcactggaattactccaggcagcattgagctgccccatcatgtcaagtacaagatccgaatggacattgacaatgtggagaggacaaataaaatcaaggatgggtactgggaccctggtcctcgagctgacccctttgaggacatgcggtacgtctgggggggcttcgcctacttgcaggatgtggtggagcaggcaatcatcagggtgctgacgggcaccgagaagaaaactggtgtctatatgcaacagatgccctatccctgttacgttgatgacatctttctgcgggtgatgagccggtcaatgcccctcttcatgacgctggcctggatttactcagtggctgtgatcatcaagggcatcgtgtatgagaaggaggcacggctgaaagagaccatgcggatcatgggcctggacaacagcatcctctggtttagctggttcattagtagcctcattcctcttcttgtgagcgctggcctgctagtggtcatcctgaagttaggaaacctgctgccctacagtgatcccagcgtggtgtttgtcttcctgtccgtgtttgctgtggtgacaatcctgcagtgcttcctgattagcacactcttctccagagccaacctggcagcagcctgtgggggcatcatctacttcacgctgtacctgccctacgtcctgtgtgtggcatggcaggactacgtgggcttcacactcaagatcttcgctagcctgctgtctcctgtggcttttgggtttggctgtgagtactttgccctttttgaggagcagggcattggagtgcagtgggacaacctgtttgagagtcctgtggaggaagatggcttcaatctcaccacttcggtctccatgatgctgtttgacaccttcctctatggggtgatgacctggtacattgaggctgtctttccaggccagtacggaattcccaggccctggtattttccttgcaccaagtcctactggtttggcgaggaaagtgatgagaagagccaccctggttccaaccagaagagaatatcagaaatctgcatggaggaggaacccacccacttgaagctgggcgtgtccattcagaacctggtaaaagtctaccgagatgggatgaaggtggctgtcgatggcctggcactgaatttttatgagggccagatcacctccttcctgggccacaatggagcggggaagacgaccaccatgtcaatcctgaccgggttgttccccccgacctcgggcaccgcctacatcctgggaaaagacattcgctctgagatgagcaccatccggcagaacctgggggtctgtccccagcataacgtgctgtttgacatgctgactgtcgaagaacacatctggttctatgcccgcttgaaagggctctctgagaagcacgtgaaggcggagatggagcagatggccctggatgttggtttgccatcaagcaagctgaaaagcaaaacaagccagctgtcaggtggaatgcagagaaagctatctgtggccttggcctttgtcgggggatctaaggttgtcattctggatgaacccacagctggtgtggacccttactcccgcaggggaatatgggagctgctgctgaaataccgacaaggccgcaccattattctctctacacaccacatggatgaagcggacgtcctgggggacaggattgccatcatctcccatgggaagctgtgctgtgtgggctcctccctgtttctgaagaaccagctgggaacaggctactacctgaccttggtcaagaaagatgtggaatcctccctcagttcctgcagaaacagtagtagcactgtgtcatacctgaaaaaggaggacagtgtttctcagagcagttctgatgctggcctgggcagcgaccatgagagtgacacgctgaccatcgatgtctctgctatctccaacctcatcaggaagcatgtgtctgaagcccggctggtggaagacatagggcatgagctgacctatgtgctgccatatgaagctgctaaggagggagcctttgtggaactctttcatgagattgatgaccggctctcagacctgggcatttctagttatggcatctcagagacgaccctggaagaaatattcctcaaggtggccgaagagagtggggtggatgctgagacctcagatggtaccttgccagcaagacgaaacaggcgggccttcggggacaagcagagctgtcttcgcccgttcactgaagatgatgctgctgatccaaatgattctgacatagacccagaatccagagagacagacttgctcagtgggatggatggcaaagggtcctaccaggtgaaaggctggaaacttacacagcaacagtttgtggcccttttgtggaagagactgctaattgccagacggagtcggaaaggattttttgctcagattgtcttgccagctgtgtttgtctgcattgcccttgtgttcagcctgatcgtgccaccctttggcaagtaccccagcctggaacttcagccctggatgtacaacgaacagtacacatttgtcagcaatgatgctcctgaggacacgggaaccctggaactcttaaacgccctcaccaaagaccctggcttcgggacccgctgtatggaaggaaacccaatcccagacacgccctgccaggcaggggaggaagagtggaccactgccccagttccccagaccatcatggacctcttccagaatgggaactggacaatgcagaacccttcacctgcatgccagtgtagcagcgacaaaatcaagaagatgctgcctgtgtgtcccccaggggcaggggggctgcctcctccacaaagaaaacaaaacactgcagatatccttcaggacctgacaggaagaaacatttcggattatctggtgaagacgtatgtgcagatcatagccaaaagcttaaagaacaagatctgggtgaatgagtttaggtatggcggcttttccctgggtgtcagtaatactcaagcacttcctccgagtcaagaagttaatgatgccatcaaacaaatgaagaaacacctaaagctggccaaggacagttctgcagatcgatttctcaacagcttgggaagatttatgacaggactggacaccaaaaataatgtcaaggtgtggttcaataacaagggctggcatgcaatcagctctttcctgaatgtcatcaacaatgccattctccgggccaacctgcaaaagggagagaaccctagccattatggaattactgctttcaatcatcccctgaatctcaccaagcagcagctctcagaggtggctctgatgaccacatcagtggatgtccttgtgtccatctgtgtcatctttgcaatgtccttcgtcccagccagctttgtcgtattcctgatccaggagcgggtcagcaaagcaaaacacctgcagttcatcagtggagtgaagcctgtcatctactggctctctaattttgtctgggatatgtgcaattacgttgtccctgccacactggtcattatcatcttcatctgcttccagcagaagtcctatgtgtcctccaccaatctgcctgtgctagcccttctacttttgctgtatgggtggtcaatcacacctctcatgtacccagcctcctttgtgttcaagatccccagcacagcctatgtggtgctcaccagcgtgaacctcttcattggcattaatggcagcgtggccacctttgtgctggagctgttcaccgacaataagctgaataatatcaatgatatcctgaagtccgtgttcttgatcttcccacatttttgcctgggacgagggctcatcgacatggtgaaaaaccaggcaatggctgatgccctggaaaggtttggggagaatcgctttgtgtcaccattatcttgggacttggtgggacgaaacctcttcgccatggccgtggaaggggtggtgttcttcctcattactgttctgatccagtacagattcttcatcaggcccagacctgtaaatgcaaagctatctcctctgaatgatgaagatgaagatgtgaggcgggaaagacagagaattcttgatggtggaggccagaatgacatcttagaaatcaaggagttgacgaagatatatagaaggaagcggaagcctgctgttgacaggatttgcgtgggcattcctcctggtgagtgctttgggctcctgggagttaatggggctggaaaatcatcaactttcaagatgttaacaggagataccactgttaccagaggagatgctttccttaacaaaaatagtatcttatcaaacatccatgaagtacatcagaacatgggctactgccctcagtttgatgccatcacagagctgttgactgggagagaacacgtggagttctttgcccttttgagaggagtcccagagaaagaagttggcaaggttggtgagtgggcgattcggaaactgggcctcgtgaagtatggagaaaaatatgctggtaactatagtggaggcaacaaacgcaagctctctacagccatggctttgatcggcgggcctcctgtggtgtttctggatgaacccaccacaggcatggatcccaaagcccggcggttcttgtggaattgtgccctaagtgttgtcaaggaggggagatcagtagtgcttacatctcatagtatggaagaatgtgaagctctttgcactaggatggcaatcatggtcaatggaaggttcaggtgccttggcagtgtccagcatctaaaaaataggtttggagatggttatacaatagttgtacgaatagcagggtccaacccggacctgaagcctgtccaggatttctttggacttgcatttcctggaagtgttctaaaagagaaacaccggaacatgctacaataccagcttccatcttcattatcttctctggccaggatattcagcatcctctcccagagcaaaaagcgactccacatagaagactactctgtttctcagacaacacttgaccaagtatttgtgaactttgccaaggaccaaagtgatgatgaccacttaaaagacctctcattacacaaaaaccagacagtagtggacgttgcagttctcacatcttttctacaggatgagaaagtgaaagaaagctatgtatgaagaatcctgttcatacggggtggctgaaagtaaagaggaactagactttcctttgcaccatgtgaagtgttgtggagaaaagagccagaagttgatgtgggaagaagtaaactggatactgtactgatactattcaatgcaatgcaattcaatgcaatgaaaacaaaattccattacaggggcagtgcctttgtagcctatgtcttgtatggctctcaagtgaaagacttgaatttagttttttacctatacctatgtgaaactctattatggaacccaatggacatatgggtttgaactcacacttttttttttttttttgttcctgtgtattctcattggggttgcaacaataattcatcaagtaatcatggccagcgattattgatcaaaatcaaaaggtaatgcacatcctcattcactaagccatgccatgcccaggagactggtttcccggtgacacatccattgctggcaatgagtgtgccagagttattagtgccaagtttttcagaaagtttgaagcaccatggtgtgtcatgctcacttttgtgaaagctgctctgctcagagtctatcaacattgaatatcagttgacagaatggtgccatgcgtggctaacatcctgctttgattccctctgataagctgttctggtggcagtaacatgcaacaaaaatgtgggtgtctccaggcacgggaaacttggttccattgttatattgtcctatgcttcgagccatgggtctacagggtcatccttatgagactcttaaatatacttagatcctggtaagaggcaaagaatcaacagccaaactgctggggctgcaagctgctgaagccagggcatgggattaaagagattgtgcgttcaaacctagggaagcctgtgcccatttgtcctgactgtctgctaacatggtacactgcatctcaagatgtttatctgacacaagtgtattatttctggctttttgaattaatctagaaaatgaaaagatggagttgtattttgacaaaaatgtttgtactttttaatgttatttggaattttaagttctatcagtgacttctgaatccttagaatggcctctttgtagaaccctgtggtatagaggagtatggccactgccccactatttttattttcttatgtaagtttgcatatcagtcatgactagtgcctagaaagcaatgtgatggtcaggatctcatgacattatatttgagtttctttcagatcatttaggatactcttaatctcacttcatcaatcaaatattttttgagtgtatgctgtagctgaaagagtatgtacgtacgtataagactagagagatattaagtctcagtacacttcctgtgccatgttattcagctcactggtttacaaatataggttgtcttgtggttgtaggagcccactgtaacaatactgggcagcctttttttttttttttttaattgcaacaatgcaaaagccaagaaagtataagggtcacaagtctaaacaatgaattcttcaacagggaaaacagctagcttgaaaacttgctgaaaaacacaacttgtgtttatggcatttagtaccttcaaataattggctttgcagatattggataccccattaaatctgacagtctcaaatttttcatctcttcaatcactagtcaagaaaaatataaaaacaacaaatacttccatatggagcatttttcagagttttctaacccagtcttatttttctagtcagtaaacatttgtaaaaatactgtttcactaatacttactgttaactgtcttgagagaaaagaaaaatatgagagaactattgtttggggaagttcaagtgatctttcaatatcattactaacttcttccactttttccagaatttgaatattaacgctaaaggtgtaagacttcagatttcaaattaatctttctatattttttaaatttacagaatattatataacccactgctgaaaaagaaaaaaatgattgttttagaagttaaagtcaatattgattttaaatataagtaatgaaggcatatttccaataactagtgatatggcatcgttgcattttacagtatcttcaaaaatacagaatttatagaataatttctcctcatttaatatttttcaaaatcaaagttatggtttcctcattttactaaaatcgtattctaattcttcattatagtaaatctatgagcaactccttacttcggttcctctgatttcaaggccatattttaaaaaatcaaaaggcactgtgaactattttgaagaaaacacaacattttaatacagattgaaaggacctcttctgaagctagaaacaatctatagttatacatcttcattaatactgtgttaccttttaaaatagtaattttttacattttcctgtgtaaacctaattgtggtagaaatttttaccaactctatactcaatcaagcaaaatttctgtatattccctgtggaatgtacctatgtgagtttcagaaattctcaaaatacgtgttcaaaaatttctgcttttgcatctttgggacacctcagaaaacttattaacaactgtgaatatgagaaatacagaagaaaataataagccctctatacataaatgcccagcacaattcattgttaaaaaacaaccaaacctcacactactgtatttcattatctgtactgaaagcaaatgctttgtgactattaaatgttgcacatcattcattcactgtatagtaatcattgactaaagccatttgtctgtgttttcttcttgtggttgtatatatcaggtaaaatattttccaaagagccatgtgtcatgtaatactgaaccactttgatattgagacattaatttgtacccttgttattatctactagtaataatgtaatactgtagaaatattgctctaattcttttcaaaattgttgcatcccccttagaatgtttctatttccataaggatttaggtatgctattatcccttcttataccctaagatgaagctgtttttgtgctctttgttcatcattggccctcattccaagcactttacgctgtctgtaatgggatctatttttgcactggaatatctgagaattgcaaaactagacaaaagtttcacaacagatttctaagttaaatcattttcattaaaaggaaaaaagaaaaaaaattttgtatgtcaataactttatatgaagtattaaaatgcatatttctatgttgtaatataatgagtcacaaaataaagctgtgacagttctgttggtctacagaaa

SEQ ID NO: 2896 - DNA, 1540 bp, Homo sapiens
  source 1..1540: mol_type = unassigned DNA
gtgagtggggccgggacccgcagagccgagccgacccttctctcccgggctgcggcagggcagggcggggagctccgcgcaccaacagagccggttctcagggcgctttgctccttgttttttccccggttctgttttctccccttctccggaaggcttgtcaaggggtaggagaaagagacgcaaacacaaaagtggaaaacagttaatgaccagccacggcgtccctgctgtgagctctggccgctgccttccagggctcccgagccacacgctgggggtgctggctgagggaacatggcttgttggcctcagctgaggttgctgctgtggaagaacctcactttcagaagaagacaaacatgtcagctgctgctggaagtggcctggcctctatttatcttcctgatcctgatctctgttcggctgagctacccaccctatgaacaacatgaatgccattttccaaataaagccatgccctctgcaggaacacttccttgggttcaggggattatctgtaatgccaacaacccctgtttccgttacccgactcctggggaggctcccggagttgttggaaactttaacaaatccattgtggctcgcctgttctcagatgctcggaggcttcttttatacagccagaaagacaccagcatgaaggacatgcgcaaagttctgagaacattacagcagatcaagaaatccagctcaaacttgaagcttcaagatttcctggtggacaatgaaaccttctctgggttcctgtatcacaacctctctctcccaaagtctactgtggacaagatgctgagggctgatgtcattctccacaaggtatttttgcaaggctaccagttacatttgacaagtctgtgcaatggatcaaaatcagaagagatgattcaacttggtgaccaagaagtttctgagctttgtggcctaccaagggagaaactggctgcagcagagcgagtacttcgttccaacatggacatcctgaagccaatcctgatggatgtgacatgtgatgacattgcacatgggcagttaactgtgccaagaagtgcagcagtagcagcaaccggagatgcaaagcccaacatgatggggagagaaactcttctttcaatatgtgcttctgtaccaaaagtggaatttcacgagagacatattttgaaacatttctccttttgtgtgtgcgtgagtgtttccctgtttccagccaagggtattgtgagtttctcctgggcctccttcagaatctgggtgctctggaaagcagtgttttggcaacatggggaaagtatggcagtgtgggagggtcagctgggtctgggtttgaatattgcatttgaatattttaccagcattgatgtcggataaattatttagtccctgtaagcctcagttttctcttcttctacatacacataatatatttgactctttgttgtgattattggttacacatatgaagagcctggtgtggggcctggcacacaataggtgctcaataaatagaagttgataattt

SEQ ID NO: 2897 - DNA, 6362 bp, Homo sapiens
  source 1..6362: mol_type = unassigned DNA
tagtagtactaacaacgttttataggagcacaattaattttacttaggataagtgttgttattattgtttttattgttgttctgttagttactcaaaacttcattctaattgtgccctgagtttgttaaaataccatactgtatttttgtgtaacatgtaaataggcattaatttttgagaaatagaaatgtttatccttaatgtatttttaatttgctaacattgattttttattttctttcctgaaatagcttatttcctaaaatgaaagaatttattctcagatgaataatttttatatcagctattcttatcagagcaataaacaaataccaatgatgcgctcagccaacaattcattacactctctgaagagtaactggacaaggagaaaaacatagggaaaaaaccaacagaatttgttggcatgttctacacacagaccatggcttttcagaagccaagctgaatcaaaacagttttaaaagaggcaaccatttgtagaggagtccttgaaggattcttcattgttttcttggacaaaaagagaccagtggatccaagtgcttcaaatacttctctcttattttcttaactctattgctctgcaatatttactttaccctgttaatgaacaggacaaaatggttaaaaaagagataagcgtgcgtcaacaaattcaggctcttctgtacaagaattttcttaaaaaatggagaataaaaagagagtttattggaatggacaataacattgtttctagggctatatttgtgcatcttttcggaacacttcagagctacccgttttcctgaacaacctcctaaagtcctgggaagcgtggatcagtttaatgactctggcctggtagtggcatatacaccagtcagtaacataacacaaaggataatgaataagatggccttggcttcctttatgaaaggaagaacagtcattgggacaccagatgaagagaccatggatatagaacttccaaaaaaataccatgaaatggtgggagttatatttagtgatactttctcatatcgcctgaagtttaattggggatatagaatcccagttataaaggagcactctgaatacacagaacactgttgggccatgcatggtgaaattttttgttacttggcaaagtactggctaaaagggtttgtagcttttcaagctgcaattaatgctgcaattatagaagtcacaacaaatcattctgtaatggaggagttgacatcagttattggaataaatatgaagataccacctttcatttctaagggagaaattatgaatgaatggtttcattttacttgcttagtttctttctcttcttttatatactttgcatcattaaatgttgcaagggaaagaggaaaatttaagaaactgatgacagtgatgggtctccgagagtcagcattctggctctcctggggattgacatacatttgcttcatcttcattatgtccatttttatggctctggtcataacatcaatcccaattgtatttcatactggcttcatggtgatattcacactctatagcttatatggcctttctttgatagcattggctttcctcatgagtgttttaataaggaaacctatgctcgctggtttggctggatttctcttcactgtattttggggatgtctgggattcactgtgttatatagacaacttcctttatctttgggatgggtattaagtcttcttagcccttttgccttcactgctggaatggcccagattacacacctggataattacttaagtggtgttatttttcctgatccctctggggattcatacaaaatgatagccacttttttcattttggcatttgatactcttttctatttgatattcacattatattttgagcgagttttacctgataaagatggccatggggattctccattatttttccttaagtcctcattttggtccaaacatcaaaatactcatcatgaaatctttgagaatgaaataaatcctgagcattcctctgatgattcttttgaaccggtgtctccagaattccatggaaaagaagccataagaatcagaaatgttataaaagaatataatggaaagactggaaaagtagaagcattgcaaggcatattttttgacatatatgaaggacagatcactgcaatacttgggcataatggagctggtaaatcaacactgctaaacattcttagtggattgtctgtttctacagaaggatcagccactatttataatactcaactctctgaaataactgacatggaagaaattagaaagaatattggattttgtccacagttcaattttcaatttgacttcctcactgtgagagaaaacctcagggtatttgctaaaataaaagggattcagccaaaggaagtggaacaagaggtaaaaagaattataatggaattagacatgcaaagcattcaagacattattgctaaaaaattaagtggtgggcagaagagaaaactaacactagggattgccatcttaggagatcctcaggttttgctgctagatgaaccaactgctggattggatcccttttcaagacaccgagtgtggagcctcctgaaggagcataaagtagaccgacttatcctcttcagtacccaattcatggatgaggctgacatcttggctgataggaaagtatttctgtctaatgggaagttgaaatgtgcaggatcatctttgtttctgaagcgaaagtggggtattggatatcatttaagtttacacaggaatgaaatgtgtgacacagaaaaaatcacatcccttattaagcagcacattcctgatgccaagttaacaacagaaagtgaagaaaaacttgtatatagtttgcctttggaaaaaacgaacaaatttccagatctttacagtgaccttgataagtgttctgaccagggcataaggaattatgctgtttcagtgacatctctgaatgaagtattcttgaacctagaaggaaaatcagcaattgatgaaccagattttgacattgggaaacaagagaaaatacatgtgacaagaaatactggagatgagtctgaaatggaacaggttctttgttctcttcctgaaacaagaaaggctgtcagtagtgcagctctctggagacgacaaatctatgcagtggcaacacttcgcttcttaaagttaaggcgtgaaaggagagctcttttgtgtttgttactagtacttggaattgcttttatccccatcattctagagaagataatgtataaagtaactcgtgaaactcattgttgggagttttcacccagtatgtatttcctttctctggaacaaatcccgaagacgcctcttaccagcctgttaatcgttaataatacaggatcaaatattgaagacctcgtgcattcactgaagtgtcaggatatagttttggaaatagatgactttagaaacagaaatggctcagatgatccctcctacaatggagccatcatagtgtctggtgaccagaaggattacagattttctgttgcgtgtaataccaagaaattgaattgttttcctgttcttatgggaattgttagcaatgcccttatgggaatttttaacttcacggagcttattcaaatggagagcacttcattttctcgtgatgacatagtgctggatcttggttttatagatgggtccatatttttgttgttgatcacaaactgcgtttctccttttatcggcatgagcagcatcagcgattataaaaaaaatgttcaatcccagttatggatttcaggcctctggccttcagcatactggtgtggacaggctctggtggacattccattatacttcttgattctcttttcaatacatttaatttactacttcatatttctgggattccagctttcatgggaactcatgtttgttttggtggtatgcataattggttgtgcagtttctcttatattcctcacatatgtgctttcattcatctttcgcaagtggagaaaaaataatggcttttggtcttttggcttttttattatcttaatatgtgtatccacaattatggtatcaactcaatatgaaaaactcaacttaattttgtgcatgattttcataccttccttcactttgctggggtatgtcatgttattgatccagctcgactttatgagaaacttggacagtctggacaatagaataaatgaagtcaataaaaccattcttttaacaaccttaataccataccttcagagtgttattttcctttttgtcataaggtgtctggaaatgaagtatggaaatgaaataatgaataaagacccagttttcagaatctctccacggagtagagaaactcatcccaatccggaagagcccgaagaagaagatgaagatgttcaagctgaaagagtccaagcagcaaatgcactcactgctccaaacttggaggaggaaccagtcataactgcaagctgtttacacaaggaatattatgagacaaagaaaagttgcttttcaacaagaaagaagaaaatagccatcagaaatgtttccttttgtgttaaaaaaggtgaagttttgggattactaggacacaatggagctggtaaaagtacttccattaaaatgataactgggtgcacaaagccaactgcaggagtggtggtgttacaaggcagcagagcatcagtaaggcaacagcatgacaacagcctcaagttcttggggtactgccctcaggagaactcactgtggcccaagcttacaatgaaagagcacttggagttgtatgcagctgtgaaaggactgggcaaagaagatgctgctctcagtatttcacgattggtggaagctcttaagctccaggaacaacttaaggctcctgtgaaaactctatcagagggaataaagagaaagctgtgctttgtgctgagcatcctggggaacccatcagtggtgcttctagatgagccgttcaccgggatggaccccgaggggcagcagcaaatgtggcagatacttcaggctaccgttaaaaacaaggagaggggcaccctcttgaccacccattacatgtcagaggctgaggctgtgtgtgaccgtatggccatgatggtgtcaggaacgctaaggtgtattggttccattcaacatctgaaaaacaagtttggtagagattatttactagaaataaaaatgaaagaacctacccaggtggaagctctccacacagagattttgaagcttttcccacaggctgcttggcaggaaagatattcctctttaatggcgtataagttacctgtggaggatgtccaccctctatctcgggcctttttcaagttagaggcgatgaaacagaccttcaacctggaggaatacagcctctctcaggctaccttggagcaggtattcttagaactctgtaaagagcaggagctgggaaatgttgatgataaaattgatacaacagttgaatggaaacttctcccacaggaagacccttaaaatgaagaacctcctaacattcaattttaggtcctactacattgttagtttccataattctacaagaatgtttccttttacttcagttaacaaaagaaaacatttaataaacattcaataatgattacagttttcatttttaaaaatttaggatgaaggaaacaaggaaatatagggaaaagtagtagacaaaattaacaaaatcagacatgttattcatccccaacatgggtctattttgtgcttaaaaataatttaaaaatcatacaatattaggttggttatcggttattatcaataaagctaacactgagaacattttacaaataaaaatatgaggtttttagcctgaacttcaaatgtatcagctatttttaaacattatttactcggattctaatttaatgtgacattgactataagaaggtctgataaactgatgaaatggcacagcataacatttaattataatgacattctgattataaaataaatgcatgtgaattttagtacatattgaagttatatggaagaagatagccataatctgtaagaaagtaccgcagttaatattttctttagccaacttatattcaatgtattttttatggatcctttttcaaaggtagtatcagtaggcatagtcattttctgtatcttttcacctcacagttcatgaacatttcccatgtcattatagcacttttgtgttatataattgctgcattaatgttatagctgtattgatgtaataccagagttgttacgttcgggttatatgcaagtttatttcttagaaataaaactttgatggactttt

SEQ ID NO: 2898 - DNA, 6155 bp, Homo sapiens
  source 1..6155: mol_type = unassigned DNA
aattaattttacttaggataagtgttgttattattgtttttattgttgttctgttagttactcaaaacttcattctaattgtgccctgagtttgttaaaataccatactgtatttttgtgtaacatgtaaataggcattaatttttgagaaatagaaatgtttatccttaatgtatttttaatttgctaacattgattttttattttctttcctgaaatagcttatttcctaaaatgaaagaatttattctcagatgaataatttttatatcagctattcttatcagagcaataaacaaataccaatgatgcgctcagccaacaattcattacactctctgaagagtaactggacaaggagaaaaacatagggaaaaaaccaacagaatttgttggcatgttctacacacagaccatggcttttcagaagccaagctgaatcaaaacagttttaaaagaggcaaccatttgtagaggagtccttgaaggattcttcattgttttcttggacaaaaagagaccagtggatccaagtgcttcaaatacttctctcttattttcttaactctattgctctgcaatatttactttaccctgttaatgaacaggacaaaatggttaaaaaagagataagcgtgcgtcaacaaattcaggctcttctgtacaagaattttcttaaaaaatggagaataaaaagagagtttattggaatggacaataacattgtttctagggctatatttgtgcatcttttcggaacacttcagagctacccgttttcctgaacaacctcctaaagtcctgggaagcgtggatcagtttaatgactctggcctggtagtggcatatacaccagtcagtaacataacacaaaggataatgaataagatggccttggcttcctttatgaaaggaagaacagtcattgggacaccagatgaagagaccatggatatagaacttccaaaaaaataccatgaaatggtgggagttatatttagtgatactttctcatatcgcctgaagtttaattggggatatagaatcccagttataaaggagcactctgaatacacagaacactgttgggccatgcatggtgaaattttttgttacttggcaaagtactggctaaaagggtttgtagcttttcaagctgcaattaatgctgcaattatagaagtcacaacaaatcattctgtaatggaggagttgacatcagttattggaataaatatgaagataccacctttcatttctaagggagaaattatgaatgaatggtttcattttacttgcttagtttctttctcttcttttatatactttgcatcattaaatgttgcaagggaaagaggaaaatttaagaaactgatgacagtgatgggtctccgagagtcagcattctggctctcctggggattgacatacatttgcttcatcttcattatgtccatttttatggctctggtcataacatcaatcccaattgtatttcatactggcttcatggtgatattcacactctatagcttatatggcctttctttgatagcattggctttcctcatgagtgttttaataaggaaacctatgctcgctggtttggctggatttctcttcactgtattttggggatgtctgggattcactgtgttatatagacaacttcctttatctttgggatgggtattaagtcttcttagcccttttgccttcactgctggaatggcccagattacacacctggataattacttaagtggtgttatttttcctgatccctctggggattcatacaaaatgatagccacttttttcattttggcatttgatactcttttctatttgatattcacattatattttgagcgagttttacctgataaagatggccatggggattctccattatttttccttaagtcctcattttggtccaaacatcaaaatactcatcatgaaatctttgagaatgaaataaatcctgagcattcctctgatgattcttttgaaccggtgtctccagaattccatggaaaagaagccataagaatcagaaatgttataaaagaatataatggaaagactggaaaagtagaagcattgcaaggcatattttttgacatatatgaaggacagatcactgcaatacttgggcataatggagctggtaaatcaacactgctaaacattcttagtggattgtctgtttctacagaaggtaaaaagaattataatggaattagacatgcaaagcattcaagacattattgctaaaaaattaagtggtgggcagaagagaaaactaacactagggattgccatcttaggagatcctcaggttttgctgctagatgaaccaactgctggattggatcccttttcaagacaccgagtgtggagcctcctgaaggagcataaagtagaccgacttatcctcttcagtacccaattcatggatgaggctgacatcttggctgataggaaagtatttctgtctaatgggaagttgaaatgtgcaggatcatctttgtttctgaagcgaaagtggggtattggatatcatttaagtttacacaggaatgaaatgtgtgacacagaaaaaatcacatcccttattaagcagcacattcctgatgccaagttaacaacagaaagtgaagaaaaacttgtatatagtttgcctttggaaaaaacgaacaaatttccagatctttacagtgaccttgataagtgttctgaccagggcataaggaattatgctgtttcagtgacatctctgaatgaagtattcttgaacctagaaggaaaatcagcaattgatgaaccagattttgacattgggaaacaagagaaaatacatgtgacaagaaatactggagatgagtctgaaatggaacaggttctttgttctcttcctgaaacaagaaaggctgtcagtagtgcagctctctggagacgacaaatctatgcagtggcaacacttcgcttcttaaagttaaggcgtgaaaggagagctcttttgtgtttgttactagtacttggaattgcttttatccccatcattctagagaagataatgtataaagtaactcgtgaaactcattgttgggagttttcacccagtatgtatttcctttctctggaacaaatcccgaagacgcctcttaccagcctgttaatcgttaataatacaggatcaaatattgaagacctcgtgcattcactgaagtgtcaggatatagttttggaaatagatgactttagaaacagaaatggctcagatgatccctcctacaatggagccatcatagtgtctggtgaccagaaggattacagattttctgttgcgtgtaataccaagaaattgaattgttttcctgttcttatgggaattgttagcaatgcccttatgggaatttttaacttcacggagcttattcaaatggagagcacttcattttctcgtgatgacatagtgctggatcttggttttatagatgggtccatatttttgttgttgatcacaaactgcgtttctccttttatcggcatgagcagcatcagcgattataaaaaaaatgttcaatcccagttatggatttcaggcctctggccttcagcatactggtgtggacaggctctggtggacattccattatacttcttgattctcttttcaatacatttaatttactacttcatatttctgggattccagctttcatgggaactcatgtttgttttggtggtatgcataattggttgtgcagtttctcttatattcctcacatatgtgctttcattcatctttcgcaagtggagaaaaaataatggcttttggtcttttggcttttttattatcttaatatgtgtatccacaattatggtatcaactcaatatgaaaaactcaacttaattttgtgcatgattttcataccttccttcactttgctggggtatgtcatgttattgatccagctcgactttatgagaaacttggacagtctggacaatagaataaatgaagtcaataaaaccattcttttaacaaccttaataccataccttcagagtgttattttcctttttgtcataaggtgtctggaaatgaagtatggaaatgaaataatgaataaagacccagttttcagaatctctccacggagtagagaaactcatcccaatccggaagagcccgaagaagaagatgaagatgttcaagctgaaagagtccaagcagcaaatgcactcactgctccaaacttggaggaggaaccagtcataactgcaagctgtttacacaaggaatattatgagacaaagaaaagttgcttttcaacaagaaagaagaaaatagccatcagaaatgtttccttttgtgttaaaaaaggtgaagttttgggattactaggacacaatggagctggtaaaagtacttccattaaaatgataactgggtgcacaaagccaactgcaggagtggtggtgttacaaggcagcagagcatcagtaaggcaacagcatgacaacagcctcaagttcttggggtactgccctcaggagaactcactgtggcccaagcttacaatgaaagagcacttggagttgtatgcagctgtgaaaggactgggcaaagaagatgctgctctcagtatttcacgattggtggaagctcttaagctccaggaacaacttaaggctcctgtgaaaactctatcagagggaataaagagaaagctgtgctttgtgctgagcatcctggggaacccatcagtggtgcttctagatgagccgttcaccgggatggaccccgaggggcagcagcaaatgtggcagatacttcaggctaccgttaaaaacaaggagaggggcaccctcttgaccacccattacatgtcagaggctgaggctgtgtgtgaccgtatggccatgatggtgtcaggaacgctaaggtgtattggttccattcaacatctgaaaaacaagtttggtagagattatttactagaaataaaaatgaaagaacctacccaggtggaagctctccacacagagattttgaagcttttcccacaggctgcttggcaggaaagatattcctctttaatggcgtataagttacctgtggaggatgtccaccctctatctcgggcctttttcaagttagaggcgatgaaacagaccttcaacctggaggaatacagcctctctcaggctaccttggagcaggtattcttagaactctgtaaagagcaggagctgggaaatgttgatgataaaattgatacaacagttgaatggaaacttctcccacaggaagacccttaaaatgaagaacctcctaacattcaattttaggtcctactacattgttagtttccataattctacaagaatgtttccttttacttcagttaacaaaagaaaacatttaataaacattcaataatgattacagttttcatttttaaaaatttaggatgaaggaaacaaggaaatatagggaaaagtagtagacaaaattaacaaaatcagacatgttattcatccccaacatgggtctattttgtgcttaaaaataatttaaaaatcatacaatattaggttggttatcggttattatcaataaagctaacactgagaacattttacaaataaaaatatgaggtttttagcctgaacttcaaatgtatcagctatttttaaacattatttactcggattctaatttaatgtgacattgactataagaaggtctgataaactgatgaaatggcacagcataacatttaattataatgacattctgattataaaataaatgcatgtgaattttagtacatattgaagttatatggaagaagatagccataatctgtaagaaagtaccgcagttaatattttctttagccaacttatattcaatgtattttttatggatcctttttcaaaggtagtatcagtaggcatagtcattttctgtatcttttcacctcacagttcatgaacatttcccatgtcattatagcacttttgtgttatataattgctgcattaatgttatagctgtattgatgtaataccagagttgttacgttcgggttatatgcaagtttatttcttagaaataaaactttgatggactttt

SEQ ID NO: 2899 - DNA, 688 bp, Homo sapiens
  source 1..688: mol_type = unassigned DNA
gtagaggagtccttgaaggattcttcattgttttcttggacaaaaagagaccagtggatccaagtgcttcaaatacttctctcttattttcttaactctattgctctgcaatatttactttaccctgttaatgaacaggacaaaatggttaaaaaagagataagcgtgcgtcaacaaattcaggctcttctgtacaagaattttcttaaaaaatggagaataaaaagagagtttattggaatggacaataacattgtttctagggctatatttgtgcatcttttcggaacacttcagagctacccgttttcctgaacaacctcctaaagtcctgggaagcgtggatcagtttaatgactctggcctggtagtggcatatacaccagtcagtaacataacacaaaggataatgaataagatggccttggcttcctttatgaaaggaagaacagtcattgggacaccagatgaagagaccatggatatagaacttccaaaaaaataccatgaaatggtgggagttatatttagtgatactttctcatatcgcctgaagtttaattggggatatagaatcccagttataaaggagcactctgaatacacaggtcacaacaaatcattctgtaatggaggagttgacatcagttattggaataaatatgaagataccacctttcatttctaa

SEQ ID NO: 2900 - DNA, 2238 bp, Homo sapiens
  source 1..2238: mol_type = unassigned DNA
aattaattttacttaggataagtgttgttattattgtttttattgttgttctgttagttactcaaaacttcattctaattgtgccctgagtttgttaaaataccatactgtatttttgtgtaacatgtaaataggcattaatttttgagaaatagaaatgtttatccttaatgtatttttaatttgctaacattgattttttattttctttcctgaaatagcttatttcctaaaatgaaagaatttattctcagatgaataatttttatatcagctattcttatcagagcaataaacaaataccaatgatgcgctcagccaacaattcattacactctctgaagagtaactggacaaggagaaaaacatagggaaaaaaccaacagaatttgttggcatgttctacacacagaccatggcttttcagaagccaagctgaatcaaaacagttttaaaagaggcaaccatttgtagaggagtccttgaaggattcttcattgttttcttggacaaaaagagaccagtggatccaagtgcttcaaatacttctctcttattttcttaactctattgctctgcaatatttactttaccctgttaatgaacaggacaaaatggttaaaaaagagataagcgtgcgtcaacaaattcaggctcttctgtacaagaattttcttaaaaaatggagaataaaaagagagtttattggaatggacaataacattgtttctagggctatatttgtgcatcttttcggaacacttcagagctacccgttttcctgaacaacctcctaaagtcctgggaagcgtggatcagtttaatgactctggcctggtagtggcatatacaccagtcagtaacataacacaaaggataatgaataagatggccttggcttcctttatgaaaggaagaacagtcattgggacaccagatgaagagaccatggatatagaacttccaaaaaaataccatgaaatggtgggagttatatttagtgatactttctcatatcgcctgaagtttaattggggatatagaatcccagttataaaggagcactctgaatacacagaacactgttgggccatgcatggtgaaattttttgttacttggcaaagtactggctaaaagggtttgtagcttttcaagctgcaattaatgctgcaattatagaagtcacaacaaatcattctgtaatggaggagttgacatcagttattggaataaatatgaagataccacctttcatttctaagggagaaattatgaatgaatggtttcattttacttgcttagtttctttctcttcttttatatactttgcatcattaaatgttgcaagggaaagaggaaaatttaagaaactgatgacagtgatgggtctccgagagtcagcattctggctctcctggggattgacatacatttgcttcatcttcattatgtccatttttatggctctggtcataacatcaatcccaattgtatttcatactggcttcatggtgatattcacactctatagcttatatggcctttctttgatagcattggctttcctcatgagtgttttaataaggaaacctatgctcgctggtttggctggatttctcttcactgtattttggggatgtctgggattcactgtgttatatagacaacttcctttatctttgggatgggtattaagtcttcttagcccttttgccttcactgctggaatggcccagattacacacctggataattacttaagtggtgttatttttcctgatccctctggggattcatacaaaatgatagccacttttttcattttggcatttgatactcttttctatttgatattcacattatattttgagcgagttttacctgataaagatggccatggggattctccattatttttccttaagtcctcattttggtccaaacatcaaaatactcatcatgaaatctttgagaatgaaataaatcctgagcattcctctgatgattcttttgaaccggtgtctccagaattccatggaaaagaagccataagaatcagaaatgttataaaagaatataatggaaagactggaaaagtagaagcattgcaaggaagtgaggagcgtctctgccccgccgcccatcgtctgagatgtggggagcgcctctgccccgccgcccatcatctgggatgtgaggagcgcccctgcccggccgcgaccccgtctgggaactga

SEQ ID NO: 2901 - DNA, 9100 bp, Homo sapiens
  source 1..9100: mol_type = unassigned DNA
gaagagttgattgagaagtgcctcttggttaaggattaaccacagggaaaaatccagcagaaacagaagaactgtgggtttcttaccccagccctcaaggaagctatgccgtgaaaggggtactgatacactgacatacagcaagttggacggggcatcagttcttcatttgtggagtggagaaaagaagaggaaatctctcatttggggcatttgaaggatggcttccctgtttcatcagcttcagatcctggtctggaaaaattggctaggtgtaaaaaggcagccgctttggacacttgtcttgatcttatggccagtcattattttcataattttggctattactcggaccaaatttcctccaactgcaaaaccaacttgttacctcgcacctcgaaaccttcctagtactggattctttccattcctgcagaccctactctgtgacacagactctaaatgcaaagacacaccctatggcccacaagatctgcttcgtaggaaaggaattgatgatgcactatttaaagacagtgagattctgagaaagtcatccaacctggataaggacagcagtttatcattccagagcacccaagttccagaaagaaggcatgcatcactagccacagtatttcccagtccaagttctgatttggaaatccccggaacatatactttcaatggcagtcaagtgctcgcacgaattcttggcttggaaaagctgttaaagcaaaattcaacttcagaagatatacgaagagaactatgtgacagctattcaggatacattgtggatgatgccttctcttggacctttctaggaagaaatgtttttaacaaattttgcctttctaacatgacccttttagagtcttctctccaagaactaaacaaacagttctcccagctatccagtgaccccaacaatcagaagatagtgtttcaggaaatagtcagaatgctgtctttcttctcacaagtgcaagagcagaaagctgtgtggcagcttctgtctagttttccaaatgtgtttcagaatgacacatcactaagcaatctatttgatgttcttcgaaaggcaaacagtgtgctgctggttgtgcagaaggtttatccacgttttgcaactaacgaaggtttcagaaccctccagaagtctgttaaacatctgctgtacactctggactccccagctcaaggtgactccgataatataacgcatgtgtggaatgaggatgatggacagaccttatctccaagcagtctggctgcacagctcctaattctggaaaactttgaagatgccctcttaaatatatcagcaaatagtccttatattccttacttggcatgtgtgagaaatgtgactgacagtttggccagaggttcaccagaaaatctaagactcctgcagtccacaatacgatttaaaaaatcttttcttcgcaatggttcctatgaagattactttcctccagttcctgaagtcctaaaatcaaaactgtctcaacttcgaaacttgaccgaacttctttgtgaatctgaaactttcagtttgatagagaagtcatgccagctctctgatatgagctttgggagcctgtgtgaagaaagtgagtttgatctgcaactcctcgaagcggcagagctgggcaccgaaatagcagccagcttactgtaccatgacaatgtcatatctaaaaaagtgagagatttgctgactggagatccaagcaaaattaatttaaatatggatcagtttctagaacaggcactgcaaatgaattacttggaaaatatcactcagttaataccgatcatagaagccatgctgcatgtcaataacagtgcagatgcttctgaaaagccaggtcagttactagaaatgtttaaaaatgttgaagagctgaaagaagatttaaggagaacaacaggaatgtccaacaggactattgacaagttgctggccattcccatccctgataatagagctgagattatttctcaggtgttctggctgcattcctgtgatactaatatcaccactcccaaactagaagatgcaatgaaagaattctgcaacctgtctctttcagagagatcccggcagtcttacctcatcggactcacccttctgcactacttaaacatttacaacttcacatacaaggtgtttttcccgaggaaagatcaaaagccagtagaaaagatgatggagctcttcataagactaaaagagattctcaatcagatggcttctggcacacatccgctgctagacaaaatgagatccctgaagcaaatgcatctgcccagaagtgttccattaacacaggcaatgtacagaagcaaccgaatgaacacaccacaaggatcatttagcaccatctcccaagcattatgttctcaaggaattaccactgaatatttaactgccatgctgccctcttcccagaggccaaaaggcaaccacaccaaggattttttgacttataaattaactaaagagcaaattgcttcaaaatatggaattcccataaattccacaccattttgcttctccctttataaagacatcattaacatgcccgctggacctgtgatttgggctttcttgaaacctatgttgttgggaagaattttgtatgcaccatataacccagtcacaaaggcaataatggaaaagtccaatgtaactctgagacagctggcggaattaagagaaaaatctcaagagtggatggataagtcgccacttttcatgaattccttccatctgttaaaccaggcaattccaatgctccagaatactctaaggaacccttttgtgcaagtttttgtaaagttctccgtgggactcgatgctgttgaactattgaaacagatagatgaactcgatattctaagactgaaattagagaacaacattgacatcatcgatcagcttaacacactatcttccctgacagtaaatatttcctcttgtgtattatatgaccgtattcaggcagcaaaaaccatagatgaaatggagagagaggctaaaaggctctacaaaagcaacgaactctttggaagtgttatttttaagcttccttctaacagaagctggcacagaggctatgactctggaaatgtctttcttcctcctgtcataaaatataccatccggatgagtctcaagaccgcacagaccacaagaagcctaagaaccaagatttgggctccagggccacacaattctccatcacacaaccagatctatggcagggcttttatttatttacaggatagtattgaaagagcaatcattgaattgcaaactggaaggaactcccaggaaatagcagtccaggttcaagcaattccttatccctgcttcatgaaagacaacttcctaaccagtgtctcttattctcttccaattgtgcttatggttgcctgggttgtatttatagctgcctttgtaaaaaagcttgtctatgagaaagacctccggcttcatgagtacatgaagatgatgggtgtgaactcctgcagccatttctttgcctggcttatagagagtgttggatttttactggttaccatcgtgatcctcatcattatactcaagtttggcaatattcttcctaaaacaaatgggttcattttgttcctgtatttttcggactacagcttctcggttattgccatgagctatcttatcagtgtcttcttcaacaacaccaacattgcagctctgatcggaagcctcatctacatcattgccttctttccatttattgttctggttacagtggagaatgagttgagctatgtattgaaagtgttcatgagcctgctgtccccaacagcattcagctatgcaagccaatacattgcacgatacgaagaacagggcattggtcttcagtgggaaaatatgtacacctccccggttcaggatgacaccacctcatttggctggctgtgctgtctaatcctagctgactctttcatttatttccttattgcttggtatgtcaggaatgtcttcccagggacatacggtatggcagctccctggtattttccaattcttccttcctattggaaggagcgatttgggtgtgcagaggtgaagcctgagaagagcaatggcctcatgtttactaacatcatgatgcagaacaccaacccatctgccagtcctgaatacatgttttcctctaacatcgagcctgaacctaaagatctcacagtcggggttgccctgcatggggtcacaaagatctatggctcaaaagttgctgttgataacctcaatctgaacttttatgaagggcatattacttcattgctggggcccaatggagctgggaaaactactaccatttccatgttaactgggctgtttggggcctcagcaggcaccatttttgtatatggaaaagatatcaaaacagacctacacacggtacggaagaacatgggagtctgtatgcagcacgacgtcttgttcagttacctcactactaaggagcaccttctcctatatggttccatcaaagttcctcactggactaaaaagcagctccacgaggaagtaaaaaggactttaaaagatactggactatatagccatcgtcataagagagttggaacactgtcaggaggcatgaagaggaagttatctatatccatagctctcattggtggatcaagggtagtaattttggatgaaccatctactggagttgacccatgttctcgccgaagtatatgggatgttatatccaagaacaaaactgccagaacaatcattctgtcaacgcaccacttggacgaggctgaagtgctgagtgaccgcatcgccttcctggagcagggtgggcttaggtgctgtgggtccccattttacctcaaggaagcctttggcgatgggtatcacctcacgcttaccaagaagaagagtccaaatttaaatgcaaatgcagtatgtgacaccatggccgtgacagcaatgatccaatcacatctccccgaagcctacctcaaggaggatattgggggagagcttgtttatgtacttcctccattcagcaccaaagtctcaggggcctacctgtcactcctacgggcactcgacaatggcatgggtgacctcaacatcgggtgctacggcatttcagataccaccgtggaggaggtctttctgaacttgaccaaagagtcacaaaaaaatagtgctatgagtcttgagcacttaacacaaaagaaaattgggaattccaatgccaatggcatctcaactcctgacgatttatctgtgagcagcagcaatttcacagacagagatgacaaaatcctgacaagaggagagaggctggatggctttggactgttgctgaagaagatcatggctatactcatcaagaggttccaccacacccgcaggaactggaaaggtctcattgctcaggttatcctccccatcgtctttgttaccactgccatgggccttggcacactgagaaattccagcaacagttatccagagattcagatctccccctctctttatggtacctccgaacagacagccttctatgctaattatcacccgagcacggaagcacttgtctcagcaatgtgggacttccctggaattgacaacatgtgtctgaacaccagtgatctacagtgtttaaacaaagacagtctggaaaaatggaacaccagtggagaacccatcactaattttggtgtttgctcctgctcagaaaatgtccaggaatgtcctaaatttaactattccccaccgcacagaagaacttactcatcccaggtaatttataacctcactgggcaacgagtggaaaattatcttatatcaactgcaaatgagtttgtccaaaaaagatatggaggttggagttttgggctgcctttgacaaaagaccttcgttttgatataacaggagtccctgccaatagaacacttgccaaggtatggtatgatccagaaggctatcactcccttccagcttacctcaacagcctgaataatttccttctgcgagttaacatgtcaaaatacgatgctgcccgacatggcatcatcatgtatagccatccttatccaggagtgcaagaccaagaacaagccacaatcagcagtttaatcgatattttagtggcactgtctatcttgatgggctactctgtcaccaccgccagctttgtcacctatgttgtaagggaacatcaaaccaaagccaaacagttgcagcacatttcaggcattggcgtgacatgctactgggtaacaaacttcatttatgacatggttttctacttggtgcctgtagcgttttcaattggtatcattgcgattttcaaattacctgcattctacagtgaaaacaacctaggcgctgtatctctcctacttctcctgtttgggtatgcaacattttcctggatgtacttgctggctgggctcttccatgaaacaggaatggccttcatcacttacgtctgtgtcaacttgttttttggcattaattccattgtttccctgtcagtggtatactttctttccaaggaaaagcctaatgatccgactttagaacttatttctgaaaccctcaagcgcattttcctgattttcccacaattctgttttggctacggtttgattgaactttctcaacaacagtcggtcctagacttcttaaaagcatatggagtggaatacccaaatgaaacctttgagatgaataaactaggtgcaatgtttgtggctttggtttctcagggcaccatgtttttttccttgcgactcttaatcaacgaatccctgataaagaaactcaggcttttcttcagaaaatttaattcttcacatgtaagggagacaatagatgaggatgaagatgtgcgggctgagagattaagagttgagagtggtgcagctgaatttgacttggtccaactttattgtctcacaaagacctaccaacttatccacaaaaagattatagctgtaaacaacatcagcattgggatacctgctggagagtgttttgggcttcttggagtgaatggagcaggaaagaccactatattcaagatgctgacaggagacatcattccttcaagtggaaacattctgatcagaaataagaccggatctctgggtcacgttgattctcacagctcattagttggctactgtcctcaggaagatgccttagatgacctggtaactgtggaagaacatttgtatttctatgccagggtacatggaattccagaaaaggatattaaagaaactgttcataaactccttaggagacttcacctgatgcccttcaaggacagagctacctctatgtgcagttatggcacaaaaagaaaattatccactgcactggccttgatagggaaaccttccattctactgctggatgagccgagctctggcatggatccgaagtcgaaacggcacctctggaagatcatttcagaagaagtacagaacaaatgttccgtcatcctcacatctcacagcatggaagaatgtgaagctctctgtaccaggttggccattatggtgaatggaaagtttcaatgtattggatctttgcagcacataaagagcaggtttggacgaggatttactgtcaaagttcacttgaagaataacaaagtgaccatggagaccctcacaaagttcatgcagctgcactttccaaaaacatacttaaaagatcagcacctcagcatgctagagtatcatgtaccagtcacagcaggaggagtcgcaaacatttttgatctgctggaaaccaacaagactgctttaaatattacaaatttcttagtgagtcagaccactctggaagaggttttcatcaactttgccaaagaccagaagtcctatgaaactgctgataccagcagccaaggttccactataagtgttgactcacaagatgaccagatggagtcttaacacttccagcaaactcaatctcagcgtgtgaccaatggcttcattttgaagaaaagccacagaagatacacttccgcaagatatcttcattttaaagtaaagtaatatactgtatggaaagttacaactgtgttagactaacaagtaattataaaaggaaatttttccttctaaggtcagtgagtgttgttgctactgaaatgaattcctgtatactcaacactgtgagcatgctaatgtatatgctggtgattcttatgcaaaggtgaagccacctcaagatgaatatcttaatttattactttcaataaaaagacagtttaaaaggcatggattttggtagttgaaatataagagtggagaagaaaagtcagatggtttgtggcaggtgccaccgggcaagcagacaacataatttatttccagaaaacaacagaatgaacatcatcatgaatacatgaatcggctgtgatgtgtgaactgctaagggccaaatgaacgtttgcagagcagtgggcacaatgtttacaatgtatgtgtatgtcactttcggtacctgtgaatgcatggggacgtgctgaacccgaaaaaaagtgcctttccataaggactgcaatagagagggcaatttaccctggtggtacacggaacctagattcactcctgccatgccttgccaatagtaagctgcagggtggaacaagaaatcacttgctctggggggaagggaggggggaatgggtgtgtcagctgggtagatacaaaccctgaaaagagaatccatgtgctactggcaggcaacattttttaaagctctttcagaaaccctcatatttggggtttcttttcaggaaacattcctgtggagggaaaacgaatatgaagataattttcagctaattatctgggtgacccagaatcgtgtatatggctataggatagacttcttaataatggcaagtgacgtggccctggggaaaggtgctttatgtaccgtgtgtgcgtgtatgtgtgtgtatctatacaagtttgtcagctttggcatgactgtttgtctcgaaaaccaataaactcaaagtttagaaaaactca

SEQ ID NO: 2902 - DNA, 7005 bp, Homo sapiens
  source 1..7005: mol_type = unassigned DNA
atttcctataaatatcacaaatatttccaacaaaagagcatagatgtcttttatacaattcttttgagaatgattctgcagatttctgcattttctcctcattaatttgacctgggatggttttcactgaggaaaaaaatctttaagcaaacatgttaaatgtttacctatataaaaattattacttcaggtgactccgataatataacgcatgtgtggaatgaggatgatggacagaccttatctccaagcagtctggctgcacagctcctaattctggaaaactttgaagatgccctcttaaatatatcagcaaatagtccttatattccttacttggcatgtgtgagaaatgtgactgacagtttggccagaggttcaccagaaaatctaagactcctgcagtccacaatacgatttaaaaaatcttttcttcgcaatggttcctatgaagattactttcctccagttcctgaagtcctaaaatcaaaactgtctcaacttcgaaacttgaccgaacttctttgtgaatctgaaactttcagtttgatagagaagtcatgccagctctctgatatgagctttgggagcctgtgtgaagaaagtgagtttgatctgcaactcctcgaagcggcagagctgggcaccgaaatagcagccagcttactgtaccatgacaatgtcatatctaaaaaagtgagagatttgctgactggagatccaagcaaaattaatttaaatatggatcagtttctagaacaggcactgcaaatgaattacttggaaaatatcactcagttaataccgatcatagaagccatgctgcatgtcaataacagtgcagatgcttctgaaaagccaggtcagttactagaaatgtttaaaaatgttgaagagctgaaagaagatttaaggagaacaacaggaatgtccaacaggactattgacaagttgctggccattcccatccctgataatagagctgagattatttctcaggtgttctggctgcattcctgtgatactaatatcaccactcccaaactagaagatgcaatgaaagaattctgcaacctgtctctttcagagagatcccggcagtcttacctcatcggactcacccttctgcactacttaaacatttacaacttcacatacaaggtgtttttcccgaggaaagatcaaaagccagtagaaaagatgatggagctcttcataagactaaaagagattctcaatcagatggcttctggcacacatccgctgctagacaaaatgagatccctgaagcaaatgcatctgcccagaagtgttccattaacacaggcaatgtacagaagcaaccgaatgaacacaccacaaggatcatttagcaccatctcccaagcattatgttctcaaggaattaccactgaatatttaactgccatgctgccctcttcccagaggccaaaaggcaaccacaccaaggattttttgacttataaattaactaaagagcaaattgcttcaaaatatggaattcccataaattccacaccattttgcttctccctttataaagacatcattaacatgcccgctggacctgtgatttgggctttcttgaaacctatgttgttgggaagaattttgtatgcaccatataacccagtcacaaaggcaataatggaaaagtccaatgtaactctgagacagctggcggaattaagagaaaaatctcaagagtggatggataagtcgccacttttcatgaattccttccatctgttaaaccaggcaattccaatgctccagaatactctaaggaacccttttgtgcaagtttttgtaaagttctccgtgggactcgatgctgttgaactattgaaacagatagatgaactcgatattctaagactgaaattagagaacaacattgacatcatcgatcagcttaacacactatcttccctgacagtaaatatttcctcttgtgtattatatgaccgtattcaggcagcaaaaaccatagatgaaatggagagagaggctaaaaggctctacaaaagcaacgaactctttggaagtgttatttttaagcttccttctaacagaagctggcacagaggctatgactctggaaatgtctttcttcctcctgtcataaaatataccatccggatgagtctcaagaccgcacagaccacaagaagcctaagaaccaagatttgggctccagggccacacaattctccatcacacaaccagatctatggcagggcttttatttatttacaggatagtattgaaagagcaatcattgaattgcaaactggaaggaactcccaggaaatagcagtccaggttcaagcaattccttatccctgcttcatgaaagacaacttcctaaccagtgtctcttattctcttccaattgtgcttatggttgcctgggttgtatttatagctgcctttgtaaaaaagcttgtctatgagaaagacctccggcttcatgagtacatgaagatgatgggtgtgaactcctgcagccatttctttgcctggcttatagagagtgttggatttttactggttaccatcgtgatcctcatcattatactcaagtttggcaatattcttcctaaaacaaatgggttcattttgttcctgtatttttcggactacagcttctcggttattgccatgagctatcttatcagtgtcttcttcaacaacaccaacattgcagctctgatcggaagcctcatctacatcattgccttctttccatttattgttctggttacagtggagaatgagttgagctatgtattgaaagtgttcatgagcctgctgtccccaacagcattcagctatgcaagccaatacattgcacgatacgaagaacagggcattggtcttcagtgggaaaatatgtacacctccccggttcaggatgacaccacctcatttggctggctgtgctgtctaatcctagctgactctttcatttatttccttattgcttggtatgtcaggaatgtcttcccagggacatacggtatggcagctccctggtattttccaattcttccttcctattggaaggagcgatttgggtgtgcagaggtgaagcctgagaagagcaatggcctcatgtttactaacatcatgatgcagaacaccaacccatctgccagtcctgaatacatgttttcctctaacatcgagcctgaacctaaagatctcacagtcggggttgccctgcatggggtcacaaagatctatggctcaaaagttgctgttgataacctcaatctgaacttttatgaagggcatattacttcattgctggggcccaatggagctgggaaaactactaccatttccatgttaactgggctgtttggggcctcagcaggcaccatttttgtatatggaaaagatatcaaaacagacctacacacggtacggaagaacatgggagtctgtatgcagcacgacgtcttgttcagttacctcactactaaggagcaccttctcctatatggttccatcaaagttcctcactggactaaaaagcagctccacgaggaagtaaaaaggactttaaaagatactggactatatagccatcgtcataagagagttggaacactgtcaggaggcatgaagaggaagttatctatatccatagctctcattggtggatcaagggtagtaattttggatgaaccatctactggagttgacccatgttctcgccgaagtatatgggatgttatatccaagaacaaaactgccagaacaatcattctgtcaacgcaccacttggacgaggctgaagtgctgagtgaccgcatcgccttcctggagcagggtgggcttaggtgctgtgggtccccattttacctcaaggaagcctttggcgatgggtatcacctcacgcttaccaagaagaagagtccaaatttaaatgcaaatgcagtatgtgacaccatggccgtgacagcaatgatccaatcacatctccccgaagcctacctcaaggaggatattgggggagagcttgtttatgtacttcctccattcagcaccaaagtctcaggggcctacctgtcactcctacgggcactcgacaatggcatgggtgacctcaacatcgggtgctacggcatttcagataccaccgtggaggaggtctttctgaacttgaccaaagagtcacaaaaaaatagtgctatgagtcttgagcacttaacacaaaagaaaattgggaattccaatgccaatggcatctcaactcctgacgatttatctgtgagcagcagcaatttcacagacagagatgacaaaatcctgacaagaggagagaggctggatggctttggactgttgctgaagaagatcatggctatactcatcaagaggttccaccacacccgcaggaactggaaaggtctcattgctcaggttatcctccccatcgtctttgttaccactgccatgggccttggcacactgagaaattccagcaacagttatccagagattcagatctccccctctctttatggtacctccgaacagacagccttctatgctaattatcacccgagcacggaagcacttgtctcagcaatgtgggacttccctggaattgacaacatgtgtctgaacaccagtgatctacagtgtttaaacaaagacagtctggaaaaatggaacaccagtggagaacccatcactaattttggtgtttgctcctgctcagaaaatgtccaggaatgtcctaaatttaactattccccaccgcacagaagaacttactcatcccaggtaatttataacctcactgggcaacgagtggaaaattatcttatatcaactgcaaatgagtttgtccaaaaaagatatggaggttggagttttgggctgcctttgacaaaagaccttcgttttgatataacaggagtccctgccaatagaacacttgccaaggtatggtatgatccagaaggctatcactcccttccagcttacctcaacagcctgaataatttccttctgcgagttaacatgtcaaaatacgatgctgcccgacatggcatcatcatgtatagccatccttatccaggagtgcaagaccaagaacaagccacaatcagcagtttaatcgatattttagtggcactgtctatcttgatgggctactctgtcaccaccgccagctttgtcacctatgttgtaagggaacatcaaaccaaagccaaacagttgcagcacatttcaggcattggcgtgacatgctactgggtaacaaacttcatttatgacatggttttctacttggtgcctgtagcgttttcaattggtatcattgcgattttcaaattacctgcattctacagtgaaaacaacctaggcgctgtatctctcctacttctcctgtttgggtatgcaacattttcctggatgtacttgctggctgggctcttccatgaaacaggaatggccttcatcacttacgtctgtgtcaacttgttttttggcattaattccattgtttccctgtcagtggtatactttctttccaaggaaaagcctaatgatccgactttagaacttatttctgaaaccctcaagcgcattttcctgattttcccacaattctgttttggctacggtttgattgaactttctcaacaacagtcggtcctagacttcttaaaagcatatggagtggaatacccaaatgaaacctttgagatgaataaactaggtgcaatgtttgtggctttggtttctcagggcaccatgtttttttccttgcgactcttaatcaacgaatccctgataaagaaactcaggcttttcttcagaaaatttaattcttcacatgtaagggagacaatagatgaggatgaagatgtgcgggctgagagattaagagttgagagtggtgcagctgaatttgacttggtccaactttattgtctcacaaagacctaccaacttatccacaaaaagattatagctgtaaacaacatcagcattgggatacctgctggagagtgttttgggcttcttggagtgaatggagcaggaaagaccactatattcaagatgctgacaggagacatcattccttcaagtggaaacattctgatcagaaataagaccggatctctgggtcacgttgattctcacagctcattagttggctactgtcctcaggaagatgccttagatgacctggtaactgtggaagaacatttgtatttctatgccagggtacatggaattccagaaaaggatattaaagaaactgttcataaactccttaggagacttcacctgatgcccttcaaggacagagctacctctatgtgcagttatggcacaaaaagaaaattatccactgcactggccttgatagggaaaccttccattctactgctggatgagccgagctctggcatggatccgaagtcgaaacggcacctctggaagatcatttcagaagaagtacagaacaaatgttccgtcatcctcacatctcacagcatggaagaatgtgaagctctctgtaccaggttggccattatggtgaatggaaagtttcaatgtattggatctttgcagcacataaagagcaggtttggacgaggatttactgtcaaagttcacttgaagaataacaaagtgaccatggagaccctcacaaagttcatgcagctgcactttccaaaaacatacttaaaagatcagcacctcagcatgctagagtatcatgtaccagtcacagcaggaggagtcgcaaacatttttgatctgctggaaaccaacaagactgctttaaatattacaaatttcttagtgagtcagaccactctggaagaggttttcatcaactttgccaaagaccagaagtcctatgaaactgctgataccagcagccaaggttccactataagtgttgactcacaagatgaccagatggagtcttaacacttccagcaa

SEQ ID NO: 2903 - DNA, 17184 bp, Homo sapiens
  source 1..17184: mol_type = unassigned DNA
gactgagagcagggagcagcaggcatggggcatgccgggtgccagttcaaagccctgctgtggaagaattggctctgcagactcaggaacccggtccttttccttgctgaattcttctggccttgtatcctgtttgtaattctgacagttcttcgttttcaagaacctcccagatacagagacatttgttatttgcagccccgagatctacccagctgtggtgttatcccctttgttcaaagccttctttgtaacactggatcaaggtgtaggaacttcagctatgaagggtcaatggagcatcattttcgtttgtctaggttccaaactgcagctgaccccaagaaagtcaacaacctggcctttttaaaagagatacaagacctggcagaggaaattcatggaatgatggacaaggcaaaaaacttaaaaagactttgggtagaacgatccaacactccagattcttcttatggttccagtttttttacaatggatctcaataagaccgaggaggtaatattgaaactggaaagcctccatcagcagcctcatatctgggattttctacttttactgccgagactacacacaagccatgatcatgtggaagatggcatggatgttgcagtgaaccttctccagaccattttgaattccttaatatccctagaagatttagattggcttccactcaaccaaactttttcccaggtttctgaacttgtactgaatgtgaccatttcgacactgacatttctgcagcaacatggagtagcagtcaccgagccagtttaccacctgtccatgcagaatatagtgtgggatccacagaaagtccagtatgatctcaaatcccagtttggctttgatgatcttcacacggaacagatcctgaactcttcagctgaactgaaggagattcccacagacacttccttggagaagatggtgtgttcagtcttgtctagcacatcagaggatgaagctgagaaatggggccacgttggaggctgccaccctaagtggtcagaagccaaaaactatcttgtccatgcagtcagctggctgcgagtctaccaacaggtgtttgttcagtggcaacagggtagcctgcttcagaagacactcacaggcatgggccatagtctggaggctctcaggaatcagtttgaagaagagagcaagccctggaaggtggtggaagctctgcacactgcactgctcctgctgaatgacagcttgtcagcagatggcccaaaagataatcatacatttccaaagatattacagcatctgtggaaattgcaaagcttgctgcaaaacctgccccagtggccggcactgaagagatttcttcagcttgatggagctctcagaaatgcgatagctcagaatttacattttgtccaagaagtcctcatttgcctggagacatcagctaatgattttaaatggtttgaacttaaccaattgaaactggaaaaggatgtgttcttttgggagctgaaacagatgttggcgaagaatgctgtctgcccgaatggtcgtttctctgagaaggaggtctttttgccgcctggaaactccagcatatggggtggtctccagggactgttgtgctattgtaactcctctgagacgagtgttttaaacaagctacttggttcagtagaggatgctgatcgtattttgcaagaggtcattacttggcacaaaaatatgtcagttttaatacctgaagaatatttggactggcaggaacttgagatgcagctgtcagaagcaagcctttcctgtactcggctcttcctgctgctgggagctgatccctctcctgagaatgatgtcttttctagtgactgtaagcaccagcttgtctccacagtgatatttcatacacttgaaaaaacacaatttttcctggaacaagcatattattggaaagccttcaaaaagtttatcaggaagacttgcgaagtggcccaatatgtaaatatgcaagagagtttccagaacagactattggcttttcctgaggaatctccttgttttgaagaaaacatggattggaaaatgatcagtgataattattttcaatttttgaataacttactcaagtctccaacagcttccatatccagggctttaaatttcacaaagcaccttctaatgatggaaaagaagttgcacacccttgaggatgaacaaatgaactttcttttatcatttgtggaattttttgagaaattattgttgcctaatctttttgactcctccattgttcccagtttccacagcctcccatctctcacagaggatattctgaatataagttctctgtggacaaatcatttaaaaagtttaaagagagacccatctgccactgatgctcagaaactcttggaatttggcaacgaagtgatttggaaaatgcagactctcggaagtcactggataaggaaggaaccaaaaaatcttttgagattcatagaattaatactttttgaaattaatcccaaattactagaattatgggcctatggcatttcaaaaggaaaaagagctaaattggaaaacttctttacacttttaaatttttctgttccagaaaatgagattctgagtacaagttttaacttttcccagttgttccattcagattggcctaaatcaccagctatgaacatagattttgtacgtttaagtgaggctataataactagtctccatgaatttggatttttggagcaggaacagatctcagaagctctgaacacagtctacgctatcaggaatgcatctgatcttttctcagccctttctgaaccacaaaaacaagaagttgataaaattttgactcacatacacctaaatgtcttccaggacaaggattcagctttacttctgcaaatttattcttcattttaccgatatatttatgaattattgaatattcagagtagaggctcttcgttgactttccttacacaaatctcaaaacacattttggatatcataaaacaatttaatttccaaaacatcagtaaagcatttgcatttttatttaagacagcagaggttcttgggggaatttctaatgtatcttactgtcagcaattgctttcaatttttaactttttggagcttcaggcccaatccttcatgtctacagagggccaagaactggaagtgatccacactactttgacaggcctcaaacagctgctcataattgatgaagattttcgtatttctttatttcaatatatgagccaattcttcaacagttcagtagaagacctattggataataaatgcttgatttcggacaataaacacatttcttccgtaaattattcaacaagtgaggagtcttcatttgtttttccattggcacaaattttttcaaacctctcagcaaatgtcagtgtgttcaacaagtttatgtccattcactgtaccgtttcatggcttcaaatgtggactgaaatctgggaaaccatatctcaattatttaagtttgacatgaatgttttcacatctcttcatcatggtttcactcagcttttggatgaattggaagatgatgtgaaagtctctaaaagctgccagggtatacttcccacccataatgttgctagactcatattaaatttgtttaaaaatgtaactcaagccaatgacttccataattgggaggacttcctggatctcagggattttttggtagctttaggtaatgcattagtttcagtaaaaaaacttaacttggagcaagtggagaaatcccttttcaccatggaagctgccctgcatcagttgaagacatttccattcaacgaaagtacaagcagagagtttttaaattctctgcttgaagttttcattgagtttagcagtacctcagaatatatagtcagaaatctagattcaataaatgactttctttcaaataatctcacaaattatggagaaaaatttgaaaatatcatcactgagctaagagaagcaatagtatttcttagaaatgtatcacatgatcgagatttgttttcctgtgctgatattttccaaaatgttactgagtgtattttagaagatggctttttatatgtaaatacctcacagaggatgttacgtattctagacacgttaaattccacattttcctctgagaacacaattagcagtctgaaaggatgcattgtatggttagatgtcataaaccatttgtatttgttgtctaactccagtttttcacaaggtcatcttcaaaatattttggggaatttcagagatatagaaaacaaaatgaactctatattaaaaattgtaacttgggtgttaaatataaaaaaacctctttgttcatcaaatggctcacatataaattgtgtcaatatttacttgaaagatgtaactgactttctaaatattgtacttactacagtctttgaaaaagagaagaaacctaaatttgagattttattagctcttttaaatgattccacaaagcaagtaaggatgagtatcaacaacttaacaacagactttgattttgcatctcagtccaattggagatattttactgaattaattctaagaccaatagaaatgtcagatgaaattcctaatcagtttcaaaatatttggcttcatttaataacactggggaaggaatttcagaagcttgtaaaaggtatttactttaacatcctggaaaataattcctcttctaaaactgaaaacttgttaaacatatttgccaccagtccaaaagaaaaggatgtaaacagtgtaggcaattccatttatcacttagctagttaccttgccttcagcttatctcatgacctccaaaattcaccaaaaataataatttcacctgaaataatgaaagctacaggtcttggtattcaactgataagggatgtgttcaactccttaatgcctgtagttcatcacactagtccacaaaatgcaggttatatgcaagctttgaagaaggtaacttctgtcatgcgtacccttaagaaggcagacatagaccttttagtggatcagcttgaacaagttagtgtaaacctaatggatttctttaagaatatcagtagtgtgggaactggcaatttagtggtcaatttgcttgttggcttgatggaaaaatttgcagacagctcacattcttggaatgttaatcatctgctgcagctctcacgcctgtttcctaaagatgttgtggatgctgtgatagatgtgtactatgtgcttcctcatgctgtaaggctcctgcagggagtacctggtaaaaacatcactgaaggcctcaaggatgtctacagcttcacactccttcatggcataaccatttcaaatatcaccaaggaagacttcgcaattgtgataaaaattcttttggatacaattgaattagtatcagataagccagatattatttcagaggctttagcttgttttcctgtggtttggtgctggaatcacacaaattctggatttcggcagaattcaaagatagacccctgcaatgtccatgggctcatgtcttcttccttttatggcaaagtggccagtatacttgatcatttccacctgtctccccaaggtgaagattcaccatgttcaaatgaaagctcccgaatggaaataactaggaaagtggtctgcataattcatgaattagtggactggaattctattcttctggagctctctgaagtcttccatgttaacatttctcttgtgaaaactgtgcagaaattttggcataagatattaccgtttgtcccaccttcaataaatcaaactagggatagcatctctgaactctgtcctagtggttccataaagcaagttgctttgcaaatcatagaaaaacttaaaaatgtcaactttacaaaagttacatcaggtgaaaatattcttgacaaactaagtagtttaaacaagatccttaacattaatgaagacacagagacatctgttcaaaatattatttcctcaaatttggaaaggacagtacaattgatttctgaagactggagcctagaaaaaagtacgcataatctactctctttattcatgatgctccagaatgcaaatgtcacaggtagcagtttagaagcattatcaagttttattgaaaaaagtgaaacaccttacaactttgaagaactatggcccaagtttcaacaaatcatgaaagacctaacccaagattttagaatcagacacctgctttctgaaatgaacaaaggaatcaaaagtataaattcaatggctcttcaaaagataactttgcagtttgcccatttcctggaaatcctggattcaccgtcattgaagacattagaaattattgaagattttctattggtcacaaaaaactggcttcaggaatatgcaaatgaggattactccagaatgatagaaacattattcattcctgtgaccaatgagagttcaactgaagatatagctttgttagccaaagctattgctactttttggggctctttaaaaaatatatctagagcaggcaattttgatgttgcctttcttacccatctgctaaatcaagaacagctgactaatttctcagttgttcagctgctttttgaaaacatcctaattaatttgatcaataacttagctgggaattctcaggaagcagcttggaacttaaatgatactgaccttcaaataatgaatttcattaaccttatcttgaaccatatgcagtcagaaactagtaggaaaacagttctctctctgagaagcatagtagatttcacagaacagtttttgaaaacattcttctccctttttctaaaggaagattctgagaacaaaatatctcttctgctgaaatatttccacaaagatgttattgcagagatgagttttgtcccaaaagataaaattctagaaattctgaaactggatcaatttcttaccctgatgatacaagacagattgatgaacattttttcaagtttaaaggagactatatatcacctaatgaaaagttcatttatattagacaatggagaattttattttgatactcatcaaggactgaagttcatgcaagatttatttaatgcccttctcagggaaacttcaatgaaaaataagactgaaaataatatagactttttcacagtggtgagtcagttgtttttccatgtgaataagtctgaggacctcttcaaactcaatcaagatcttgggtcagctcttcaccttgtaagagaatgttcaacagagatggcaagacttctggatacaattttacactctcctaataaggacttctatgctttgtatcctaccctccaagaagttatacttgctaatctaacggatttgcttttctttataaataattcattccctctaagaaacagagcaacattagaaattactaagagattagttggtgctatttcaagagcaagtgaagaaagtcacgtcctgaaacccctcttagaaatgtctgggactctggtcatgctgttgaatgacagtgctgacctgagagatcttgccacatcaatggactccattgtgaaacttcttaagctggtcaagaaagtttcggggaagatgtccacagtttttaaaactcattttatctccaataccaaggacagtgtgaaattctttgacactctgtattccatcatgcaacaaagtgttcaaaatcttgtgaaagaaatagctactttaaaaaaaatagatcatttcacatttgaaaagataaatgatttgttggtgccatttcttgacttggcctttgaaatgattggggtagaaccttatatatcatcaaactctgatattttcagtatgtcacctagcatactctcatatatgaaccaatctaaggacttttctgatattttggaagaaattgctgaatttttaacatctgtgaaaatgaacttggaagatatgaggagtcttgcggtagcatttaacaatgagactcaaacattttctatggattctgtcaacttacgggaagaaattctgggttgcttagttcctataaataacatcaccaaccaaatggacttcttataccctaatccaatttccactcatagtggccctcaagatataaaatgggaaataattcatgaagtgatcccttttttggataaaatattatcacaaaacagcacagaaataggatctttcttgaaaatggtgatctgtctcaccttagaagctctttggaaaaacttaaagaaagataattggaatgtttctaatgtgttgatgacatttactcagcatccaaataaccttttgaaaaccatagaaacagttttagaggcctccagtggaattaaaagtgactatgaaggtgatttgaataaaagtttatattttgacacacctttgagtcagaatataactcatcatcaacttgaaaaagcaatccataatgttttaagtagaatagctctctggaggaaaggacttctgtttaacaactctgaatggataacttccacaagaactttgtttcagccactttttgagattttcattaaagcaaccaccggaaagaatgtcacatcagaaaaagaagagagaaccaagaaagagatgattgactttccttatagtttcaaaccatttttctgtttggagaaatacctgggaggattatttgtattgactaaatactggcaacaaatcccactaacagatcaaagtgttgttgagatttgtgaagttttccagcagactgtgaagccctcagaagccatggagatgctgcagaaagtgaagatgatggtcgtacgtgtgctcaccatcgttgcagaaaacccttcctggaccaaggacattttgtgtgctactctgagttgcaagcaaaatgggataaggcatctcattttatctgctatacaaggggtcactttggcgcaggaccacttccaggaaattgaaaagatatggtcctcgccgaatcagctaaattgtgaaagtcttagcaagaatctttctagcaccttggagagcttcaagagcagcttggaaaatgccactggccaggactgcacaagccagccgaggctggagacggtgcagcagcacttgtacatgttggccaaaagcctcgaggaaacttggtcatcagggaatcccatcatgacttttctcagcaatttcacagtaactgaggatgtaaaaataaaagatttgatgaagaatatcaccaagttgactgaggagcttcgctcttccatccaaatctcgaatgagactatccatagcattctagaagcaaatatttcccactccaaggttctcttcagtgccctcaccgtagctctgtctggaaagtgtgatcaggaaatccttcatctcctgctgacatttcccaaaggggaaaaatcttggatcgcagcggaggaactctgtagcctgccagggtcaaaagtgtattctctgattgtgttgctgagtcgaaacttggatgtgcgagctttcatttacaagactctgatgccttctgaagcaaatggcttgctcaactccttgctggatatagtttccagcctcagcgccttgcttgccaaagcccagcacgtctttgagtatcttcctgagtttcttcacacatttaaaatcactgccttgctagaaaccctggactttcaacaggtttcacaaaatgtccaggccagaagttcagcttttggttctttccagtttgtgatgaagatggtttgcaaggaccaagcatcattccttagcgattctaatatgtttattaatttgcccagagttaaggaactcttggaagatgacaaagaaaaattcaacattcctgaagattcaacaccgttttgcttgaagctttatcaggaaattctacaattgccaaatggtgctttggtgtggaccttcctaaaacccatattgcatggaaaaatactatacacaccaaacactccagaaattaacaaggtcattcaaaaggctaattacaccttttatattgtggacaaactaaaaactttatcagaaacactgctggaaatgtccagccttttccagagaagtggaagtggccagatgttcaaccagctgcaggaggccctgagaaacaaatttgtaagaaactttgtagaaaaccagttgcacattgatgtagacaaacttactgaaaaactccagacatacggagggctgctggatgagatgtttaaccatgcaggcgctggacgcttccgtttcttgggcagcatcttggtcaatctctcttcctgcgtggcactgaaccgtttccaggctctgcagtctgtcgacatcctggagactaaagcacatgaactcttgcagcagaacagcttcttggccagtatcattttcagcaattccttattcgacaagaacttcagatcagagtctgtcaaactgccaccccatgtctcatacacaatccggaccaatgtgttatacagcgtgcgaacagatgtggtaaaaaacccttcttggaagttccaccctcagaatctaccagctgatgggttcaaatataactacgtctttgccccactgcaagacatgatcgaaagagccatcattttggtgcagactgggcaggaagccctggaaccagcagcacagactcaggcggccccttacccctgccataccagcgacctattcctgaacaacgttggtttcttttttccactgataatgatgctgacgtggatggtgtctgtggccagcatggtcagaaagttggtgtatgagcaggagatacagatagaagagtatatgcggatgatgggagtgcatccagtgatccatttcctggcctggttcctggagaacatggctgtgttgaccataagcagtgctactctggccatcgttctgaaaacaagtggcatctttgcacacagcaatacctttattgttttcctctttctcttggattttgggatgtcagtcgtcatgctgagctacctcttgagtgcatttttcagccaagctaatacagcggccctttgtaccagcctggtgtacatgatcagctttctgccctacatagttctattggttctacataaccaattaagttttgttaatcagacatttctgtgccttctttcgacaaccgcctttggacaaggggtattttttattacattcctggaaggacaagagacagggattcaatggaataatatgtaccaggctctggaacaagggggcatgacatttggctgggtttgctggatgattctttttgattcaagcctttattttttgtgtggatggtacttgagcaacttgattcctggaacatttggtttacggaaaccatggtatttcccctttactgcctcatattggaagagtgtgggtttcttggtggagaaaaggcaatactttctaagttctagtctgttcttcttcaatgagaactttgacaataaagggtcatcactgcaaaacagggaaggagagcttgaaggaagtgccccgggagtcaccctggtgtctgtgaccaaggaatatgagggccacaaggctgtggtccaagacctcagcctgaccttctacagagaccaaatcaccgccctgctggggacaaacggtgccgggaaaaccactatcatatccatgttgacggggctccaccctcccacttctggaaccatcatcatcaatggcaagaacctacagacagacctgtcgagggtcagaatggagcttggtgtgtgtccgcagcaggacatcctgttggacaacctcaccgtccgggaacatttgctgctctttgcttccataaaggcgcctcagtggaccaagaaggagctgcatcagcaagtcaatcaaactcttcaggatgtggacttaactcagcatcagcacaaacagacccgagctctgtctggaggcctgaagaggaagctctcccttggcattgctttcatgggcatgtcgaggaccgtggttctggatgagcccaccagtggggtggacccttgctcccggcatagcctgtgggacattctgctcaagtaccgagaaggtcgtacgatcatcttcacaacccaccacctggatgaagctgaagcgctgagtgaccgcgtggccgtcctccagcatgggaggctcaggtgctgcggtcctcccttctgcctgaaggaggcatatggccaggggctccgcctgacactcacgaggcagccttctgttctggaggcccatgatctgaaagacatggcttgtgttacatccctgataaagatctatattccacaagcatttctcaaagacagcagtggaagtgagctgacctacaccattccaaaggacacagacaaggcctgcttgaaagggctcttccaggccctggatgagaacctgcatcagctgcacctgacgggctatgggatctcagacaccaccttagaagaggtgtttttgatgcttttgcaagattccaacaagaaatctcacattgccctggggactgagtcagagctgcagaaccacaggcctacaggacatctgtctggctactgtggctccctagcacggcccgcaactgtgcagggcgtccagctgctccgcgcacaagtggccgcgatcctggcccggaggctccgccgcacgctgcgcgccgggaagagcaccctcgccgacctgctgctgccagtcctcttcgtggccttggccatgggcttgttcatggtgagacccctggccaccgagtaccctcccctcagactcacacctggacattaccagcgggccgagacctactttttcagcagtgggggcgacaacttggacctcacccgtgtgcttctgcggaagtttagagatcaagatttgccctgtgcagatttaaacccacgccagaagaattcttcatgctggcgcacagatcccttttctcacccagaattccaggattcatgtggctgcctgaagtgtccaaatagaagtgctagtgctccctacctgaccaaccacctgggccacacactgttgaatctctcaggcttcaatatggaggagtacttgctggcaccatctgaaaaaccaaggcttggaggttggtcttttggattaaaaatccccagtgaagctggaggtgcaaatggaaacatatcaaaacccccaactctggcaaaggtgtggtataatcagaagggttttcattccctaccttcctacttaaatcatctaaacaaccttattttgtggcagcacctaccccctactgtggactggagacaatacggaataacactctacagccacccatatggaggggccttgctgaacaaggacaagatcctggagagcatccgtcagtgtggagtggccctctgcatcgtgctgggattctccatcctgtctgcatccatcggcagctctgtggtgagggacagggtgattggagccaaaaggttgcagcacataagtggccttggctacaggatgtactggttcacaaacttcctatatgacatgctcttttacttggtttccgtctgcctgtgtgttgccgttattgtcgccttccagttaacagcttttactttccgcaagaacttggcagccacggccctcctgctgtcacttttcggatatgcaactcttccatggatgtacctgatgtccagaatcttttccagttcggacgtggctttcatttcctatgtctcactaaacttcatctttggcctttgtaccatgctcataaccattatgccccggttgctagccatcatctccaaagctaagaatttacagaatatctatgatgtcctcaagtgggtctttactatttttcctcaattctgtcttggtcaaggactggtagaactctgctataatcagatcaaatatgacctgacccacaacttcggcattgattcctatgtgagtccctttgagatgaactttctgggctggatcttcgtgcaactggcctcgcagggcacagtacttctcctcttgagggttctgctacactgggaccttctgcgatggccaaggggtcattctactctccaaggcacagtcaaatcttctaaggatacagatgttgaaaaagaggaaaagagagtgtttgaaggaaggaccaatggagacattcttgtgttatacaaccttagtaaacattatcgacgctttttccagaatattattgctgtgcaagatattagtttgggcataccaaaaggagagtgctttggacttctaggggtgaatggagctgggaagagcacgactttcaaaatgctgaatggtgaagtttctctaacttcaggacatgctatcatcaggactcccatgggagacgccgtggacctgtcttctgctggcacggcaggcgtgctcattggctactgtccccagcaggatgccctggacgagcttctgactggttgggaacatctctattattactgtagcttacgcgggattccaaggcagtgcatccctgaggttgctggagacctcatcaggcgcttacacctcgaagcccacgcggacaaacctgtggccacctacagtgggggaaccaagcggaaactctctacagccctggccctggtggggaaacctgacattcttttattggatgagcccagctctgggatggatccctgctctaagcggtacctgtggcaaacaataatgaaggaggttcgggaaggctgtgctgcggtgctgacctcccacagcatggaggagtgtgaggctctttgcacaagactggccataatggttaacggcagcttcaaatgtcttggttctcctcagcacatcaaaaataggtttggtgatggttatacagtcaaagtttggctctgtaaggaagcaaatcaacattgcactgtttctgaccacttgaagctttattttccaggaattcagttcaagggacagcacctgaatttattagaatatcatgtgccaaaaagatggggatgcctagctgacttgttcaaagttatagagaacaataaaaccttcttgaatattaagcattattccattaaccaaaccactttggagcaggtatttattaattttgcttctgagcagcagcaaactctacaatctactcttgatccatccactgacagtcaccacacacatcacttgcccatctgagcactaaagaagtttccataaggaataaaaccttgtcttccattacaattaacagtcaaggataaaacaagcacgcgcacaatcaaggagctggaacacactctccaggccgtcaaattattctcttgttcattttctattttgaatctccttgttagttaataaccaccaaatggaaaggtcattctttctgcagacttttggggagctcctccaaaacatttgttctctttaccatgccagatggacaccagcttctttgtgacaaaggcatgaatgatttgacagtgtccaaactgagacattctggagctggaaagcctgtcacactagagtgtgtgtgacatgtccactctaaacatgtcacttttctgttaagaaaactgagccccctccccacaggttaaaaaactttagtaacttgtttgtatagaaaatagtaacaaggactattttctattgttgtcatctatttactagatacatgtttttaatgattttaatgtaagcttttattaatactgatgacattatatggtatgatatgaaaaaatcaccaattttttacatataaaagatacctttttaaaaaaataggttttaagagctcttttagtatacactttagcaaaattaattaaattgaactagttactctgtatcaattacagtagttctaccagaatctcccaggttataatttatgagggtagagaaataaaatgtagatgcattttctttttcttcatttggatgaataattactgttttttgttattctaagtcagtgtttttcaaagcgtagtggtccccatattagctgcattgccatcttctgggagcttgcaagaaatgtacattctcaggatccactccagacctattgaatctcaaattctggggcttaaacaagcacattccaagttaagaaccaatgacctaagggaatgtctggttacctcctagttatacaagcaaaatctgcatagtatgtagtcttttttatttatttattttttttttttgaggcggagtctcgctctgtcacccaggctggagtgcagtggcgcgatgtcggctcactgcaagctccgcctcctgggttcacgccattctcctgcctcagcctccccagcagctgggactacaggcacacatcgccacacccggctaatttttagtatttttagtagagacggggtttcaccgtgttagccaggatggtctctatctcctgaccttgtgatccgcccccctccacctcccaaagtgctgggattacaggcgtgagccaccgtgtccggccgtagtttattttaaaatatatttttaaaagctttgtaaaaattatgtcattctcagaattgttgtcttcaaagcattgtcagatgtagagtgctcagatgtggctcttaaagactatatacatctgaatttttcatcctatagttagtaagatgcataaaatcaatccactactgaaatagtttccagtcagacatttctgagttcagacatttctcaacattcttttaacaacatttttctgaatcctcaatagaaaatcacattaatcttattttaaaatttggcctttttcaacactaacgttgagtaccggtagcttgtgatcaaaggcatatacttccttatgagatttctttactaaagcaagatttcattaaatctctatttcctaaatatcattctatacaaaagatattttttaaacggtaaggattaagacaatcactgatagctttgttgtgagcaattttgattcccatgtatcacatgaattacacttccttaaataaattacagtttatggctgtatgatttattctctaattctaacatagtctagttgtcaaaaggaaatatgtaatctttttatgattgttgaatcaataaataccaatttgtgaaacatgaatgtgtttaaactgcagtgaataaatgagatgtgctttaatttaaccc

SEQ ID NO: 2904 - DNA, 4480 bp, Homo sapiens
  source 1..4480: mol_type = unassigned DNA
gtgcagggcgtccagctgctccgcgcacaagtggccgcgatcctggcccggaggctccgccgcacgctgcgcgccgggaagagcaccctcgccgacctgctgctgccagtcctcttcgtggccttggccatgggcttgttcatggtgagacccctggccaccgagtaccctcccctcagactcacacctggacattaccagcgggccgagacctactttttcaggaagaattcttcatgctggcgcacagatcccttttctcacccagaattccaggattcatgtggctgcctgaagtgtccaaatagaagtgctagtgctccctacctgaccaaccacctgggccacacactgttgaatctctcaggcttcaatatggaggagtacttgctggcaccatctgaaaaaccaaggcttggaggttggtcttttggattaaaaatccccagtgaagctggaggtgcaaatggaaacatatcaaaacccccaactctggcaaaggtgtggtataatcagaagggttttcattccctaccttcctacttaaatcatctaaacaaccttattttgtggcagcacctaccccctactgtggactggagacaatacggaataacactctacagccacccatatggaggggccttgctgaacaaggacaagatcctggagagcatccgtcagtgtggagtggccctctgcatcgtgctgggattctccatcctgtctgcatccatcggcagctctgtggtgagggacagggtgattggagccaaaaggttgcagcacataagtggccttggctacaggatgtactggttcacaaacttcctatatgacatgctcttttacttggtttccgtctgcctgtgtgttgccgttattgtcgccttccagttaacagcttttactttccgcaagaacttggcagccacggccctcctgctgtcacttttcggatatgcaactcttccatggatgtacctgatgtccagaatcttttccagttcggacgtggctttcatttcctatgtctcactaaacttcatctttggcctttgtaccatgctcataaccattatgccccggttgctagccatcatctccaaagctaagaatttacagaatatctatgatgtcctcaagtgggtctttactatttttcctcaattctgtcttggtcaaggactggtagaactctgctataatcagatcaaatatgacctgacccacaacttcggcattgattcctatgtgagtccctttgagatgaactttctgggctggatcttcgtgcaactggcctcgcagggcacagtacttctcctcttgagggttctgctacactgggaccttctgcgatggccaaggggtcattctactctccaaggcacagtcaaatcttctaaggatacagatgttgaaaaagaggaaaagagagtgtttgaaggaaggaccaatggagacattcttgtgttatacaaccttagtaaacattatcgacgctttttccagaatattattgctgtgcaagatattagtttgggcataccaaaaggagagtgctttggacttctaggggtgaatggagctgggaagagcacgactttcaaaatgctgaatggtgaagtttctctaacttcaggacatgctatcatcaggactcccatgggagacgccgtggacctgtcttctgctggcacggcaggcgtgctcattggctactgtccccagcaggatgccctggacgagcttctgactggttgggaacatctctattattactgtagcttacgcgggattccaaggcagtgcatccctgaggttgctggagacctcatcaggcgcttacacctcgaagcccacgcggacaaacctgtggccacctacagtgggggaaccaagcggaaactctctacagccctggccctggtggggaaacctgacattcttttattggatgagcccagctctgggatggatccctgctctaagcggtacctgtggcaaacaataatgaaggaggttcgggaaggctgtgctgcggtgctgacctcccacagcatggaggagtgtgaggctctttgcacaagactggccataatggttaacggcagcttcaaatgtcttggttctcctcagcacatcaaaaataggtttggtgatggttatacagtcaaagtttggctctgtaaggaagcaaatcaacattgcactgtttctgaccacttgaagctttattttccaggaattcagttcaagggacagcacctgaatttattagaatatcatgtgccaaaaagatggggatgcctagctgacttgttcaaagttatagagaacaataaaaccttcttgaatattaagcattattccattaaccaaaccactttggagcaggtatttattaattttgcttctgagcagcagcaaactctacaatctactcttgatccatccactgacagtcaccacacacatcacttgcccatctgagcactaaagaagtttccataaggaataaaaccttgtcttccattacaattaacagtcaaggataaaacaagcacgcgcacaatcaaggagctggaacacactctccaggccgtcaaattattctcttgttcattttctattttgaatctccttgttagttaataaccaccaaatggaaaggtcattctttctgcagacttttggggagctcctccaaaacatttgttctctttaccatgccagatggacaccagcttctttgtgacaaaggcatgaatgatttgacagtgtccaaactgagacattctggagctggaaagcctgtcacactagagtgtgtgtgacatgtccactctaaacatgtcacttttctgttaagaaaactgagccccctccccacaggttaaaaaactttagtaacttgtttgtatagaaaatagtaacaaggactattttctattgttgtcatctatttactagatacatgtttttaatgattttaatgtaagcttttattaatactgatgacattatatggtatgatatgaaaaaatcaccaattttttacatataaaagatacctttttaaaaaaataggttttaagagctcttttagtatacactttagcaaaattaattaaattgaactagttactctgtatcaattacagtagttctaccagaatctcccaggttataatttatgagggtagagaaataaaatgtagatgcattttctttttcttcatttggatgaataattactgttttttgttattctaagtcagtgtttttcaaagcgtagtggtccccatattagctgcattgccatcttctgggagcttgcaagaaatgtacattctcaggatccactccagacctattgaatctcaaattctggggcttaaacaagcacattccaagttaagaaccaatgacctaagggaatgtctggttacctcctagttatacaagcaaaatctgcatagtatgtagtcttttttatttatttattttttttttttgaggcggagtctcgctctgtcacccaggctggagtgcagtggcgcgatgtcggctcactgcaagctccgcctcctgggttcacgccattctcctgcctcagcctccccagcagctgggactacaggcacacatcgccacacccggctaatttttagtatttttagtagagacggggtttcaccgtgttagccaggatggtctctatctcctgaccttgtgatccgcccccctccacctcccaaagtgctgggattacaggcgtgagccaccgtgtccggccgtagtttattttaaaatatatttttaaaagctttgtaaaaattatgtcattctcagaattgttgtcttcaaagcattgtcagatgtagagtgctcagatgtggctcttaaagactatatacatctgaatttttcatcctatagttagtaagatgcataaaatcaatccactactgaaatagtttccagtcagacatttctgagttcagacatttctcaacattcttttaacaacatttttctgaatcctcaatagaaaatcacattaatcttattttaaaatttggcctttttcaacactaacgttgagtaccggtagcttgtgatcaaaggcatatacttccttatgagatttctttactaaagcaagatttcattaaatctctatttcctaaatatcattctatacaaaagatattttttaaacggtaaggattaagacaatcactgatagctttgttgtgagcaattttgattcccatgtatcacatgaattacacttccttaaataaattacagtttatggctgtatgatttattctctaattctaacatagtctagttgtcaaaaggaaatatgtaatctttttatgattgttgaatcaataaataccaatttgtgaaacatgaatgtgtttaaactgcagtgaataaatgagatgtgctttaatttaacccg

SEQ ID NO: 2905 - DNA, 8154 bp, Homo sapiens
  source 1..8154: mol_type = unassigned DNA
ggggcggagccagcgcggatcgggtcccggacgcccgagcgccccgcccccgcgcgggcgatgcccagcggcgcggcgggctgcggggcccggcggggcgcgcagaggagcgggccgcggcgctgaggcggcggagcgtggccccgccatgggcttcctgcaccagctgcagctgctgctctggaagaacgtgacgctcaaacgccggagcccgtgggtcctggccttcgagatcttcatccccctggtgctgttctttatcctgctggggctgcgacagaagaagcccaccatctccgtgaaggaagtcgccttctacacagcggcgcccctgacgtctgccggcatcctgcctgtcatgcaatcgctgtgcccggacggccagcgagacgagttcggcttcctgcagtacgccaactccacggtcacgcagctgcttgagcgcctggaccgcgtggtggaggaaggcaacctgtttgacccagcgcggcccagcctgggctcagagctcgaggccctacgccagcatctggaggccctcagtgcgggcccgggcacctcggggagccacctggacagatccacagtgtcttccttctctctggactcggtggccagaaacccgcaggagctctggcgtttcctgacgcaaaacttgtcgctgcccaatagcacggcccaagcactcttggccgcccgtgtggacccgcccgaggtctaccacctgctctttggtccctcatctgccctggattcacagtctggcctccacaagggtcaggagccctggagccgcctagggggcaatcccctgttccggatggaggagctgctgctggctcctgccctcctggagcagctcacctgcacgccgggctcgggggagctgggccggatcctcactgtgcctgagagtcagaagggagccctgcagggctaccgggatgctgtctgcagtgggcaggctgctgcgcgtgccaggcgcttctctgggctgtctgctgagctccggaaccagctggacgtggccaaggtctcccagcagctgggcctggatgcccccaacggctcggactcctcgccacaggcgccacccccacggaggctgcaggcgcttctgggggacctgctggatgcccagaaggttctgcaggatgtggatgtcctgtcggccctggccctgctactgccccagggtgcctgcactggccggacccccggacccccagccagtggtgcgggtggggcggccaatggcactggggcaggggcagtcatgggccccaacgccaccgctgaggagggcgcaccctctgctgcagcactggccaccccggacacgctgcagggccagtgctcagccttcgtacagctctgggccggcctgcagcccatcttgtgtggcaacaaccgcaccattgaacccgaggcgctgcggcggggcaacatgagctccctgggcttcacgagcaaggagcagcggaacctgggcctcctcgtgcacctcatgaccagcaaccccaaaatcctgtacgcgcctgcgggctctgaggtcgaccgcgtcatcctcaaggccaacgagacttttgcttttgtgggcaacgtgactcactatgcccaggtctggctcaacatctcggcggagatccgcagcttcctggagcagggcaggctgcagcaacacctgcgctggctgcagcagtatgtagcagagctgcggctgcaccccgaggcactgaacctgtcactggatgagctgccgccggccctgagacaggacaacttctcgctgcccagtggcatggccctcctgcagcagctggataccattgacaacgcggcctgcggctggatccagttcatgtccaaggtgagcgtggacatcttcaagggcttccacgacgaggagagcattgtcaactacaccctcaaccaggcctaccaggacaacgtcactgtttttgccagtgtgatcttccagacccggaaggacggctcgctcccgcctcacgtgcactacaagatccgccagaactccagcttcaccgagaaaaccaacgagatccgccgcgcctactggcggcctgggcccaatactggcggccgcttctacttcctctacggcttcgtctggatccaggacatgatggagcgcgccatcatcgacacttttgtggggcacgatgtggtggagccaggcagctacgtgcagatgttcccctacccctgctacacacgcgatgacttcctgtttgtcattgagcacatgatgccgctgtgcatggtgatctcctgggtctactccgtggccatgaccatccagcacatcgtggcggagaaggagcaccggctcaaggaggtgatgaagaccatgggcctgaacaacgcggtgcactgggtggcctggttcatcaccggctttgtgcagctgtccatctccgtgacagcactcaccgccatcctgaagtacggccaggtgcttatgcacagccacgtggtcatcatctggctcttcctggcagtctacgcggtggccaccatcatgttctgcttcctggtgtctgtgctgtactccaaggccaagctggcctcggcctgcggtggcatcatctacttcctgagctacgtgccctacatgtacgtggcgatccgagaggaggtggcgcatgataagatcacggccttcgagaagtgcatcgcgtccctcatgtccacgacggcctttggtctgggctctaagtacttcgcgctgtatgaggtggccggcgtgggcatccagtggcacaccttcagccagtccccggtggagggggacgacttcaacttgctcctggctgtcaccatgctgatggtggacgccgtggtctatggcatcctcacgtggtacattgaggctgtgcacccaggcatgtacgggctgccccggccctggtacttcccactgcagaagtcctactggctgggcagtgggcggacagaagcctgggagtggagctggccgtgggcacgcaccccccgcctcagtgtcatggaggaggaccaggcctgtgccatggagagccggcgctttgaggagacccgtggcatggaggaggagcccacccacctgcctctggttgtctgcgtggacaaactcaccaaggtctacaaggacgacaagaagctggccctgaacaagctgagcctgaacctctacgagaaccaggtggtctccttcttgggccacaacggggcgggcaagaccaccaccatgtccatcctgaccggcctgttccctccaacgtcgggttccgccaccatctacgggcacgacatccgcacggagatggatgagatccgcaagaacctgggcatgtgcccgcagcacaatgtgctctttgaccggctcacggtggaggaacacctctggttctactcacggctcaagagcatggctcaggaggagatccgcagagagatggacaagatgatcgaggacctggagctctccaacaaacggcactcactggtgcagacattgtcgggtggcatgaagcgcaagctgtccgtggccatcgccttcgtgggcggctctcgcgccatcatcctggacgagcccacggcgggcgtggacccctacgcgcgccgcgccatctgggacctcatcctgaagtacaagccaggccgcaccatccttctgtccacccaccacatggatgaggctgacctgcttggggaccgcattgccatcatctcccatgggaagctcaagtgctgcggctccccgctcttcctcaagggcacctatggcgacgggtaccgcctcacgctggtcaagcggcccgccgagccggggggcccccaagagccagggctggcatccagccccccaggtcgggccccgctgagcagctgctccgagctccaggtgtcccagttcatccgcaagcatgtggcctcctgcctgctggtctcagacacaagcacggagctctcctacatcctgcccagcgaggccgccaagaagggggctttcgagcgcctcttccagcacctggagcgcagcctggatgcactgcacctcagcagcttcgggctgatggacacgaccctggaggaagtgttcctcaaggtgtcggaggaggatcagtcgctggagaacagtgaggccgatgtgaaggagtccaggaaggatgtgctccctggggcggagggcccggcgtctggggagggtcacgctggcaatctggcccggtgctcggagctgacccagtcgcaggcatcgctgcagtcggcgtcatctgtgggctctgcccgtggcgacgagggagctggctacaccgacgtctatggcgactaccgccccctctttgataacccacaggacccagacaatgtcagcctgcaagaggtggaggcagaggccctgtcgagggtcggccagggcagccgcaagctggacggcgggtggctgaaggtgcgccagttccacgggctgctggtcaaacgcttccactgcgcccgccgcaactccaaggcactcttctcccagatcttgctgccagccttcttcgtctgcgtggccatgaccgtggccctgtccgtcccggagattggtgatctgcccccgctggtcctgtcaccttcccagtaccacaactacacccagccccgtggcaatttcatcccctacgccaacgaggagcgccgcgagtaccggctgcggctatcgcccgacgccagcccccagcagctcgtgagcacgttccggctgccgtcgggggtgggtgccacctgcgtgctcaagtctcccgccaacggctcgctggggcccacgttgaacctgagcagcggggagtcgcgcctgctggcggctcggttcttcgacagcatgtgtctggagtccttcacacaggggctgccactgtccaatttcgtgccacccccaccctcgcccgccccatctgactcgccagcgtccccggatgaggacctgcaggcctggaacgtctccctgccgcccaccgctgggccagaaatgtggacgtcggcaccctccctgccgcgcctggtacgggagcccgtccgctgcacctgctctgcgcagggcaccggcttctcctgccccagcagtgtgggcgggcacccgccccagatgcgggtggtcacaggcgacatcctgaccgacatcaccggccacaatgtctctgagtacctgctcttcacctccgaccgcttccgactgcaccggtatggggccatcacctttggaaacgtcctgaagtccatcccagcctcatttggcaccagggccccacccatggtgcggaagatcgcggtgcgcagggctgcccaggttttctacaacaacaagggctatcacagcatgcccacctacctcaacagcctcaacaacgccatcctgcgtgccaacctgcccaagagcaagggcaacccggcggcttacggcatcaccgtcaccaaccaccccatgaataagaccagcgccagcctctccctggattacctgctgcagggcacggatgtcgtcatcgccatcttcatcatcgtggccatgtccttcgtgccggccagcttcgttgtcttcctcgtggccgagaagtccaccaaggccaagcacctgcagtttgtcagcggctgcaaccccatcatctactggctggcgaactacgtgtgggacatgctcaactacctggtccccgctacctgctgtgtcatcatcctgtttgtgttcgacctgccggcctacacgtcgcccaccaacttccctgccgtcctctccctcttcctgctctatgggtggtccatcacgcccatcatgtacccggcctccttctggttcgaggtccccagctccgcctacgtgttcctcattgtcatcaatctcttcatcggcatcaccgccaccgtggccaccttcctgctacagctcttcgagcacgacaaggacctgaaggttgtcaacagttacctgaaaagctgcttcctcattttccccaactacaacctgggccacgggctcatggagatggcctacaacgagtacatcaacgagtactacgccaagattggccagtttgacaagatgaagtccccgttcgagtgggacattgtcacccgcggactggtggccatggcggttgagggcgtcgtgggcttcctcctgaccatcatgtgccagtacaacttcctgcggcggccacagcgcatgcctgtgtctaccaagcctgtggaggatgatgtggacgtggccagtgagcggcagcgagtgctccggggagacgccgacaatgacatggtcaagattgagaacctgaccaaggtctacaagtcccggaagattggccgtatcctggccgttgaccgcctgtgcctgggtgtgcgtcctggcgagtgcttcgggctcctgggcgtcaacggtgcgggcaagaccagcaccttcaagatgctgaccggcgacgagagcacgacggggggcgaggccttcgtcaatggacacagcgtgctgaaggagctgctccaggtgcagcagagcctcggctactgcccgcagtgtgacgcgctgttcgacgagctcacggcccgggagcacctgcagctgtacacgcggctgcgtgggatctcctggaaggacgaggcccgggtggtgaagtgggctctggagaagctggagctgaccaagtacgcagacaagccggctggcacctacagcggcggcaacaagcggaagctctccacggccatcgccctcattgggtacccagccttcatcttcctggacgagcccaccacaggcatggaccccaaggcccggcgcttcctctggaacctcatccttgacctcatcaagacagggcgttcagtggtgctgacatcacacagcatggaggagtgcgaggcgctgtgcacgcggctggccatcatggtgaacggtcgcctgcggtgcctgggcagcatccagcacctgaagaaccggtttggagatggctacatgatcacggtgcggaccaagagcagccagagtgtgaaggacgtggtgcggttcttcaaccgcaacttcccggaagccatgctcaaggagcggcaccacacaaaggtgcagtaccagctcaagtcggagcacatctcgctggcccaggtgttcagcaagatggagcaggtgtctggcgtgctgggcatcgaggactactcggtcagccagaccacactggacaatgtgttcgtgaactttgccaagaagcagagtgacaacctggagcagcaggagacggagccgccatccgcactgcagtcccctctcggctgcttgctcagcctgctccggccccggtctgcccccacggagctccgggcacttgtggcagacgagcccgaggacctggacacggaggacgagggcctcatcagcttcgaggaggagcgggcccagctgtccttcaacacggacacgctctgctgaccacccagagctgggccagggaggacacgctccactgaccacccagagctgggccagggactcaacaatggggacagaagtcccccagtgcctgccagggcctggagtggaggttcaggaccaaggggcttctggtcctccagcccctgtactcggccatgccctgtggtcactgcggttgccgcccctaattgtgccaaaggctgacccggcccgggctgcgtacacccttgccctgctttgccttaaagcctcggggtctgcccggcccctcgcccctgcctggcactgctcaccgcccaaggcgacgccggctggaccaggcactgctggcctttctcctgcccggcctcggaaccagcttttctctcttacgatgaaggctgatgccgagagcgggctgtgggcggagctgggtcagtcccgtatttattttgctttgagaagaggctcctctggccctgctctcctgcagggaggtggctgtcctgcgggaagccatcagcttgggccagctggcaggtggcaggaatggagaagctgaccctgctggccaggcaaggggccagaccccccccaacccccagctgccatcgctctcccacccagcttggccccctgcccgcccacctccctgggagccgggcctgtacatagcgcacagatgtttgttttaaataaataaacaaaatgtc

SEQ ID NO: 2906 - DNA, 8056 bp, Homo sapiens
  source 1..8056: mol_type = unassigned DNA
cgcgcagaggagcgggccgcggcgctgaggcggcggagcgtggccccgccatgggcttcctgcaccagctgcagctgctgctctggaagaacgtgacgctcaaacgccggagcccgtgggtcctggccttcgagatcttcatccccctggtgctgttctttatcctgctggggctgcgacagaagaagcccaccatctccgtgaaggaagtctccttctacacagcggcgcccctgacgtctgccggcatcctgcctgtcatgcaatcgctgtgcccggacggccagcgagacgagttcggcttcctgcagtacgccaactccacggtcacgcagctgcttgagcgcctggaccgcgtggtggaggaaggcaacctgtttgacccagcgcggcccagcctgggctcagagctcgaggccctacgccagcatctggaggccctcagtgcgggcccgggcacctcggggagccacctggacagatccacagtgtcttccttctctctggactcggtggccagaaacccgcaggagctctggcgtttcctgacgcaaaacttgtcgctgcccaatagcacggcccaagcactcttggccgcccgtgtggacccgcccgaggtctaccacctgctctttggtccctcatctgccctggattcacagtctggcctccacaagggtcaggagccctggagccgcctagggggcaatcccctgttccggatggaggagctgctgctggctcctgccctcctggagcagctcacctgcacgccgggctcgggggagctgggccggatcctcactgtgcctgagagtcagaagggagccctgcagggctaccgggatgctgtctgcagtgggcaggctgctgcgcgtgccaggcgcttctctgggctgtctgctgagctccggaaccagctggacgtggccaaggtctcccagcagctgggcctggatgcccccaacggctcggactcctcgccacaggcgccacccccacggaggctgcaggcgcttctgggggacctgctggatgcccagaaggttctgcaggatgtggatgtcctgtcggccctggccctgctactgccccagggtgcctgcactggccggacccccggacccccagccagtggtgcgggtggggcggccaatggcactggggcaggggcagtcatgggccccaacgccaccgctgaggagggcgcaccctctgctgcagcactggccaccccggacacgctgcagggccagtgctcagccttcgtacagctctgggccggcctgcagcccatcttgtgtggcaacaaccgcaccattgaacccgaggcgctgcggcggggcaacatgagctccctgggcttcacgagcaaggagcagcggaacctgggcctcctcgtgcacctcatgaccagcaaccccaaaatcctgtacgcgcctgcgggctctgaggtcgaccgcgtcatcctcaaggccaacgagacttttgcttttgtgggcaacgtgactcactatgcccaggtctggctcaacatctcggcggagatccgcagcttcctggagcagggcaggctgcagcaacacctgcgctggctgcagcagtatgtagcagagctgcggctgcaccccgaggcactgaacctgtcactggatgagctgccgccggccctgagacaggacaacttctcgctgcccagtggcatggccctcctgcagcagctggataccattgacaacgcggcctgcggctggatccagttcatgtccaaggtgagcgtggacatcttcaagggcttccacgacgaggagagcattgtcaactacaccctcaaccaggcctaccaggacaacgtcactgtttttgccagtgtgatcttccagacccggaaggacggctcgctcccgcctcacgtgcactacaagatccgccagaactccagcttcaccgagaaaaccaacgagatccgccgcgcctactggcggcctgggcccaatactggcggccgcttctacttcctctacggcttcgtctggatccaggacatgatggagcgcgccatcatcgacacttttgtggggcacgatgtggtggagccaggcagctacgtgcagatgttcccctacccctgctacacacgcgatgacttcctgtttgtcattgagcacatgatgccgctgtgcatggtgatctcctgggtctactccgtggccatgaccatccagcacatcgtggcggagaaggagcaccggctcaaggaggtgatgaagaccatgggcctgaacaacgcggtgcactgggtggcctggttcatcaccggctttgtgcagctgtccatctccgtgacagcactcaccgccatcctgaagtacggccaggtgcttatgcacagccacgtggtcatcatctggctcttcctggcagtctacgcggtggccaccatcatgttctgcttcctggtgtctgtgctgtactccaaggccaagctggcctcggcctgcggtggcatcatctacttcctgagctacgtgccctacatgtacgtggcgatccgagaggaggtggcgcatgataagatcacggccttcgagaagtgcatcgcgtccctcatgtccacgacggcctttggtctgggctctaagtacttcgcgctgtatgaggtggccggcgtgggcatccagtggcacaccttcagccagtccccggtggagggggacgacttcaacttgctcctggctgtcaccatgctgatggtggacgccgtggtctatggcatcctcacgtggtacattgaggctgtgcacccaggcatgtacgggctgccccggccctggtacttcccactgcagaagtcctactggctgggcagtgggcggacagaagcctgggagtggagctggccgtgggcacgcaccccccgcctcagtgtcatggaggaggaccaggcctgtgccatggagagccggcgctttgaggagacccgtggcatggaggaggagcccacccacctgcctctggttgtctgcgtggacaaactcaccaaggtctacaaggacgacaagaagctggccctgaacaagctgagcctgaacctctacgagaaccaggtggtctccttcttgggccacaacggggcgggcaagaccaccaccatgtccatcctgaccggcctgttccctccaacgtcgggttccgccaccatctacgggcacgacatccgcacggagatggatgagatccgcaagaacctgggcatgtgcccgcagcacaatgtgctctttgaccggctcacggtggaggaacacctctggttctactcacggctcaagagcatggctcaggaggagatccgcagagagatggacaagatgatcgaggacctggagctctccaacaaacggcactcactggtgcagacattgtcgggtggcatgaagcgcaagctgtccgtggccatcgccttcgtgggcggctctcgcgccatcatcctggacgagcccacggcgggcgtggacccctacgcgcgccgcgccatctgggacctcatcctgaagtacaagccaggccgcaccatccttctgtccacccaccacatggatgaggctgacctgcttggggaccgcattgccatcatctcccatgggaagctcaagtgctgcggctccccgctcttcctcaagggcacctatggcgacgggtaccgcctcacgctggtcaagcggcccgccgagccggggggcccccaagagccagggctggcatccagccccccaggtcgggccccgctgagcagctgctccgagctccaggtgtcccagttcatccgcaagcatgtggcctcctgcctgctggtctcagacacaagcacggagctctcctacatcctgcccagcgaggccgccaagaagggggctttcgagcgcctcttccagcacctggagcgcagcctggatgcactgcacctcagcagcttcgggctgatggacacgaccctggaggaagtgttcctcaaggtgtcggaggaggatcagtcgctggagaacagtgaggccgatgtgaaggagtccaggaaggatgtgctccctggggcggagggcccggcgtctggggagggtcacgctggcaatctggcccggtgctcggagctgacccagtcgcaggcatcgctgcagtcggcgtcatctgtgggctctgcccgtggcgacgagggagctggctacaccgacgtctatggcgactaccgccccctctttgataacccacaggacccagacaatgtcagcctgcaagaggtggaggcagaggccctgtcgagggtcggccagggcagccgcaagctggacggcgggtggctgaaggtgcgccagttccacgggctgctggtcaaacgcttccactgcgcccgccgcaactccaaggcactcttctcccagatcttgctgccagccttcttcgtctgcgtggccatgaccgtggccctgtccgtcccggagattggtgatctgcccccgctggtcctgtcaccttcccagtaccacaactacacccagccccgtggcaatttcatcccctacgccaacgaggagcgccgcgagtaccggctgcggctatcgcccgacgccagcccccagcagctcgtgagcacgttccggctgccgtcgggggtgggtgccacctgcgtgctcaagtctcccgccaacggctcgctggggcccacgttgaacctgagcagcggggagtcgcgcctgctggcggctcggttcttcgacagcatgtgtctggagtccttcacacaggggctgccactgtccaatttcgtgccacccccaccctcgcccgccccatctgactcgccagcgtccccggatgaggacctgcaggcctggaacgtctccctgccgcccaccgctgggccagaaatgtggacgtcggcaccctccctgccgcgcctggtacgggagcccgtccgctgcacctgctctgcgcagggcaccggcttctcctgccccagcagtgtgggcgggcacccgccccagatgcgggtggtcacaggcgacatcctgaccgacatcaccggccacaatgtctctgagtacctgctcttcacctccgaccgcttccgactgcaccggtatggggccatcacctttggaaacgtcctgaagtccatcccagcctcatttggcaccagggccccacccatggtgcggaagatcgcggtgcgcagggctgcccaggttttctacaacaacaagggctatcacagcatgcccacctacctcaacagcctcaacaacgccatcctgcgtgccaacctgcccaagagcaagggcaacccggcggcttacggcatcaccgtcaccaaccaccccatgaataagaccagcgccagcctctccctggattacctgctgcagggcacggatgtcgtcatcgccatcttcatcatcgtggccatgtccttcgtgccggccagcttcgttgtcttcctcgtggccgagaagtccaccaaggccaagcacctgcagtttgtcagcggctgcaaccccatcatctactggctggcgaactacgtgtgggacatgctcaactacctggtccccgctacctgctgtgtcatcatcctgtttgtgttcgacctgccggcctacacgtcgcccaccaacttccctgccgtcctctccctcttcctgctctatgggtggtccatcacgcccatcatgtacccggcctccttctggttcgaggtccccagctccgcctacgtgttcctcattgtcatcaatctcttcatcggcatcaccgccaccgtggccaccttcctgctacagctcttcgagcacgacaaggacctgaaggttgtcaacagttacctgaaaagctgcttcctcattttccccaactacaacctgggccacgggctcatggagatggcctacaacgagtacatcaacgagtactacgccaagattggccagtttgacaagatgaagtccccgttcgagtgggacattgtcacccgcggactggtggccatggcggttgagggcgtcgtgggcttcctcctgaccatcatgtgccagtacaacttcctgcggcggccacagcgcatgcctgtgtctaccaagcctgtggaggatgatgtggacgtggccagtgagcggcagcgagtgctccggggagacgccgacaatgacatggtcaagattgagaacctgaccaaggtctacaagtcccggaagattggccgtatcctggccgttgaccgcctgtgcctgggtgtgcgtcctggcgagtgcttcgggctcctgggcgtcaacggtgcgggcaagaccagcaccttcaagatgctgaccggcgacgagagcacgacggggggcgaggccttcgtcaatggacacagcgtgctgaaggagctgctccaggtgcagcagagcctcggctactgcccgcagtgtgacgcgctgttcgacgagctcacggcccgggagcacctgcagctgtacacgcggctgcgtgggatctcctggaaggacgaggcccgggtggtgaagtgggctctggagaagctggagctgaccaagtacgcagacaagccggctggcacctacagcggcggcaacaagcggaagctctccacggccatcgccctcattgggtacccagccttcatcttcctggacgagcccaccacaggcatggaccccaaggcccggcgcttcctctggaacctcatccttgacctcatcaagacagggcgttcagtggtgctgacatcacacagcatggaggagtgcgaggcgctgtgcacgcggctggccatcatggtgaacggtcgcctgcggtgcctgggcagcatccagcacctgaagaaccggtttggagatggctacatgatcacggtgcggaccaagagcagccagagtgtgaaggacgtggtgcggttcttcaaccgcaacttcccggaagccatgctcaaggagcggcaccacacaaaggtgcagtaccagctcaagtcggagcacatctcgctggcccaggtgttcagcaagatggagcaggtgtctggcgtgctgggcatcgaggactactcggtcagccagaccacactggacaatgtgttcgtgaactttgccaagaagcagagtgacaacctggagcagcaggagacggagccgccatccgcactgcagtcccctctcggctgcttgctcagcctgctccggccccggtctgcccccacggagctccgggcacttgtggcagacgagcccgaggacctggacacggaggacgagggcctcatcagcttcgaggaggagcgggcccagctgtccttcaacacggacacgctctgctgaccacccagagctgggccagggaggacacgctccactgaccacccagagctgggccagggactcaacaatggggacagaagtcccccagtgcctgccagggcctggagtggaggttcaggaccaaggggcttctggtcctccagcccctgtactcggccatgccctgtggtcactgcggttgccgcccctaattgtgccaaaggctgacccggcccgggctgcgtacacccttgccctgctttgccttaaagcctcggggtctgcccggcccctcgcccctgcctggcactgctcaccgcccaaggcgacgccggctggaccaggcactgctggcctttctcctgcccggcctcggaaccagcttttctctcttacgatgaaggctgatgccgagagcgggctgtgggcggagctgggtcagtcccgtatttattttgctttgagaagaggctcctctggccctgctctcctgcagggaggtggctgtcctgcgggaagccatcagcttgggccagctggcaggtggcaggaatggagaagctgaccctgctggccaggcaaggggccagaccccccccaacccccagctgccatcgctctcccacccagcttggccccctgcccgcccacctccctgggagccgggcctgtacatagcgcacagatgtttgttttaaataaataaacaaaatgtc

SEQ ID NO: 2907 - DNA, 8146 bp, Homo sapiens
  source 1..8146: mol_type = unassigned DNA
agaaccgcctgatcccgaactccctgtgcagagaccagactcgcccgaatatggggagaaaaacgagccgcgtgcagcaggggccgcctcggtcccctgcctgctccgctcacggcgagcgttcctggggcctcgagtttccccccttccgctggctgctcggaatcgcgggacggacccacctggccgccctgcctcccttccagtgggtcctggccttcgagatcttcatccccctggtgctgttctttatcctgctggggctgcgacagaagaagcccaccatctccgtgaaggaagtcgccttctacacagcggcgcccctgacgtctgccggcatcctgcctgtcatgcaatcgctgtgcccggacggccagcgagacgagttcggcttcctgcagtacgccaactccacggtcacgcagctgcttgagcgcctggaccgcgtggtggaggaaggcaacctgtttgacccagcgcggcccagcctgggctcagagctcgaggccctacgccagcatctggaggccctcagtgcgggcccgggcacctcggggagccacctggacagatccacagtgtcttccttctctctggactcggtggccagaaacccgcaggagctctggcgtttcctgacgcaaaacttgtcgctgcccaatagcacggcccaagcactcttggccgcccgtgtggacccgcccgaggtctaccacctgctctttggtccctcatctgccctggattcacagtctggcctccacaagggtcaggagccctggagccgcctagggggcaatcccctgttccggatggaggagctgctgctggctcctgccctcctggagcagctcacctgcacgccgggctcgggggagctgggccggatcctcactgtgcctgagagtcagaagggagccctgcagggctaccgggatgctgtctgcagtgggcaggctgctgcgcgtgccaggcgcttctctgggctgtctgctgagctccggaaccagctggacgtggccaaggtctcccagcagctgggcctggatgcccccaacggctcggactcctcgccacaggcgccacccccacggaggctgcaggcgcttctgggggacctgctggatgcccagaaggttctgcaggatgtggatgtcctgtcggccctggccctgctactgccccagggtgcctgcactggccggacccccggacccccagccagtggtgcgggtggggcggccaatggcactggggcaggggcagtcatgggccccaacgccaccgctgaggagggcgcaccctctgctgcagcactggccaccccggacacgctgcagggccagtgctcagccttcgtacagctctgggccggcctgcagcccatcttgtgtggcaacaaccgcaccattgaacccgaggcgctgcggcggggcaacatgagctccctgggcttcacgagcaaggagcagcggaacctgggcctcctcgtgcacctcatgaccagcaaccccaaaatcctgtacgcgcctgcgggctctgaggtcgaccgcgtcatcctcaaggccaacgagacttttgcttttgtgggcaacgtgactcactatgcccaggtctggctcaacatctcggcggagatccgcagcttcctggagcagggcaggctgcagcaacacctgcgctggctgcagcagtatgtagcagagctgcggctgcaccccgaggcactgaacctgtcactggatgagctgccgccggccctgagacaggacaacttctcgctgcccagtggcatggccctcctgcagcagctggataccattgacaacgcggcctgcggctggatccagttcatgtccaaggtgagcgtggacatcttcaagggcttccacgacgaggagagcattgtcaactacaccctcaaccaggcctaccaggacaacgtcactgtttttgccagtgtgatcttccagacccggaaggacggctcgctcccgcctcacgtgcactacaagatccgccagaactccagcttcaccgagaaaaccaacgagatccgccgcgcctactggcggcctgggcccaatactggcggccgcttctacttcctctacggcttcgtctggatccaggacatgatggagcgcgccatcatcgacacttttgtggggcacgatgtggtggagccaggcagctacgtgcagatgttcccctacccctgctacacacgcgatgacttcctgtttgtcattgagcacatgatgccgctgtgcatggtgatctcctgggtctactccgtggccatgaccatccagcacatcgtggcggagaaggagcaccggctcaaggaggtgatgaagaccatgggcctgaacaacgcggtgcactgggtggcctggttcatcaccggctttgtgcagctgtccatctccgtgacagcactcaccgccatcctgaagtacggccaggtgcttatgcacagccacgtggtcatcatctggctcttcctggcagtctacgcggtggccaccatcatgttctgcttcctggtgtctgtgctgtactccaaggccaagctggcctcggcctgcggtggcatcatctacttcctgagctacgtgccctacatgtacgtggcgatccgagaggaggtggcgcatgataagatcacggccttcgagaagtgcatcgcgtccctcatgtccacgacggcctttggtctgggctctaagtacttcgcgctgtatgaggtggccggcgtgggcatccagtggcacaccttcagccagtccccggtggagggggacgacttcaacttgctcctggctgtcaccatgctgatggtggacgccgtggtctatggcatcctcacgtggtacattgaggctgtgcacccaggcatgtacgggctgccccggccctggtacttcccactgcagaagtcctactggctgggcagtgggcggacagaagcctgggagtggagctggccgtgggcacgcaccccccgcctcagtgtcatggaggaggaccaggcctgtgccatggagagccggcgctttgaggagacccgtggcatggaggaggagcccacccacctgcctctggttgtctgcgtggacaaactcaccaaggtctacaaggacgacaagaagctggccctgaacaagctgagcctgaacctctacgagaaccaggtggtctccttcttgggccacaacggggcgggcaagaccaccaccatgtccatcctgaccggcctgttccctccaacgtcgggttccgccaccatctacgggcacgacatccgcacggagatggatgagatccgcaagaacctgggcatgtgcccgcagcacaatgtgctctttgaccggctcacggtggaggaacacctctggttctactcacggctcaagagcatggctcaggaggagatccgcagagagatggacaagatgatcgaggacctggagctctccaacaaacggcactcactggtgcagacattgtcgggtggcatgaagcgcaagctgtccgtggccatcgccttcgtgggcggctctcgcgccatcatcctggacgagcccacggcgggcgtggacccctacgcgcgccgcgccatctgggacctcatcctgaagtacaagccaggccgcaccatccttctgtccacccaccacatggatgaggctgacctgcttggggaccgcattgccatcatctcccatgggaagctcaagtgctgcggctccccgctcttcctcaagggcacctatggcgacgggtaccgcctcacgctggtcaagcggcccgccgagccggggggcccccaagagccagggctggcatccagccccccaggtcgggccccgctgagcagctgctccgagctccaggtgtcccagttcatccgcaagcatgtggcctcctgcctgctggtctcagacacaagcacggagctctcctacatcctgcccagcgaggccgccaagaagggggctttcgagcgcctcttccagcacctggagcgcagcctggatgcactgcacctcagcagcttcgggctgatggacacgaccctggaggaagtgttcctcaaggtgtcggaggaggatcagtcgctggagaacagtgaggccgatgtgaaggagtccaggaaggatgtgctccctggggcggagggcccggcgtctggggagggtcacgctggcaatctggcccggtgctcggagctgacccagtcgcaggcatcgctgcagtcggcgtcatctgtgggctctgcccgtggcgacgagggagctggctacaccgacgtctatggcgactaccgccccctctttgataacccacaggacccagacaatgtcagcctgcaagaggtggaggcagaggccctgtcgagggtcggccagggcagccgcaagctggacggcgggtggctgaaggtgcgccagttccacgggctgctggtcaaacgcttccactgcgcccgccgcaactccaaggcactcttctcccagatcttgctgccagccttcttcgtctgcgtggccatgaccgtggccctgtccgtcccggagattggtgatctgcccccgctggtcctgtcaccttcccagtaccacaactacacccagccccgtggcaatttcatcccctacgccaacgaggagcgccgcgagtaccggctgcggctatcgcccgacgccagcccccagcagctcgtgagcacgttccggctgccgtcgggggtgggtgccacctgcgtgctcaagtctcccgccaacggctcgctggggcccacgttgaacctgagcagcggggagtcgcgcctgctggcggctcggttcttcgacagcatgtgtctggagtccttcacacaggggctgccactgtccaatttcgtgccacccccaccctcgcccgccccatctgactcgccagcgtccccggatgaggacctgcaggcctggaacgtctccctgccgcccaccgctgggccagaaatgtggacgtcggcaccctccctgccgcgcctggtacgggagcccgtccgctgcacctgctctgcgcagggcaccggcttctcctgccccagcagtgtgggcgggcacccgccccagatgcgggtggtcacaggcgacatcctgaccgacatcaccggccacaatgtctctgagtacctgctcttcacctccgaccgcttccgactgcaccggtatggggccatcacctttggaaacgtcctgaagtccatcccagcctcatttggcaccagggccccacccatggtgcggaagatcgcggtgcgcagggctgcccaggttttctacaacaacaagggctatcacagcatgcccacctacctcaacagcctcaacaacgccatcctgcgtgccaacctgcccaagagcaagggcaacccggcggcttacggcatcaccgtcaccaaccaccccatgaataagaccagcgccagcctctccctggattacctgctgcagggcacggatgtcgtcatcgccatcttcatcatcgtggccatgtccttcgtgccggccagcttcgttgtcttcctcgtggccgagaagtccaccaaggccaagcacctgcagtttgtcagcggctgcaaccccatcatctactggctggcgaactacgtgtgggacatgctcaactacctggtccccgctacctgctgtgtcatcatcctgtttgtgttcgacctgccggcctacacgtcgcccaccaacttccctgccgtcctctccctcttcctgctctatgggtggtccatcacgcccatcatgtacccggcctccttctggttcgaggtccccagctccgcctacgtgttcctcattgtcatcaatctcttcatcggcatcaccgccaccgtggccaccttcctgctacagctcttcgagcacgacaaggacctgaaggttgtcaacagttacctgaaaagctgcttcctcattttccccaactacaacctgggccacgggctcatggagatggcctacaacgagtacatcaacgagtactacgccaagattggccagtttgacaagatgaagtccccgttcgagtgggacattgtcacccgcggactggtggccatggcggttgagggcgtcgtgggcttcctcctgaccatcatgtgccagtacaacttcctgcggcggccacagcgcatgcctgtgtctaccaagcctgtggaggatgatgtggacgtggccagtgagcggcagcgagtgctccggggagacgccgacaatgacatggtcaagattgagaacctgaccaaggtctacaagtcccggaagattggccgtatcctggccgttgaccgcctgtgcctgggtgtgcgtcctggcgagtgcttcgggctcctgggcgtcaacggtgcgggcaagaccagcaccttcaagatgctgaccggcgacgagagcacgacggggggcgaggccttcgtcaatggacacagcgtgctgaaggagctgctccaggtgcagcagagcctcggctactgcccgcagtgtgacgcgctgttcgacgagctcacggcccgggagcacctgcagctgtacacgcggctgcgtgggatctcctggaaggacgaggcccgggtggtgaagtgggctctggagaagctggagctgaccaagtacgcagacaagccggctggcacctacagcggcggcaacaagcggaagctctccacggccatcgccctcattgggtacccagccttcatcttcctggacgagcccaccacaggcatggaccccaaggcccggcgcttcctctggaacctcatccttgacctcatcaagacagggcgttcagtggtgctgacatcacacagcatggaggagtgcgaggcgctgtgcacgcggctggccatcatggtgaacggtcgcctgcggtgcctgggcagcatccagcacctgaagaaccggtttggagatggctacatgatcacggtgcggaccaagagcagccagagtgtgaaggacgtggtgcggttcttcaaccgcaacttcccggaagccatgctcaaggagcggcaccacacaaaggtgcagtaccagctcaagtcggagcacatctcgctggcccaggtgttcagcaagatggagcaggtgtctggcgtgctgggcatcgaggactactcggtcagccagaccacactggacaatgtgttcgtgaactttgccaagaagcagagtgacaacctggagcagcaggagacggagccgccatccgcactgcagtcccctctcggctgcttgctcagcctgctccggccccggtctgcccccacggagctccgggcacttgtggcagacgagcccgaggacctggacacggaggacgagggcctcatcagcttcgaggaggagcgggcccagctgtccttcaacacggacacgctctgctgaccacccagagctgggccagggaggacacgctccactgaccacccagagctgggccagggactcaacaatggggacagaagtcccccagtgcctgccagggcctggagtggaggttcaggaccaaggggcttctggtcctccagcccctgtactcggccatgccctgtggtcactgcggttgccgcccctaattgtgccaaaggctgacccggcccgggctgcgtacacccttgccctgctttgccttaaagcctcggggtctgcccggcccctcgcccctgcctggcactgctcaccgcccaaggcgacgccggctggaccaggcactgctggcctttctcctgcccggcctcggaaccagcttttctctcttacgatgaaggctgatgccgagagcgggctgtgggcggagctgggtcagtcccgtatttattttgctttgagaagaggctcctctggccctgctctcctgcagggaggtggctgtcctgcgggaagccatcagcttgggccagctggcaggtggcaggaatggagaagctgaccctgctggccaggcaaggggccagaccccccccaacccccagctgccatcgctctcccacccagcttggccccctgcccgcccacctccctgggagccgggcctgtacatagcgcacagatgtttgttttaaataaataaacaaaatgtc

SEQ ID NO: 2908 - DNA, 8151 bp, Homo sapiens
  source 1..8151: mol_type = unassigned DNA
ggggcggagccagcgcggatcgggtcccggacgcccgagcgccccgcccccgcgcgggcgatgcccagcggcgcggcgggctgcggggcccggcggggcgcgcagaggagcgggccgcggcgctgaggcggcggagcgtggccccgccatgggcttcctgcaccagctgcagctgctgctctggaagaacgtgacgctcaaacgccggagcccgtgggtcctggccttcgagatcttcatccccctggtgctgttctttatcctgctggggctgcgacagaagaagcccaccatctccgtgaaggaagccttctacacagcggcgcccctgacgtctgccggcatcctgcctgtcatgcaatcgctgtgcccggacggccagcgagacgagttcggcttcctgcagtacgccaactccacggtcacgcagctgcttgagcgcctggaccgcgtggtggaggaaggcaacctgtttgacccagcgcggcccagcctgggctcagagctcgaggccctacgccagcatctggaggccctcagtgcgggcccgggcacctcggggagccacctggacagatccacagtgtcttccttctctctggactcggtggccagaaacccgcaggagctctggcgtttcctgacgcaaaacttgtcgctgcccaatagcacggcccaagcactcttggccgcccgtgtggacccgcccgaggtctaccacctgctctttggtccctcatctgccctggattcacagtctggcctccacaagggtcaggagccctggagccgcctagggggcaatcccctgttccggatggaggagctgctgctggctcctgccctcctggagcagctcacctgcacgccgggctcgggggagctgggccggatcctcactgtgcctgagagtcagaagggagccctgcagggctaccgggatgctgtctgcagtgggcaggctgctgcgcgtgccaggcgcttctctgggctgtctgctgagctccggaaccagctggacgtggccaaggtctcccagcagctgggcctggatgcccccaacggctcggactcctcgccacaggcgccacccccacggaggctgcaggcgcttctgggggacctgctggatgcccagaaggttctgcaggatgtggatgtcctgtcggccctggccctgctactgccccagggtgcctgcactggccggacccccggacccccagccagtggtgcgggtggggcggccaatggcactggggcaggggcagtcatgggccccaacgccaccgctgaggagggcgcaccctctgctgcagcactggccaccccggacacgctgcagggccagtgctcagccttcgtacagctctgggccggcctgcagcccatcttgtgtggcaacaaccgcaccattgaacccgaggcgctgcggcggggcaacatgagctccctgggcttcacgagcaaggagcagcggaacctgggcctcctcgtgcacctcatgaccagcaaccccaaaatcctgtacgcgcctgcgggctctgaggtcgaccgcgtcatcctcaaggccaacgagacttttgcttttgtgggcaacgtgactcactatgcccaggtctggctcaacatctcggcggagatccgcagcttcctggagcagggcaggctgcagcaacacctgcgctggctgcagcagtatgtagcagagctgcggctgcaccccgaggcactgaacctgtcactggatgagctgccgccggccctgagacaggacaacttctcgctgcccagtggcatggccctcctgcagcagctggataccattgacaacgcggcctgcggctggatccagttcatgtccaaggtgagcgtggacatcttcaagggcttccacgacgaggagagcattgtcaactacaccctcaaccaggcctaccaggacaacgtcactgtttttgccagtgtgatcttccagacccggaaggacggctcgctcccgcctcacgtgcactacaagatccgccagaactccagcttcaccgagaaaaccaacgagatccgccgcgcctactggcggcctgggcccaatactggcggccgcttctacttcctctacggcttcgtctggatccaggacatgatggagcgcgccatcatcgacacttttgtggggcacgatgtggtggagccaggcagctacgtgcagatgttcccctacccctgctacacacgcgatgacttcctgtttgtcattgagcacatgatgccgctgtgcatggtgatctcctgggtctactccgtggccatgaccatccagcacatcgtggcggagaaggagcaccggctcaaggaggtgatgaagaccatgggcctgaacaacgcggtgcactgggtggcctggttcatcaccggctttgtgcagctgtccatctccgtgacagcactcaccgccatcctgaagtacggccaggtgcttatgcacagccacgtggtcatcatctggctcttcctggcagtctacgcggtggccaccatcatgttctgcttcctggtgtctgtgctgtactccaaggccaagctggcctcggcctgcggtggcatcatctacttcctgagctacgtgccctacatgtacgtggcgatccgagaggaggtggcgcatgataagatcacggccttcgagaagtgcatcgcgtccctcatgtccacgacggcctttggtctgggctctaagtacttcgcgctgtatgaggtggccggcgtgggcatccagtggcacaccttcagccagtccccggtggagggggacgacttcaacttgctcctggctgtcaccatgctgatggtggacgccgtggtctatggcatcctcacgtggtacattgaggctgtgcacccaggcatgtacgggctgccccggccctggtacttcccactgcagaagtcctactggctgggcagtgggcggacagaagcctgggagtggagctggccgtgggcacgcaccccccgcctcagtgtcatggaggaggaccaggcctgtgccatggagagccggcgctttgaggagacccgtggcatggaggaggagcccacccacctgcctctggttgtctgcgtggacaaactcaccaaggtctacaaggacgacaagaagctggccctgaacaagctgagcctgaacctctacgagaaccaggtggtctccttcttgggccacaacggggcgggcaagaccaccaccatgtccatcctgaccggcctgttccctccaacgtcgggttccgccaccatctacgggcacgacatccgcacggagatggatgagatccgcaagaacctgggcatgtgcccgcagcacaatgtgctctttgaccggctcacggtggaggaacacctctggttctactcacggctcaagagcatggctcaggaggagatccgcagagagatggacaagatgatcgaggacctggagctctccaacaaacggcactcactggtgcagacattgtcgggtggcatgaagcgcaagctgtccgtggccatcgccttcgtgggcggctctcgcgccatcatcctggacgagcccacggcgggcgtggacccctacgcgcgccgcgccatctgggacctcatcctgaagtacaagccaggccgcaccatccttctgtccacccaccacatggatgaggctgacctgcttggggaccgcattgccatcatctcccatgggaagctcaagtgctgcggctccccgctcttcctcaagggcacctatggcgacgggtaccgcctcacgctggtcaagcggcccgccgagccggggggcccccaagagccagggctggcatccagccccccaggtcgggccccgctgagcagctgctccgagctccaggtgtcccagttcatccgcaagcatgtggcctcctgcctgctggtctcagacacaagcacggagctctcctacatcctgcccagcgaggccgccaagaagggggctttcgagcgcctcttccagcacctggagcgcagcctggatgcactgcacctcagcagcttcgggctgatggacacgaccctggaggaagtgttcctcaaggtgtcggaggaggatcagtcgctggagaacagtgaggccgatgtgaaggagtccaggaaggatgtgctccctggggcggagggcccggcgtctggggagggtcacgctggcaatctggcccggtgctcggagctgacccagtcgcaggcatcgctgcagtcggcgtcatctgtgggctctgcccgtggcgacgagggagctggctacaccgacgtctatggcgactaccgccccctctttgataacccacaggacccagacaatgtcagcctgcaagaggtggaggcagaggccctgtcgagggtcggccagggcagccgcaagctggacggcgggtggctgaaggtgcgccagttccacgggctgctggtcaaacgcttccactgcgcccgccgcaactccaaggcactcttctcccagatcttgctgccagccttcttcgtctgcgtggccatgaccgtggccctgtccgtcccggagattggtgatctgcccccgctggtcctgtcaccttcccagtaccacaactacacccagccccgtggcaatttcatcccctacgccaacgaggagcgccgcgagtaccggctgcggctatcgcccgacgccagcccccagcagctcgtgagcacgttccggctgccgtcgggggtgggtgccacctgcgtgctcaagtctcccgccaacggctcgctggggcccacgttgaacctgagcagcggggagtcgcgcctgctggcggctcggttcttcgacagcatgtgtctggagtccttcacacaggggctgccactgtccaatttcgtgccacccccaccctcgcccgccccatctgactcgccagcgtccccggatgaggacctgcaggcctggaacgtctccctgccgcccaccgctgggccagaaatgtggacgtcggcaccctccctgccgcgcctggtacgggagcccgtccgctgcacctgctctgcgcagggcaccggcttctcctgccccagcagtgtgggcgggcacccgccccagatgcgggtggtcacaggcgacatcctgaccgacatcaccggccacaatgtctctgagtacctgctcttcacctccgaccgcttccgactgcaccggtatggggccatcacctttggaaacgtcctgaagtccatcccagcctcatttggcaccagggccccacccatggtgcggaagatcgcggtgcgcagggctgcccaggttttctacaacaacaagggctatcacagcatgcccacctacctcaacagcctcaacaacgccatcctgcgtgccaacctgcccaagagcaagggcaacccggcggcttacggcatcaccgtcaccaaccaccccatgaataagaccagcgccagcctctccctggattacctgctgcagggcacggatgtcgtcatcgccatcttcatcatcgtggccatgtccttcgtgccggccagcttcgttgtcttcctcgtggccgagaagtccaccaaggccaagcacctgcagtttgtcagcggctgcaaccccatcatctactggctggcgaactacgtgtgggacatgctcaactacctggtccccgctacctgctgtgtcatcatcctgtttgtgttcgacctgccggcctacacgtcgcccaccaacttccctgccgtcctctccctcttcctgctctatgggtggtccatcacgcccatcatgtacccggcctccttctggttcgaggtccccagctccgcctacgtgttcctcattgtcatcaatctcttcatcggcatcaccgccaccgtggccaccttcctgctacagctcttcgagcacgacaaggacctgaaggttgtcaacagttacctgaaaagctgcttcctcattttccccaactacaacctgggccacgggctcatggagatggcctacaacgagtacatcaacgagtactacgccaagattggccagtttgacaagatgaagtccccgttcgagtgggacattgtcacccgcggactggtggccatggcggttgagggcgtcgtgggcttcctcctgaccatcatgtgccagtacaacttcctgcggcggccacagcgcatgcctgtgtctaccaagcctgtggaggatgatgtggacgtggccagtgagcggcagcgagtgctccggggagacgccgacaatgacatggtcaagattgagaacctgaccaaggtctacaagtcccggaagattggccgtatcctggccgttgaccgcctgtgcctgggtgtgcgtcctggcgagtgcttcgggctcctgggcgtcaacggtgcgggcaagaccagcaccttcaagatgctgaccggcgacgagagcacgacggggggcgaggccttcgtcaatggacacagcgtgctgaaggagctgctccaggtgcagcagagcctcggctactgcccgcagtgtgacgcgctgttcgacgagctcacggcccgggagcacctgcagctgtacacgcggctgcgtgggatctcctggaaggacgaggcccgggtggtgaagtgggctctggagaagctggagctgaccaagtacgcagacaagccggctggcacctacagcggcggcaacaagcggaagctctccacggccatcgccctcattgggtacccagccttcatcttcctggacgagcccaccacaggcatggaccccaaggcccggcgcttcctctggaacctcatccttgacctcatcaagacagggcgttcagtggtgctgacatcacacagcatggaggagtgcgaggcgctgtgcacgcggctggccatcatggtgaacggtcgcctgcggtgcctgggcagcatccagcacctgaagaaccggtttggagatggctacatgatcacggtgcggaccaagagcagccagagtgtgaaggacgtggtgcggttcttcaaccgcaacttcccggaagccatgctcaaggagcggcaccacacaaaggtgcagtaccagctcaagtcggagcacatctcgctggcccaggtgttcagcaagatggagcaggtgtctggcgtgctgggcatcgaggactactcggtcagccagaccacactggacaatgtgttcgtgaactttgccaagaagcagagtgacaacctggagcagcaggagacggagccgccatccgcactgcagtcccctctcggctgcttgctcagcctgctccggccccggtctgcccccacggagctccgggcacttgtggcagacgagcccgaggacctggacacggaggacgagggcctcatcagcttcgaggaggagcgggcccagctgtccttcaacacggacacgctctgctgaccacccagagctgggccagggaggacacgctccactgaccacccagagctgggccagggactcaacaatggggacagaagtcccccagtgcctgccagggcctggagtggaggttcaggaccaaggggcttctggtcctccagcccctgtactcggccatgccctgtggtcactgcggttgccgcccctaattgtgccaaaggctgacccggcccgggctgcgtacacccttgccctgctttgccttaaagcctcggggtctgcccggcccctcgcccctgcctggcactgctcaccgcccaaggcgacgccggctggaccaggcactgctggcctttctcctgcccggcctcggaaccagcttttctctcttacgatgaaggctgatgccgagagcgggctgtgggcggagctgggtcagtcccgtatttattttgctttgagaagaggctcctctggccctgctctcctgcagggaggtggctgtcctgcgggaagccatcagcttgggccagctggcaggtggcaggaatggagaagctgaccctgctggccaggcaaggggccagaccccccccaacccccagctgccatcgctctcccacccagcttggccccctgcccgcccacctccctgggagccgggcctgtacatagcgcacagatgtttgttttaaataaataaacaaaatgtc

SEQ ID NO: 2909 - DNA, 3299 bp, Homo sapiens
  source 1..3299: mol_type = unassigned DNA
ctcggttcttcgacagcatgtgtctggagtccttcacacaggggctgccactgtccaatttcgtgccacccccaccctcgcccgccccatctgactcgccagcgtccccggatgaggacctgcaggcctggaacgtctccctgccgcccaccgctgggccagaaatgtggacgtcggcaccctccctgccgcgcctggtacgggagcccgtccgctgcacctgctctgcgcagggcaccggcttctcctgccccagcagtgtgggcgggcacccgccccagatgcgggtggtcacaggcgacatcctgaccgacatcaccggccacaatgtctctgagtacctgctcttcacctccgaccgcttccgactgcaccggtatggggccatcacctttggaaacgtcctgaagtccatcccagcctcatttggcaccagggccccacccatggtgcggaagatcgcggtgcgcagggctgcccaggttttctacaacaacaagggctatcacagcatgcccacctacctcaacagcctcaacaacgccatcctgcgtgccaacctgcccaagagcaagggcaacccggcggcttacggcatcaccgtcaccaaccaccccatgaataagaccagcgccagcctctccctggattacctgctgcagggcacggatgtcgtcatcgccatcttcatcatcgtggccatgtccttcgtgccggccagcttcgttgtcttcctcgtggccgagaagtccaccaaggccaagcacctgcagtttgtcagcggctgcaaccccatcatctactggctggcgaactacgtgtgggacatgctcaactacctggtccccgctacctgctgtgtcatcatcctgtttgtgttcgacctgccggcctacacgtcgcccaccaacttccctgccgtcctctccctcttcctgctctatgggtggtccatcacgcccatcatgtacccggcctccttctggttcgaggtccccagctccgcctacgtgttcctcattgtcatcaatctcttcatcggcatcaccgccaccgtggccaccttcctgctacagctcttcgagcacgacaaggacctgaaggttgtcaacagttacctgaaaagctgcttcctcattttccccaactacaacctgggccacgggctcatggagatggcctacaacgagtacatcaacgagtactacgccaagattggccagtttgacaagatgaagtccccgttcgagtgggacattgtcacccgcggactggtggccatggcggttgagggcgtcgtgggcttcctcctgaccatcatgtgccagtacaacttcctgcggcggccacagcgcatgcctgtgtctaccaagcctgtggaggatgatgtggacgtggccagtgagcggcagcgagtgctccggggagacgccgacaatgacatggtcaagattgagaacctgaccaaggtctacaagtcccggaagattggccgtatcctggccgttgaccgcctgtgcctgggtgtgcgtcctggcgagtgcttcgggctcctgggcgtcaacggtgcgggcaagaccagcaccttcaagatgctgaccggcgacgagagcacgacggggggcgaggccttcgtcaatggacacagcgtgctgaaggagctgctccaggtgcagcagagcctcggctactgcccgcagtgtgacgcgctgttcgacgagctcacggcccgggagcacctgcagctgtacacgcggctgcgtgggatctcctggaaggacgaggcccgggtggtgaagtgggctctggagaagctggagctgaccaagtacgcagacaagccggctggcacctacagcggcggcaacaagcggaagctctccacggccatcgccctcattgggtacccagccttcatcttcctggacgagcccaccacaggcatggaccccaaggcccggcgcttcctctggaacctcatccttgacctcatcaagacagggcgttcagtggtgctgacatcacacagcatggaggagtgcgaggcgctgtgcacgcggctggccatcatggaacggtcgcctgcggtgcctgggcagcatccagcacctgaagaaccggtttggagatggctacatgatcacggtgcggaccaagagcagccagagtgtgaaggacgtggtgcggttcttcaaccgcaacttcccggaagccatgctcaaggagcggcaccacacaaaggtgcagtaccagctcaagtcggagcacatctcgctggcccaggtgttcagcaagatggagcaggtgtctggcgtgctgggcatcgaggactactcggtcagccagaccacactggacaatgtgttcgtgaactttgccaagaagcagagtgacaacctggagcagcaggagacggagccgccatccgcactgcagtcccctctcggctgcttgctcagcctgctccggccccggtctgcccccacggagctccgggcacttgtggcagacgagcccgaggacctggacacggaggacgagggcctcatcagcttcgaggaggagcgggcccagctgtccttcaacacggacacgctctgctgaccacccagagctgggccagggaggacacgctccactgaccacccagagctgggccagggactcaacaatggggacagaagtcccccagtgcctgccagggcctggagtggaggttcaggaccaaggggcttctggtcctccagcccctgtactcggccatgccctgtggtcactgcggttgccgcccctaattgtgccaaaggctgacccggcccgggctgcgtacacccttgccctgctttgccttaaagcctcggggtctgcccggcccctcgcccctgcctggcactgctcaccgcccaaggcgacgccggctggaccaggcactgctggcctttctcctgcccggcctcggaaccagcttttctctcttacgatgaaggctgatgccgagagcgggctgtgggcggagctgggtcagtcccgtatttattttgctttgagaagaggctcctctggccctgctctcctgcagggaggtggctgtcctgcgggaagccatcagcttgggccagctggcaggtggcaggaatggagaagctgaccctgctggccaggcaaggggccagaccccccccaacccccagctgccatcgctctcccacccagcttggccccctgcccgcccacctccctgggagccgggcctgtacatagcgcacagatgtttgttttaaataaataaacaaaatgtc

SEQ ID NO: 2910 - DNA, 6472 bp, Homo sapiens
  source 1..6472: mol_type = unassigned DNA
ccgccccggcgcccaggctcggtgctggagagtcatgcctgtgagccctgggcacctcctgatgtcctgcgaggtcacggtgttcccaaacctcagggttgccctgccccactccagaggctctcaggccccaccccggagccctctgtgcggagccgcctcctcctggccagttccccagtagtcctgaagggagacctgctgtgtggagcctcttctgggacccagccatgagtgtggagctgagcaactgaacctgaaactcttccactgtgagtcaaggaggcttttccgcacatgaaggacgctgagcgggaaggactcctctctgcctgcagttgtagcgagtggaccagcaccaggggctctctagactgcccctcctccatcgccttccctgcctctccaggacagagcagccacgtctgcacacctcgccctctttacactcagttttcagagcacgtttctcctatttcctgcgggttgcagcgcctacttgaacttactcagaccacctacttctctagcagcactgggcgtccctttcagcaagacgatggctgtgctcaggcagctggcgctcctcctctggaagaactacaccctgcagaagcggaaggtcctggtgacggtcctggaactcttcctgccattgctgttttctgggatcctcatctggctccgcttgaagattcagtcggaaaatgtgcccaacgccaccatctacccgggccagtccatccaggagctgcctctgttcttcaccttccctccgccaggagacacctgggagcttgcctacatcccttctcacagtgacgctgccaagaccgtcactgagacagtgcgcagggcacttgtgatcaacatgcgagtgcgcggctttccctccgagaaggactttgaggactacattaggtacgacaactgctcgtccagcgtgctggccgccgtggtcttcgagcaccccttcaaccacagcaaggagcccctgccgctggcggtgaaatatcacctacggttcagttacacacggagaaattacatgtggacccaaacaggctcctttttcctgaaagagacagaaggctggcacactacttcccttttcccgcttttcccaaacccaggaccaagggaacctacatcccctgatggcggagaacctgggtacatccgggaaggcttcctggccgtgcagcatgctgtggaccgggccatcatggagtaccatgccgatgccgccacacgccagctgttccagagactgacggtgaccatcaagaggttcccgtacccgccgttcatcgcagaccccttcctcgtggccatccagtaccagctgcccctgctgctgctgctcagcttcacctacaccgcgctcaccattgcccgtgctgtcgtgcaggagaaggaaaggaggctgaaggagtacatgcgcatgatggggctcagcagctggctgcactggagtgcctggttcctcttgttcttcctcttcctcctcatcgccgcctccttcatgaccctgctcttctgtgtcaaggtgaagccaaatgtagccgtgctgtcccgcagcgacccctccctggtgctcgccttcctgctgtgcttcgccatctctaccatctccttcagcttcatggtcagcaccttcttcagcaaagccaacatggcagcagccttcggaggcttcctctacttcttcacctacatcccctacttcttcgtggcccctcggtacaactggatgactctgagccagaagctctgctcctgcctcctgtctaatgtcgccatggcaatgggagcccagctcattgggaaatttgaggcgaaaggcatgggcatccagtggcgagacctcctgagtcccgtcaacgtggacgacgacttctgcttcgggcaggtgctggggatgctgctgctggactctgtgctctatggcctggtgacctggtacatggaggccgtcttcccagggcagttcggcgtgcctcagccctggtacttcttcatcatgccctcctattggtgtgggaagccaagggcggttgcagggaaggaggaagaagacagtgaccccgagaaagcactcagaaacgagtactttgaagccgagccagaggacctggtggcggggatcaagatcaagcacctgtccaaggtgttcagggtgggaaataaggacagggcggccgtcagagacctgaacctcaacctgtacgagggacagatcaccgtcctgctgggccacaacggtgccgggaagaccaccaccctctccatgctcacaggtctctttccccccaccagtggacgggcatacatcagcgggtatgaaatttcccaggacatggttcagatccggaagagcctgggcctgtgcccgcagcacgacatcctgtttgacaacttgacagtcgcagagcacctttatttctacgcccagctgaagggcctgtcacgtcagaagtgccctgaagaagtcaagcagatgctgcacatcatcggcctggaggacaagtggaactcacggagccgcttcctgagcgggggcatgaggcgcaagctctccatcggcatcgccctcatcgcaggctccaaggtgctgatactggacgagcccacctcgggcatggacgccatctccaggagggccatctgggatcttcttcagcggcagaaaagtgaccgcaccatcgtgctgaccacccacttcatggacgaggctgacctgctgggagaccgcatcgccatcatggccaagggggagctgcagtgctgcgggtcctcgctgttcctcaagcagaaatacggtgccggctatcacatgacgctggtgaaggagccgcactgcaacccggaagacatctcccagctggtccaccaccacgtgcccaacgccacgctggagagcagcgctggggccgagctgtctttcatccttcccagagagagcacgcacaggtttgaaggtctctttgctaaactggagaagaagcagaaagagctgggcattgccagctttggggcatccatcaccaccatggaggaagtcttccttcgggtcgggaagctggtggacagcagtatggacatccaggccatccagctccctgccctgcagtaccagcacgagaggcgcgccagcgactgggctgtggacagcaacctctgtggggccatggacccctccgacggcattggagccctcatcgaggaggagcgcaccgctgtcaagctcaacactgggctcgccctgcactgccagcaattctgggccatgttcctgaagaaggccgcatacagctggcgcgagtggaaaatggtggcggcacaggtcctggtgcctctgacctgcgtcaccctggccctcctggccatcaactactcctcggagctcttcgacgaccccatgctgaggctgaccttgggcgagtacggcagaaccgtcgtgcccttctcagttcccgggacctcccagctgggtcagcagctgtcagagcatctgaaagacgcactgcaggctgagggacaggagccccgcgaggtgctcggtgacctggaggagttcttgatcttcagggcttctgtggaggggggcggctttaatgagcggtgccttgtggcagcgtccttcagagatgtgggagagcgcacggtcgtcaacgccttgttcaacaaccaggcgtaccactctccagccactgccctggccgtcgtggacaaccttctgttcaagctgctgtgcgggcctcacgcctccattgtggtctccaacttcccccagccccggagcgccctgcaggctgccaaggaccagtttaacgagggccggaagggattcgacattgccctcaacctgctcttcgccatggcattcttggccagcacgttctccatcctggcggtcagcgagagggccgtgcaggccaagcatgtgcagtttgtgagtggagtccacgtggccagtttctggctctctgctctgctgtgggacctcatctccttcctcatccccagtctgctgctgctggtggtgtttaaggccttcgacgtgcgtgccttcacgcgggacggccacatggctgacaccctgctgctgctcctgctctacggctgggccatcatccccctcatgtacctgatgaacttcttcttcttgggggcggccactgcctacacgaggctgaccatcttcaacatcctgtcaggcatcgccaccttcctgatggtcaccatcatgcgcatcccagctgtaaaactggaagaactttccaaaaccctggatcacgtgttcctggtgctgcccaaccactgtctggggatggcagtcagcagtttctacgagaactacgagacgcggaggtactgcacctcctccgaggtcgccgcccactactgcaagaaatataacatccagtaccaggagaacttctatgcctggagcgccccgggggtcggccggtttgtggcctccatggccgcctcagggtgcgcctacctcatcctgctcttcctcatcgagaccaacctgcttcagagactcaggggcatcctctgcgccctccggaggaggcggacactgacagaattatacacccggatgcctgtgcttcctgaggaccaagatgtagcggacgagaggacccgcatcctggcccccagtccggactccctgctccacacacctctgattatcaaggagctctccaaggtgtacgagcagcgggtgcccctcctggccgtggacaggctctccctcgcggtgcagaaaggggagtgcttcggcctgctgggcttcaatggagccgggaagaccacgactttcaaaatgctgaccggggaggagagcctcacttctggggatgcctttgtcgggggtcacagaatcagctctgatgtcggaaaggtgcggcagcggatcggctactgcccgcagtttgatgccttgctggaccacatgacaggccgggagatgctggtcatgtacgctcggctccggggcatccctgagcgccacatcggggcctgcgtggagaacactctgcggggcctgctgctggagccacatgccaacaagctggtcaggacgtacagtggtggtaacaagcggaagctgagcaccggcatcgccctgatcggagagcctgctgtcatcttcctggacgagccgtccactggcatggaccccgtggcccggcgcctgctttgggacaccgtggcacgagcccgagagtctggcaaggccatcatcatcacctcccacagcatggaggagtgtgaggccctgtgcacccggctggccatcatggtgcaggggcagttcaagtgcctgggcagcccccagcacctcaagagcaagttcggcagcggctactccctgcgggccaaggtgcagagtgaagggcaacaggaggcgctggaggagttcaaggccttcgtggacctgacctttccaggcagcgtcctggaagatgagcaccaaggcatggtccattaccacctgccgggccgtgacctcagctgggcgaaggttttcggtattctggagaaagccaaggaaaagtacggcgtggacgactactccgtgagccagatctcgctggaacaggtcttcctgagcttcgcccacctgcagccgcccaccgcagaggaggggcgatgaggggtggcggctgtctcgccatcaggcagggacaggacgggcaagcagggcccatcttacatcctctctctccaagtttatctcatcctttatttttaatcacttttttctatgatggatatgaaaaattcaaggcagtatgcacagaatggacgagtgcagcccagccctcatgcccaggatcagcatgcgcatctccatgtctgcatactctggagttcactttcccagagctggggcaggccgggcagtctgcgggcaagctccggggtctctgggtggagagctgacccaggaagggctgcagctgagctgggggttgaatttctccaggcactccctggagagaggacccagtgacttgtccaagtttacacacgacactaatctcccctggggaggaagcgggaagccagccaggttgaactgtagcgaggcccccaggccgccaggaatggaccatgcagatcactgtcagtggagggaagctgctgactgtgattaggtgctggggtcttagcgtccagcgcagcccgggggcatcctggaggctctgctccttagggcatggtagtcaccgcgaagccgggcaccgtcccacagcatctcctagaagcagccggcacaggagggaaggtggccaggctcgaagcagtctctgtttccagcactgcaccctcaggaagtcgcccgccccaggacacgcagggaccaccctaagggctgggtggctgtctcaaggacacattgaatacgttgtgaccatccagaaaataaatgctgaggggacacagtcac

SEQ ID NO: 2911 - DNA, 6449 bp, Homo sapiens
  source 1..6449: mol_type = unassigned DNA
gcggccgctgcgtccgccagtagcgggttgcaggcgcaccctcccctccagggcggccacgcagctgtcagtgccgccgccactgcgaggctggagcggagcccgggtggccgagggaggggaccccgcgagagggccgcgcgccggccgccgccgccccggcgcccaggctcggtgctggagagtcatgcctgtgagccctgggcacctcctgatgtcctgcgaggtcacggtgttcccaaacctcagggttgccctgccccactccagaggctctcaggccccaccccggagccctctgtgcggagccgcctcctcctggccagttccccagtagtcctgaagggagacctgctgtgtggagcctcttctgggacccagccatgagtgtggagctgagcaactgaacctgaaactcttccactgtgagtcaaggaggcttttccgcacatgaaggacgctgagcgggaaggactcctctctgcctgcagttgtagcgagtggaccagcaccaggggctctctagactgcccctcctccatcgccttccctgcctctccaggacagagcagccacgtctgcacacctcgccctctttacactcagttttcagagcacgtttctcctatttcctgcgggttgcagcgcctacttgaacttactcagaccacctacttctctagcagcactgggcgtccctttcagcaagacgatggctgtgctcaggcagctggcgctcctcctctggaagaactacaccctgcagaagcggaaggtcctggtgacggtcctggaactcttcctgccattgctgttttctgggatcctcatctggctccgcttgaagattcagtcggaaaatgtgcccaacgccaccatctacccgggccagtccatccaggagctgcctctgttcttcaccttccctccgccaggagacacctgggagcttgcctacatcccttctcacagtgacgctgccaagaccgtcactgagacagtgcgcagggcacttgtgatcaacatgcgagtgcgcggctttccctccgagaaggactttgaggactacattaggtacgacaactgctcgtccagcgtgctggccgccgtggtcttcgagcaccccttcaaccacagcaaggagcccctgccgctggcggtgaaatatcacctacggttcagttacacacggagaaattacatgtggacccaaacaggctcctttttcctgaaagagacagaaggctggcacactacttcccttttcccgcttttcccaaacccaggaccaagggaacctacatcccctgatggcggagaacctgggtacatccgggaaggcttcctggccgtgcagcatgctgtggaccgggccatcatggagtaccatgccgatgccgccacacgccagctgttccagagactgacggtgaccatcaagaggttcccgtacccgccgttcatcgcagaccccttcctcgtggccatccagtaccagctgcccctgctgctgctgctcagcttcacctacaccgcgctcaccattgcccgtgctgtcgtgcaggagaaggaaaggaggctgaaggagtacatgcgcatgatggggctcagcagctggctgcactggagtgcctggttcctcttgttcttcctcttcctcctcatcgccgcctccttcatgaccctgctcttctgtgtcaaggtgaagccaaatgtagccgtgctgtcccgcagcgacccctccctggtgctcgccttcctgctgtgcttcgccatctctaccatctccttcagcttcatggtcagcaccttcttcagcaaaggcatgggcatccagtggcgagacctcctgagtcccgtcaacgtggacgacgacttctgcttcgggcaggtgctggggatgctgctgctggactctgtgctctatggcctggtgacctggtacatggaggccgtcttcccagggcagttcggcgtgcctcagccctggtacttcttcatcatgccctcctattggtgtgggaagccaagggcggttgcagggaaggaggaagaagacagtgaccccgagaaagcactcagaaacgagtactttgaagccgagccagaggacctggtggcggggatcaagatcaagcacctgtccaaggtgttcagggtgggaaataaggacagggcggccgtcagagacctgaacctcaacctgtacgagggacagatcaccgtcctgctgggccacaacggtgccgggaagaccaccaccctctccatgctcacaggtctctttccccccaccagtggacgggcatacatcagcgggtatgaaatttcccaggacatggttcagatccggaagagcctgggcctgtgcccgcagcacgacatcctgtttgacaacttgacagtcgcagagcacctttatttctacgcccagctgaagggcctgtcacgtcagaagtgccctgaagaagtcaagcagatgctgcacatcatcggcctggaggacaagtggaactcacggagccgcttcctgagcgggggcatgaggcgcaagctctccatcggcatcgccctcatcgcaggctccaaggtgctgatactggacgagcccacctcgggcatggacgccatctccaggagggccatctgggatcttcttcagcggcagaaaagtgaccgcaccatcgtgctgaccacccacttcatggacgaggctgacctgctgggagaccgcatcgccatcatggccaagggggagctgcagtgctgcgggtcctcgctgttcctcaagcagaaatacggtgccggctatcacatgacgctggtgaaggagccgcactgcaacccggaagacatctcccagctggtccaccaccacgtgcccaacgccacgctggagagcagcgctggggccgagctgtctttcatccttcccagagagagcacgcacaggtttgaaggtctctttgctaaactggagaagaagcagaaagagctgggcattgccagctttggggcatccatcaccaccatggaggaagtcttccttcgggtcgggaagctggtggacagcagtatggacatccaggccatccagctccctgccctgcagtaccagcacgagaggcgcgccagcgactgggctgtggacagcaacctctgtggggccatggacccctccgacggcattggagccctcatcgaggaggagcgcaccgctgtcaagctcaacactgggctcgccctgcactgccagcaattctgggccatgttcctgaagaaggccgcatacagctggcgcgagtggaaaatggtggcggcacaggtcctggtgcctctgacctgcgtcaccctggccctcctggccatcaactactcctcggagctcttcgacgaccccatgctgaggctgaccttgggcgagtacggcagaaccgtcgtgcccttctcagttcccgggacctcccagctgggtcagcagctgtcagagcatctgaaagacgcactgcaggctgagggacaggagccccgcgaggtgctcggtgacctggaggagttcttgatcttcagggcttctgtggaggggggcggctttaatgagcggtgccttgtggcagcgtccttcagagatgtgggagagcgcacggtcgtcaacgccttgttcaacaaccaggcgtaccactctccagccactgccctggccgtcgtggacaaccttctgttcaagctgctgtgcgggcctcacgcctccattgtggtctccaacttcccccagccccggagcgccctgcaggctgccaaggaccagtttaacgagggccggaagggattcgacattgccctcaacctgctcttcgccatggcattcttggccagcacgttctccatcctggcggtcagcgagagggccgtgcaggccaagcatgtgcagtttgtgagtggagtccacgtggccagtttctggctctctgctctgctgtgggacctcatctccttcctcatccccagtctgctgctgctggtggtgtttaaggccttcgacgtgcgtgccttcacgcgggacggccacatggctgacaccctgctgctgctcctgctctacggctgggccatcatccccctcatgtacctgatgaacttcttcttcttgggggcggccactgcctacacgaggctgaccatcttcaacatcctgtcaggcatcgccaccttcctgatggtcaccatcatgcgcatcccagctgtaaaactggaagaactttccaaaaccctggatcacgtgttcctggtgctgcccaaccactgtctggggatggcagtcagcagtttctacgagaactacgagacgcggaggtactgcacctcctccgaggtcgccgcccactactgcaagaaatataacatccagtaccaggagaacttctatgcctggagcgccccgggggtcggccggtttgtggcctccatggccgcctcagggtgcgcctacctcatcctgctcttcctcatcgagaccaacctgcttcagagactcaggggcatcctctgcgccctccggaggaggcggacactgacagaattatacacccggatgcctgtgcttcctgaggaccaagatgtagcggacgagaggacccgcatcctggcccccagtccggactccctgctccacacacctctgattatcaaggagctctccaaggtgtacgagcagcgggtgcccctcctggccgtggacaggctctccctcgcggtgcagaaaggggagtgcttcggcctgctgggcttcaatggagccgggaagaccacgactttcaaaatgctgaccggggaggagagcctcacttctggggatgcctttgtcgggggtcacagaatcagctctgatgtcggaaaggtgcggcagcggatcggctactgcccgcagtttgatgccttgctggaccacatgacaggccgggagatgctggtcatgtacgctcggctccggggcatccctgagcgccacatcggggcctgcgtggagaacactctgcggggcctgctgctggagccacatgccaacaagctggtcaggacgtacagtggtggtaacaagcggaagctgagcaccggcatcgccctgatcggagagcctgctgtcatcttcctggacgagccgtccactggcatggaccccgtggcccggcgcctgctttgggacaccgtggcacgagcccgagagtctggcaaggccatcatcatcacctcccacagcatggaggagtgtgaggccctgtgcacccggctggccatcatggtgcaggggcagttcaagtgcctgggcagcccccagcacctcaagagcaagttcggcagcggctactccctgcgggccaaggtgcagagtgaagggcaacaggaggcgctggaggagttcaaggccttcgtggacctgacctttccaggcagcgtcctggaagatgagcaccaaggcatggtccattaccacctgccgggccgtgacctcagctgggcgaaggttttcggtattctggagaaagccaaggaaaagtacggcgtggacgactactccgtgagccagatctcgctggaacaggtcttcctgagcttcgcccacctgcagccgcccaccgcagaggaggggcgatgaggggtggcggctgtctcgccatcaggcagggacaggacgggcaagcagggcccatcttacatcctctctctccaagtttatctcatcctttatttttaatcacttttttctatgatggatatgaaaaattcaaggcagtatgcacagaatggacgagtgcagcccagccctcatgcccaggatcagcatgcgcatctccatgtctgcatactctggagttcactttcccagagctggggcaggccgggcagtctgcgggcaagctccggggtctctgggtggagagctgacccaggaagggctgcagctgagctgggggttgaatttctccaggcactccctggagagaggacccagtgacttgtccaagtttacacacgacactaatctcccctggggaggaagcgggaagccagccaggttgaactgtagcgaggcccccaggccgccaggaatggaccatgcagatcactgtcagtggagggaagctgctgactgtgattaggtgctggggtcttagcgtccagcgcagcccgggggcatcctggaggctctgctccttagggcatggtagtcaccgcgaagccgggcaccgtcccacagcatctcctagaagcagccggcacaggagggaaggtggccaggctcgaagcagtctctgtttccagcactgcaccctcaggaagtcgcccgccccaggacacgcagggaccaccctaagggctgggtggctgtctcaaggacacattgaatacgttgtgaccatccagaaaataaatgctgaggggacacagtc

SEQ ID NO: 2912 - DNA, 7309 bp, Homo sapiens
  source 1..7309: mol_type = unassigned DNA
gccagaggcgctcttaacggcgtttatgtcctttgctgtctgaggggcctcagctctgaccaatctggtcttcgtgtggtcattagcatgggcttcgtgagacagatacagcttttgctctggaagaactggaccctgcggaaaaggcaaaagattcgctttgtggtggaactcgtgtggcctttatctttatttctggtcttgatctggttaaggaatgccaacccactctacagccatcatgaatgccatttccccaacaaggcgatgccctcagcaggaatgctgccgtggctccaggggatcttctgcaatgtgaacaatccctgttttcaaagccccaccccaggagaatctcctggaattgtgtcaaactataacaactccatcttggcaagggtatatcgagattttcaagaactcctcatgaatgcaccagagagccagcaccttggccgtatttggacagagctacacatcttgtcccaattcatggacaccctccggactcacccggagagaattgcaggaagaggaatacgaataagggatatcttgaaagatgaagaaacactgacactatttctcattaaaaacatcggcctgtctgactcagtggtctaccttctgatcaactctcaagtccgtccagagcagttcgctcatggagtcccggacctggcgctgaaggacatcgcctgcagcgaggccctcctggagcgcttcatcatcttcagccagagacgcggggcaaagacggtgcgctatgccctgtgctccctctcccagggcaccctacagtggatagaagacactctgtatgccaacgtggacttcttcaagctcttccgtgtgcttcccacactcctagacagccgttctcaaggtatcaatctgagatcttggggaggaatattatctgatatgtcaccaagaattcaagagtttatccatcggccgagtatgcaggacttgctgtgggtgaccaggcccctcatgcagaatggtggtccagagacctttacaaagctgatgggcatcctgtctgacctcctgtgtggctaccccgagggaggtggctctcgggtgctctccttcaactggtatgaagacaataactataaggcctttctggggattgactccacaaggaaggatcctatctattcttatgacagaagaacaacatccttttgtaatgcattgatccagagcctggagtcaaatcctttaaccaaaatcgcttggagggcggcaaagcctttgctgatgggaaaaatcctgtacactcctgattcacctgcagcacgaaggatactgaagaatgccaactcaacttttgaagaactggaacacgttaggaagttggtcaaagcctgggaagaagtagggccccagatctggtacttctttgacaacagcacacagatgaacatgatcagagataccctggggaacccaacagtaaaagactttttgaataggcagcttggtgaagaaggtattactgctgaagccatcctaaacttcctctacaagggccctcgggaaagccaggctgacgacatggccaacttcgactggagggacatatttaacatcactgatcgcaccctccgcctggtcaatcaatacctggagtgcttggtcctggataagtttgaaagctacaatgatgaaactcagctcacccaacgtgccctctctctactggaggaaaacatgttctgggccggagtggtattccctgacatgtatccctggaccagctctctaccaccccacgtgaagtataagatccgaatggacatagacgtggtggagaaaaccaataagattaaagacaggtattgggattctggtcccagagctgatcccgtggaagatttccggtacatctggggcgggtttgcctatctgcaggacatggttgaacaggggatcacaaggagccaggtgcaggcggaggctccagttggaatctacctccagcagatgccctacccctgcttcgtggacgattctttcatgatcatcctgaaccgctgtttccctatcttcatggtgctggcatggatctactctgtctccatgactgtgaagagcatcgtcttggagaaggagttgcgactgaaggagaccttgaaaaatcagggtgtctccaatgcagtgatttggtgtacctggttcctggacagcttctccatcatgtcgatgagcatcttcctcctgacgatattcatcatgcatggaagaatcctacattacagcgacccattcatcctcttcctgttcttgttggctttctccactgccaccatcatgctgtgctttctgctcagcaccttcttctccaaggccagtctggcagcagcctgtagtggtgtcatctatttcaccctctacctgccacacatcctgtgcttcgcctggcaggaccgcatgaccgctgagctgaagaaggctgtgagcttactgtctccggtggcatttggatttggcactgagtacctggttcgctttgaagagcaaggcctggggctgcagtggagcaacatcgggaacagtcccacggaaggggacgaattcagcttcctgctgtccatgcagatgatgctccttgatgctgctgtctatggcttactcgcttggtaccttgatcaggtgtttccaggagactatggaaccccacttccttggtactttcttctacaagagtcgtattggcttggcggtgaagggtgttcaaccagagaagaaagagccctggaaaagaccgagcccctaacagaggaaacggaggatccagagcacccagaaggaatacacgactccttctttgaacgtgagcatccagggtgggttcctggggtatgcgtgaagaatctggtaaagatttttgagccctgtggccggccagctgtggaccgtctgaacatcaccttctacgagaaccagatcaccgcattcctgggccacaatggagctgggaaaaccaccaccttgtccatcctgacgggtctgttgccaccaacctctgggactgtgctcgttgggggaagggacattgaaaccagcctggatgcagtccggcagagccttggcatgtgtccacagcacaacatcctgttccaccacctcacggtggctgagcacatgctgttctatgcccagctgaaaggaaagtcccaggaggaggcccagctggagatggaagccatgttggaggacacaggcctccaccacaagcggaatgaagaggctcaggacctatcaggtggcatgcagagaaagctgtcggttgccattgcctttgtgggagatgccaaggtggtgattctggacgaacccacctctggggtggacccttactcgagacgctcaatctgggatctgctcctgaagtatcgctcaggcagaaccatcatcatgtccactcaccacatggacgaggccgacctccttggggaccgcattgccatcattgcccagggaaggctctactgctcaggcaccccactcttcctgaagaactgctttggcacaggcttgtacttaaccttggtgcgcaagatgaaaaacatccagagccaaaggaaaggcagtgaggggacctgcagctgctcgtctaagggtttctccaccacgtgtccagcccacgtcgatgacctaactccagaacaagtcctggatggggatgtaaatgagctgatggatgtagttctccaccatgttccagaggcaaagctggtggagtgcattggtcaagaacttatcttccttcttccaaataagaacttcaagcacagagcatatgccagccttttcagagagctggaggagacgctggctgaccttggtctcagcagttttggaatttctgacactcccctggaagagatttttctgaaggtcacggaggattctgattcaggacctctgtttgcgggtggcgctcagcagaaaagagaaaacgtcaacccccgacacccctgcttgggtcccagagagaaggctggacagacaccccaggactccaatgtctgctccccaggggcgccggctgctcacccagagggccagcctcccccagagccagagtgcccaggcccgcagctcaacacggggacacagctggtcctccagcatgtgcaggcgctgctggtcaagagattccaacacaccatccgcagccacaaggacttcctggcgcagatcgtgctcccggctacctttgtgtttttggctctgatgctttctattgttatccctccttttggcgaataccccgctttgacccttcacccctggatatatgggcagcagtacaccttcttcagcatggatgaaccaggcagtgagcagttcacggtacttgcagacgtcctcctgaataagccaggctttggcaaccgctgcctgaaggaagggtggcttccggagtacccctgtggcaactcaacaccctggaagactccttctgtgtccccaaacatcacccagctgttccagaagcagaaatggacacaggtcaacccttcaccatcctgcaggtgcagcaccagggagaagctcaccatgctgccagagtgccccgagggtgccgggggcctcccgcccccccagagaacacagcgcagcacggaaattctacaagacctgacggacaggaacatctccgacttcttggtaaaaacgtatcctgctcttataagaagcagcttaaagagcaaattctgggtcaatgaacagaggtatggaggaatttccattggaggaaagctcccagtcgtccccatcacgggggaagcacttgttgggtttttaagcgaccttggccggatcatgaatgtgagcgggggccctatcactagagaggcctctaaagaaatacctgatttccttaaacatctagaaactgaagacaacattaaggtgtggtttaataacaaaggctggcatgccctggtcagctttctcaatgtggcccacaacgccatcttacgggccagcctgcctaaggacaggagccccgaggagtatggaatcaccgtcattagccaacccctgaacctgaccaaggagcagctctcagagattacagtgctgaccacttcagtggatgctgtggttgccatctgcgtgattttctccatgtccttcgtcccagccagctttgtcctttatttgatccaggagcgggtgaacaaatccaagcacctccagtttatcagtggagtgagccccaccacctactgggtgaccaacttcctctgggacatcatgaattattccgtgagtgctgggctggtggtgggcatcttcatcgggtttcagaagaaagcctacacttctccagaaaaccttcctgcccttgtggcactgctcctgctgtatggatgggcggtcattcccatgatgtacccagcatccttcctgtttgatgtccccagcacagcctatgtggctttatcttgtgctaatctgttcatcggcatcaacagcagtgctattaccttcatcttggaattatttgagaataaccggacgctgctcaggttcaacgccgtgctgaggaagctgctcattgtcttcccccacttctgcctgggccggggcctcattgaccttgcactgagccaggctgtgacagatgtctatgcccggtttggtgaggagcactctgcaaatccgttccactgggacctgattgggaagaacctgtttgccatggtggtggaaggggtggtgtacttcctcctgaccctgctggtccagcgccacttcttcctctcccaatggattgccgagcccactaaggagcccattgttgatgaagatgatgatgtggctgaagaaagacaaagaattattactggtggaaataaaactgacatcttaaggctacatgaactaaccaagatttatccaggcacctccagcccagcagtggacaggctgtgtgtcggagttcgccctggagagtgctttggcctcctgggagtgaatggtgccggcaaaacaaccacattcaagatgctcactggggacaccacagtgacctcaggggatgccaccgtagcaggcaagagtattttaaccaatatttctgaagtccatcaaaatatgggctactgtcctcagtttgatgcaattgatgagctgctcacaggacgagaacatctttacctttatgcccggcttcgaggtgtaccagcagaagaaatcgaaaaggttgcaaactggagtattaagagcctgggcctgactgtctacgccgactgcctggctggcacgtacagtgggggcaacaagcggaaactctccacagccatcgcactcattggctgcccaccgctggtgctgctggatgagcccaccacagggatggacccccaggcacgccgcatgctgtggaacgtcatcgtgagcatcatcagagaagggagggctgtggtcctcacatcccacagcatggaagaatgtgaggcactgtgtacccggctggccatcatggtaaagggcgcctttcgatgtatgggcaccattcagcatctcaagtccaaatttggagatggctatatcgtcacaatgaagatcaaatccccgaaggacgacctgcttcctgacctgaaccctgtggagcagttcttccaggggaacttcccaggcagtgtgcagagggagaggcactacaacatgctccagttccaggtctcctcctcctccctggcgaggatcttccagctcctcctctcccacaaggacagcctgctcatcgaggagtactcagtcacacagaccacactggaccaggtgtttgtaaattttgctaaacagcagactgaaagtcatgacctccctctgcaccctcgagctgctggagccagtcgacaagcccaggactgatctttcacaccgctcgttcctgcagccagaaaggaactctgggcagctggaggcgcaggagcctgtgcccatatggtcatccaaatggactggccagcgtaaatgaccccactgcagcagaaaacaaacacacgaggagcatgcagcgaattcagaaagaggtctttcagaaggaaaccgaaactgacttgctcacctggaacacctgatggtgaaaccaaacaaatacaaaatccttctccagaccccagaactagaaaccccgggccatcccactagcagctttggcctccatattgctctcatttcaagcagatctgcttttctgcatgtttgtctgtgtgtctgcgttgtgtgtgattttcatggaaaaataaaatgcaaatgcactcatcacaaa

SEQ ID NO: 2913 - DNA, 3105 bp, Homo sapiens
  source 1..3105: mol_type = unassigned DNA
gcgctcttaacggcgtttatgtcctttgctgtctgaggggcctcagctctgaccaatctggtcttcgtgtggtcattagcatgggcttcgtgagacagatacagcttttgctctggaagaactggaccctgcggaaaaggcaaaagattcgctttgtggtggaactcgtgtggcctttatctttatttctggtcttgatctggttaaggaatgccaacccactctacagccatcatgaatgccatttccccaacaaggcgatgccctcagcaggaatgctgccgtggctccaggggatcttctgcaatgtgaacaatccctgttttcaaagccccaccccaggagaatctcctggaattgtgtcaaactataacaactccatcttggcaagggtatatcgagattttcaagaactcctcatgaatgcaccagagagccagcaccttggccgtatttggacagagctacacatcttgtcccaattcatggacaccctccggactcacccggagagaattgcaggaagaggaatacgaataagggatatcttgaaagatgaagaaacactgacactatttctcattaaaaacatcggcctgtctgactcagtggtctaccttctgatcaactctcaagtccgtccagagcagttcgctcatggagtcccggacctggcgctgaaggacatcgcctgcagcgaggccctcctggagcgcttcatcatcttcagccagagacgcggggcaaagacggtgcgctatgccctgtgctccctctcccagggcaccctacagtggatagaagacactctgtatgccaacgtggacttcttcaagctcttccgtgtgcttcccacactcctagacagccgttctcaaggtatcaatctgagatcttggggaggaatattatctgatatgtcaccaagaattcaagagtttatccatcggccgagtatgcaggacttgctgtgggtgaccaggcccctcatgcagaatggtggtccagagacctttacaaagctgatgggcatcctgtctgacctcctgtgtggctaccccgagggaggtggctctcgggtgctctccttcaactggtatgaagacaataactataaggcctttctggggattgactccacaaggaaggatcctatctattcttatgacagaagaacaacatccttttgtaatgcattgatccagagcctggagtcaaatcctttaaccaaaatcgcttggagggcggcaaagcctttgctgatgggaaaaatcctgtacactcctgattcacctgcagcacgaaggatactgaagaatgccaactcaacttttgaagaactggaacacgttaggaagttggtcaaagcctgggaagaagtagggccccagatctggtacttctttgacaacagcacacagatgaacatgatcagagataccctggggaacccaacagtaaaagactttttgaataggcagcttggtgaagaaggtattactgctgaagccatcctaaacttcctctacaagggccctcgggaaagccaggctgacgacatggccaacttcgactggagggacatatttaacatcactgatcgcaccctccgcctggtcaatcaatacctggagtgcttggtcctggataagtttgaaagctacaatgatgaaactcagctcacccaacgtgccctctctctactggaggaaaacatgttctgggccggagtggtattccctgacatgtatccctggaccagctctctaccaccccacgtgaagtataagatccgaatggacatagacgtggtggagaaaaccaataagattaaagacaggtattgggattctggtcccagagctgatcccgtggaagatttccggtacatctggggcgggtttgcctatctgcaggacatggttgaacaggggatcacaaggagccaggtgcaggcggaggctccagttggaatctacctccagcagatgccctacccctgcttcgtggacgattctttcatgatcatcctgaaccgctgtttccctatcttcatggtgctggcatggatctactctgtctccatgactgtgaagagcatcgtcttggagaaggagttgcgactgaaggagaccttgaaaaatcagggtgtctccaatgcagtgatttggtgtacctggttcctggacagcttctccatcatgtcgatgagcatcttcctcctgacgatattcatcatgagcttactgtctccggtggcatttggatttggcactgagtacctggttcgctttgaagagcaaggcctggggctgcagtggagcaacatcgggaacagtcccacggaaggggacgaattcagcttcctgctgtccatgcagatgatgctccttgatgctgctgtctatggcttactcgcttggtaccttgatcaggtgtttccaggagactatggaaccccacttccttggtactttcttctacaagagtcgtattggcttggcggtgaagggtgttcaaccagagaagaaagagccctggaaaagaccgagcccctaacagaggaaacggaggatccagagcacccagaaggaatacacgactccttctttgaacgtgagcatccagggtgggttcctggggtatgcgtgaagaatctggtaaagatttttgagccctgtggccggccagctgtggaccgtctgaacatcaccttctacgagaaccagatcaccgcattcctgggccacaatggagctgggaaaaccaccaccttctccgcaggcgccccactctcctccaagggacccgagcgccatctgctgagaggagaacacggcccgccatggtttcccaaggagcagcagacacggacctcgcagggggcagcgaacccacgtgacacagtcttcaagtcctttggagagccccaggaaggaacaacagcgtgtacaccctgtgatggaatgttctctagggcggttcagtgtgaatggaatgtggggccggtgccattctaattggttctgtttccctctagtggttgatcgcggagatttcggcttctccatcaggacaagttcagatagcctgagatggtatcag

SEQ ID NO: 2914 - DNA, 1459 bp, Homo sapiens
  source 1..1459: mol_type = unassigned DNA
tttaattgattagctccttggcctggccttgaggcactgcttacgctgctcaggttcaacgccgtgctgaggaagctgctcattgtcttcccccacttctgcctgggccggggcctcattgaccttgcactgagccaggctgtgacagatgtctatgcccggtttggtgaggagcactctgcaaatccgttccactgggacctgattgggaagaacctgtttgccatggtggtggaaggggtggtgtacttcctcctgaccctgctggtccagcgccacttcttcctctcccaatggattgccgagcccactaaggagcccattgttgatgaagatgatgatgtggctgaagaaagacaaagaattattactggtggaaataaaactgacatcttaaggctacatgaactaaccaagatttatccaggcacctccagcccagcagtggacaggctgtgtgtcggagttcgccctggagagtgctttggcctcctgggagtgaatggtgccggcaaaacaaccacattcaagatgctcactggggacaccacagtgacctcaggggatgccaccgtagcaggcaagagtattttaaccaatatttctgaagtccatcaaaatatgggctactgtcctcagtttgatgcaattgatgagctgctcacaggacgagaacatctttacctttatgcccggcttcgaggtgtaccagcagaagaaatcgaaaaggttgcaaactggagtattaagagcctgggcctgactgtctacgccgactgcctggctggcacgtacagtgggggcaacaagcggaaactctccacagccatcgcactcattggctgcccaccgctggtgctgctggatgagcccaccacagggatggacccccaggcacgccgcatgctgtggaacgtcatcgtgagcatcatcagagaagggagggctgtggtcctcacatcccacagcatggaagaatgtgaggcactgtgtacccggctggccatcatggtaaagggcgcctttcgatgtatgggcaccattcagcatctcaagtccaaatttggagatggctatatcgtcacaatgaagatcaaatccccgaaggacgacctgcttcctgacctgaaccctgtggagcagttcttccaggggaacttcccaggcagtgtgcagagggagaggcactacaacatgctccagttccaggtctcctcctcctccctggcgaggatcttccagctcctcctctcccacaaggacagcctgctcatcgaggagtactcagtcacacagaccacactggaccaggtgtttgtaaattttgctaaacagcagactgaaagtcatgacctccctctgcaccctcgagctgctggagccagtcgacaagcccaggactgatctttcacaccgctcgttcctgcagccagaaaggaactctgggcagctggaggcg

SEQ ID NO: 2915 - DNA, 1780 bp, Homo sapiens
  source 1..1780: mol_type = unassigned DNA
aagaccaacatgagcctccatttcatgtgatgataagatataccaactgatggagaccaacacaaatgaccttctcatccatggttttttaaaatgatgatgaattattccgtgagtgctgggctggtggtgggcatcttcatcgggtttcagaagaaagcctacacttctccagaaaaccttcctgcccttgtggcactgctcctgctgtatggatgggcggtcattcccatgatgtacccagcatccttcctgtttgatgtccccagcacagcctatgtggctttatcttgtgctaatctgttcatcggcatcaacagcagtgctattaccttcatcttggaattatttgagaataaccggacgctgctcaggttcaacgccgtgctgaggaagctgctcattgtcttcccccacttctgcctgggccggggcctcattgaccttgcactgagccaggctgtgacagatgtctatgcccggtttggtgaggagcactctgcaaatccgttccactgggacctgattgggaagaacctgtttgccatggtggtggaaggggtggtgtacttcctcctgaccctgctggtccagcgccacttcttcctctcccaatggattgccgagcccactaaggagcccattgttgatgaagatgatgatgtggctgaagaaagacaaagaattattactggtggaaataaaactgacatcttaaggctacatgaactaaccaagatttatccaggcacctccagcccagcagtggacaggctgtgtgtcggagttcgccctggagagtgctttggcctcctgggagtgaatggtgccggcaaaacaaccacattcaagatgctcactggggacaccacagtgacctcaggggatgccaccgtagcaggcaagagtattttaaccaatatttctgaagtccatcaaaatatgggctactgtcctcagtttgatgcaattgatgagctgctcacaggacgagaacatctttacctttatgcccggcttcgaggtgtaccagcagaagaaatcgaaaaggttgcaaactggagtattaagagcctgggcctgactgtctacgccgactgcctggctggcacgtacagtgggggcaacaagcggaaactctccacagccatcgcactcattggctgcccaccgctggtgctgctggatgagcccaccacagggatggacccccaggcacgccgcatgctgtggaacgtcatcgtgagcatcatcagagaagggagggctgtggtcctcacatcccacagcatggaagaatgtgaggcactgtgtacccggctggccatcatggtaaagggcgcctttcgatgtatgggcaccattcagcatctcaagtccaaatttggagatggctatatcgtcacaatgaagatcaaatccccgaaggacgacctgcttcctgacctgaaccctgtggagcagttcttccaggggaacttcccaggcagtgtgcagagggagaggcactacaacatgctccagttccaggtctcctcctcctccctggcgaggatcttccagctcctcctctcccacaaggacagcctgctcatcgaggagtactcagtcacacagaccacactggaccaggtgtttgtaaattttgctaaacagcagactgaaagtcatgacctccctctgcaccctcgagctgctggagccagtcgacaagcccaggactgatctttcacaccgctcgttcctgcagccagaaaggaactctgggcagctggaggcg

SEQ ID NO: 2916 - DNA, 3740 bp, Homo sapiens
  source 1..3740: mol_type = unassigned DNA
actggaggaaaacatgttctgggccggagtggtattccctgacatgtatccctggaccagctctctaccaccccacgtgtccagcccacgtcgatgacctaactccagaacaagtcctggatggggatgtaaatgagctgatggatgtagttctccaccatgttccagaggcaaagctggtggagtgcattggtcaagaacttatcttccttcttccaaataagaacttcaagcacagagcatatgccagccttttcagagagctggaggagacgctggctgaccttggtctcagcagttttggaatttctgacactcccctggaagagatttttctgaaggtcacggaggattctgattcaggacctctgtttgcgggtggcgctcagcagaaaagagaaaacgtcaacccccgacacccctgcttgggtcccagagagaaggctggacagacaccccaggactccaatgtctgctccccaggggcgccggctgctcacccagagggccagcctcccccagagccagagtgcccaggcccgcagctcaacacggggacacagctggtcctccagcatgtgcaggcgctgctggtcaagagattccaacacaccatccgcagccacaaggacttcctggcgcagatcgtgctcccggctacctttgtgtttttggctctgatgctttctattgttatccctccttttggcgaataccccgctttgacccttcacccctggatatatgggcagcagtacaccttcttcagcatggatgaaccaggcagtgagcagttcacggtacttgcagacgtcctcctgaataagccaggctttggcaaccgctgcctgaaggaagggtggcttccggagtacccctgtggcaactcaacaccctggaagactccttctgtgtccccaaacatcacccagctgttccagaagcagaaatggacacaggtcaacccttcaccatcctgcaggtgcagcaccagggagaagctcaccatgctgccagagtgccccgagggtgccgggggcctcccgcccccccagagaacacagcgcagcacggaaattctacaagacctgacggacaggaacatctccgacttcttggtaaaaacgtatcctgctcttataagaagcagcttaaagagcaaattctgggtcaatgaacagaggtatggaggaatttccattggaggaaagctcccagtcgtccccatcacgggggaagcacttgttgggtttttaagcgaccttggccggatcatgaatgtgagcgggggccctatcactagagaggcctctaaagaaatacctgatttccttaaacatctagaaactgaagacaacattaaggtgtggtttaataacaaaggctggcatgccctggtcagctttctcaatgtggcccacaacgccatcttacgggccagcctgcctaaggacaggagccccgaggagtatggaatcaccgtcattagccaacccctgaacctgaccaaggagcagctctcagagattacagtgctgaccacttcagtggatgctgtggttgccatctgcgtgattttctccatgtccttcgtcccagccagctttgtcctttatttgatccaggagcgggtgaacaaatccaagcacctccagtttatcagtggagtgagccccaccacctactgggtgaccaacttcctctgggacatcatgaattattccgtgagtgctgggctggtggtgggcatcttcatcgggtttcagaagaaagcctacacttctccagaaaaccttcctgcccttgtggcactgctcctgctgtatggatgggcggtcattcccatgatgtacccagcatccttcctgtttgatgtccccagcacagcctatgtggctttatcttgtgctaatctgttcatcggcatcaacagcagtgctattaccttcatcttggaattatttgagaataaccggacgctgctcaggttcaacgccgtgctgaggaagctgctcattgtcttcccccacttctgcctgggccggggcctcattgaccttgcactgagccaggctgtgacagatgtctatgcccggtttggtgaggagcactctgcaaatccgttccactgggacctgattgggaagaacctgtttgccatggtggtggaaggggtggtgtacttcctcctgaccctgctggtccagcgccacttcttcctctcccaatggattgccgagcccactaaggagcccattgttgatgaagatgatgatgtggctgaagaaagacaaagaattattactggtggaaataaaactgacatcttaaggctacatgaactaaccaagatttatccaggcacctccagcccagcagtggacaggctgtgtgtcggagttcgccctggagagtgctttggcctcctgggagtgaatggtgccggcaaaacaaccacattcaagatgctcactggggacaccacagtgacctcaggggatgccaccgtagcaggcaagagtattttaaccaatatttctgaagtccatcaaaatatgggctactgtcctcagtttgatgcaattgatgagctgctcacaggacgagaacatctttacctttatgcccggcttcgaggtgtaccagcagaagaaatcgaaaaggttgcaaactggagtattaagagcctgggcctgactgtctacgccgactgcctggctggcacgtacagtgggggcaacaagcggaaactctccacagccatcgcactcattggctgcccaccgctggtgctgctggatgagcccaccacagggatggacccccaggcacgccgcatgctgtggaacgtcatcgtgagcatcatcagagaagggagggctgtggtcctcacatcccacagcatggaagaatgtgaggcactgtgtacccggctggccatcatggtaaagggcgcctttcgatgtatgggcaccattcagcatctcaagtccaaatttggagatggctatatcgtcacaatgaagatcaaatccccgaaggacgacctgcttcctgacctgaaccctgtggagcagttcttccaggggaacttcccaggcagtgtgcagagggagaggcactacaacatgctccagttccaggtctcctcctcctccctggcgaggatcttccagctcctcctctcccacaaggacagcctgctcatcgaggagtactcagtcacacagaccacactggaccaggtgtttgtaaattttgctaaacagcagactgaaagtcatgacctccctctgcaccctcgagctgctggagccagtcgacaagcccaggactgatctttcacaccgctcgttcctgcagccagaaaggaactctgggcagctggaggcgcaggagcctgtgcccatatggtcatccaaatggactggccagcgtaaatgaccccactgcagcagaaaacaaacacacgaggagcatgcagcgaattcagaaagaggtctttcagaaggaaaccgaaactgacttgctcacctggaacacctgatggtgaaaccaaacaaatacaaaatccttctccagaccccagaactagaaaccccgggccatcccactagcagctttggcctccatattgctctcatttcaagcagatctgcttttctgcatgtttgtctgtgtgtctgcgttgtgtgtgattttcatggaaaaataaaatgcaaatgcactcatcacaaact

SEQ ID NO: 2917 - DNA, 9236 bp, Homo sapiens
  source 1..9236: mol_type = unassigned DNA
agtagagacagggtttcaccatgttggtcaggctggtctcaaactcctgacttcgtgatctgcccaccttggcctcccaaagtgctgggattacaggcgtgagccaccgcacccggtcagctattttctacatgcttcatttgcagtgtaatattggattgtatgagactttgggttttgtgttaatacctacagaaaatgttgatattttctcttagcaggctgtcaaccaggttaggttcaggtcataagtttctacccacattctttgaactgtagttgtcattttagtttatttttcaaaaacttttgcagtacctttttggtctgtcttgtgtgtgccttgcagtgaacagtctggatttggacagtggtctgtctgttagttcagtttctcaagcctttgtcacactaataggattggatttatgtatgtccagcttgggaattattacaggaattaaaaacaactttttagagtgctttcctgagctctctttctatttgttcccccttctactttttgcttccctgtggctgctgtttctatcctccagccagagagctagtgtttattttctccattgtgttacacacttgtgcagctgcaaccaccatatccagggcccaatggtaggaggtagagaagaaaagcaaaagggattggcctcatcctcttacaacgatagttccattgaatagagagaaaggttttcctgcctcagagtgttggctgcactaggcttttgttactgtagtctggccctgttaccatgggattgcttgcatgtggggatacaggagaattcagaaaagaaaaaaagatttgctatttctacattctccctgagcattaagacttcccttgcccattcctcaattcaaagctaaggcttcttctggagctgcctctgtgggcggttcgggagataccaaaggagaaaaagtaccactgttgatatggtggtatttcaaattctggtctaccctatttcacatgccttgtttacttttcagagctgacagattgctgctccatgcattctgtccagtttcctaagagagacagcttggagtatgcttaatccatcttacctgggactgaaacagctgcttattttgccgttaaaaattacatgcagtttactgcgtggctccgggtttgtttgtttgtttttcctctttaataggtttattcagaaaacatgtccactgcaattagggaggtaggagtttggagacagaccagaacacttctactgaagaattacttaattaaatgcagaaccaaaaagagtagtgttcaggaaattctttttccactattttttttattttggttaatattaattagcatgatgcatccaaataagaaatatgaagaagtgcctaatatagaactcaatcctatggacaagtttactctttctaatctaattcttggatatactccagtgactaatattacaagcagcatcatgcagaaagtgtctactgatcatctacctgatgtcataattactgaagaatatacaaatgaaaaagaaatgttaacatccagtctctctaagccgagcaactttgtaggtgtggttttcaaagactccatgtcctatgaacttcgtttttttcctgatatgattccagtatcttctatttatatggattcaagagctggctgttcaaaatcatgtgaggctgctcagtactggtcctcaggtttcacagttttacaagcatccatagatgctgccattatacagttgaagaccaatgtttctctttggaaggagctggagtcaactaaagctgttattatgggagaaactgctgttgtagaaatagatacctttccccgaggagtaattttaatatacctagttatagcattttcaccttttggatactttttggcaattcatatcgtagcagaaaaagaaaaaaaaataaaagaatttttaaagataatgggacttcatgatactgccttttggctttcctgggttcttctatatacaagtttaatttttcttatgtcccttcttatggcagtcattgcgacagcttctttgttatttcctcaaagtagcagcattgtgatatttctgctttttttcctttatggattatcatctgtattttttgctttaatgctgacacctctttttaaaaaatcaaaacatgtgggaatagttgaattttttgttactgtggcttttggatttattggccttatgataatcctcatagaaagttttcccaaatcgttagtgtggcttttcagtcctttctgtcactgtacttttgtgattggtattgcacaggtcatgcatttagaagattttaatgaaggtgcttcattttcaaatttgactgcaggcccatatcctctaattattacaattatcatgctcacacttaatagtatattctatgtcctcttggctgtctatcttgatcaagtcattccaggggaatttggcttacggagatcatctttatattttctgaagccttcatattggtcaaagagcaaaagaaattatgaggagttatcagagggcaatgttaatggaaatattagttttagtgaaattattgagccagtttcttcagaatttgtaggaaaagaagccataagaattagtggtattcagaagacatacagaaagaagggtgaaaatgtggaggctttgagaaatttgtcatttgacatatatgagggtcagattactgccttacttggccacagtggaacaggaaagagtacattgatgaatattctttgtggactctgcccaccttctgatgggtttgcatctatatatggacacagagtctcagaaatagatgaaatgtttgaagcaagaaaaatgattggcatttgtccacagttagatatacactttgatgttttgacagtagaagaaaatttatcaattttggcttcaatcaaagggataccagccaacaatataatacaagaagtgcagaaggttttactagatttagacatgcagactatcaaagataaccaagctaaaaaattaagtggtggtcaaaaaagaaagctgtcattaggaattgctgttcttgggaacccaaagatactgctgctagatgaaccaacagctggaatggacccctgttctcgacatattgtatggaatcttttaaaatacagaaaagccaatcgggtgacagtgttcagtactcatttcatggatgaagctgacattcttgcagataggaaagctgtgatatcacaaggaatgctgaaatgtgttggttcttcaatgttcctcaaaagtaaatgggggatcggctaccgcctgagcatgtacatagacaaatattgtgccacagaatctctttcttcactggttaaacaacatatacctggagctactttattacaacagaatgaccaacaacttgtgtatagcttgcctttcaaggacatggacaaattttcaggtttgttttctgccctagacagtcattcaaatttgggtgtcatttcttatggtgtttccatgacgactttggaagacgtatttttaaagctagaagttgaagcagaaattgaccaagcagattatagtgtatttactcagcagccactggaggaagaaatggattcaaaatcttttgatgaaatggaacagagcttacttattctttctgaaaccaaggctgctctagtgagcaccatgagcctttggaaacaacagatgtatacaatagcaaagtttcatttctttaccttgaaacgtgaaagtaaatcagtgagatcagtgttgcttctgcttttaatttttttcacagttcagatttttatgtttttggttcatcactcttttaaaaatgctgtggttcccatcaaacttgttccagacttatattttctaaaacctggagacaaaccacataaatacaaaacaagtctgcttcttcaaaattctgctgactcagatatcagtgatcttattagctttttcacaagccagaacataatggtgacgatgattaatgacagtgactatgtatccgtggctccccatagtgcggctttaaatgtgatgcattcagaaaaggactatgtttttgcagctgttttcaacagtactatggtttattctttacctatattagtgaatatcattagtaactactatctttatcatttaaatgtgactgaaaccatccagatctggagtaccccattctttcaagaaattactgatatagtttttaaaattgagctgtattttcaagcagctttgcttggaatcattgttactgcaatgccaccttactttgccatggaaaatgcagagaatcataagatcaaagcttatactcaacttaaactttcaggtcttttgccatctgcatattggattggacaagctgttgttgatatccccttattttttatcattcttattttgatgctaggaagcttattggcatttcattatggattatatttttatactgtaaagttccttgctgtggttttttgccttattggttatgttccatcagttattctgttcacttatattgcttctttcacctttaagaaaattttaaataccaaagaattttggtcatttatctattctgtggcagcgttggcttgtattgcaatcactgaaataactttctttatgggatacacaattgcaactattcttcattatgccttttgtatcatcattccaatctatccacttctaggttgcctgatttctttcataaagatttcttggaagaatgtacgaaaaaatgtggacacctataatccatgggataggctttcagtagctgttatatcgccttacctgcagtgtgtactgtggattttcctcttacaatactatgagaaaaaatatggaggcagatcaataagaaaagatccctttttcagaaacctttcaacgaagtctaaaaataggaagcttccagaaccaccagacaatgaggatgaagatgaagatgtcaaagctgaaagactaaaggtcaaagagctgatgggttgccagtgttgtgaggagaaaccatccattatggtcagcaatttgcataaagaatatgatgacaagaaagattttcttctttcaagaaaagtaaagaaagtggcaactaaatacatctctttctgtgtgaaaaaaggagagatcttaggactattgggtccaaatggtgctggcaaaagcacaattattaatattctggttggtgatattgaaccaacttcaggccaggtatttttaggagattattcttcagagacaagtgaagatgatgattcactgaagtgtatgggttactgtcctcagataaaccctttgtggccagatactacattgcaggaacattttgaaatttatggagctgtcaaaggaatgagtgcaagtgacatgaaagaagtcataagtcgaataacacatgcacttgatttaaaagaacatcttcagaagactgtaaagaaactacctgcaggaatcaaacgaaagttgtgttttgctctaagtatgctagggaatcctcagattactttgctagatgaaccatctacaggtatggatcccaaagccaaacagcacatgtggcgagcaattcgaactgcatttaaaaacagaaagcgggctgctattctgaccactcactatatggaggaggcagaggctgtctgtgatcgagtagctatcatggtgtctgggcagttaagatgtatcggaacagtacaacatctaaagagtaaatttggaaaaggctactttttggaaattaaattgaaggactggatagaaaacctagaagtagaccgccttcaaagagaaattcagtatattttcccaaatgcaagccgtcaggaaagtttttcttctattttggcttataaaattcctaaggaagatgttcagtccctttcacaatctttttttaagctggaagaagctaaacatgcttttgccattgaagaatatagcttttctcaagcaacattggaacaggtttttgtagaactcactaaagaacaagaggaggaagataatagttgtggaactttaaacagcacactttggtgggaacgaacacaagaagatagagtagtattttgaatttgtattgttcggtctgcttactgggacttctttctttttcacttaattttaactttggtttaaaaagttttttattggaatggtaactggagaaccaagaacgcacttgaaatttttctaagctccttaattgaaatgctgtggttgtgtgttttgcttttctttaaataaaacgtatgtataattaagtgaagctgcatgtttgtattgaagtatattgaactatatagtttgtatgtcatctttttcaccattcagaaacagtgcttctgaatttgtgatttaaaggaattgtaatagaatagttttatttttaagttatctttaagtttatgccatcttcttaaataagtacgtaatgttccaatctaaataaaaaactaattcataactaatgcatagaaaagatacataaagcaatgtgaaagtttcttgcttctcctttttaatttctaaaaaagccactttgaatggaagttgtcatccgtaaaagctgaagtgtaagcactaggaaatctcaatatagagatttgaggaaagttatatccactaggtggcagtcattgatcataataagtgaaatgagcccttgttctagtacatgattttaggcttaggtaattaggtatgtgaaattacatttctttaatttaaagtaaaattcagaaggttttagttattataattaaaggaagactgtgtgtagaatcttacgtaatagtctgattctttgactctgtggctagaatgacagttatctatggaggtggtagaattaagccataccttttccttcatcactcttggaacatataaattttttgtcatcttccttgcaaagggcacatttaattttgttcttgaataaaatattttattgggtatttgtttttattggtaaactttagtgaatctcttctataaaattgtaagtagatcagtgtgtagatttatttagtaacttacctcattgactttggaacatggtaggatatgaataaactctttcaagggttaaattaagaattgtaagtgcagtgcgcctatttctttttaataagaaccagaatttcatttttgatagagttaaaggcatggctaatattttcttagaaatacttccttgtacaacccatgtattggctcaaggtataaaatagtgtaaataatgctagttgacattacatttcaaccaaatgaaagtattaacttcataaaacaaatatattgagagtgtgattattgtattagacaacaacaacagcaatgacagaaggatttggtactgaattactttaaataagcaaaacctttcagtggcattattcattctttaatgtaggcaaaatttaatgaacttttagctttattgtgtaataagacatctgtgattttaggctctagcagtggatttaaaagtgttctttctcggtacaaagtacgtggctgatattttcccccattgctgggggcagttgctatacactttcctaaagtatatataatgttcacataaatacccagggacctcttttttgggatgtgcttttgtaattatgtgtaaccttgaatacttaagtttagtaaaagcaacaaaattatatctatagtttactaaggcagtcacgaaaaagcatagttttttttagaacctgaccatcctaagaaagttatgtcatctgaagatagagcatgactaatgaagaaaattacctgcttttgcacgtagatttggtaactttcactttacatttgtgaatgtgtaattggtgcaaagtaaattttttttcctgcaaagtgaaagttgagtagtcacaatcatgttatttattttgttcatttagttactttgcttttaatgtatatgaatacatgctcttgtaaacaattttaaaagacattcaaatttttttttagtttttatatactcagaatatattttggttgttaaattaaattatgttccctttttcacagtaacaaaatctgactcaggagaaatataacttaattcttaggaaaacaagggtaagtgagctggaaagcaaaggaggcaaaaagtgaaatatatttatttacagtgtacagttcatgtttatgaacatactaattttaaaatgtcttaaattactgatctcaaaacttttttctatgtcagtacagataaataaataaatatacatattaggcaaaagcaacatcaccaaccttatatttcccattcatggtcaaattttcaaaggaaagtaaaagctgagctttactgagtgagtgtttactgactaataaggcaagaaaaaacatgatgagtgtactttacatcttacttttgtgggctcttaatttttttctctagtttgttttcagtaaagacagtgggttttctttaaaataatttttttcttttaaatttgcacaaattatcttaggtcagtattttggttttaatcattaaaacatttttagagtaatgtaatttaacaaatattttaagtgattatgtttccagaaatggattctttggagagaactcggatgactatcagttttggccctgtaagatcgtggagatctgtaagatagatacttatataacttacataaaatatatataatatattacttatataacttatataactagctattattttatataactaactataatatgacaaatcctttgctagtagtactaacaacgttttataggagcacaattaattttacttaggataagtgttgttattattgtttttattgttgttctgttagttactcaaaacttcattctaattgtgccctgagtttgttaaaataccatactgtatttttgtgtaacatgtaaataggcattaatttttgagaaatagaaatgtttatccttaatgtatttttaatttgctaacattgattttttattttctttcctgaaatagcttatttcctaaaatgaaagaatttattctcagatgaataatttttatatcagctattcttatcaggtaaaagtttaattattttttatttataatatatgtaagcaattctcaatgctgctctttaagaaaaataaatatgattatattaataataagc

SEQ ID NO: 2918 - DNA, 8180 bp, Homo sapiens
  source 1..8180: mol_type = unassigned DNA
agctctgcctgcgccaggagcgcgcgggtgcgcgcggccgcgccctcgcacagatcccagctgggtcacccgcactgagtcaacagactgagcgcgtccaggcctgacagctctgcggctcgggccctgaggtttattcagaaaacatgtccactgcaattagggaggtaggagtttggagacagaccagaacacttctactgaagaattacttaattaaatgcagaaccaaaaagagtagtgttcaggaaattctttttccactattttttttattttggttaatattaattagcatgatgcatccaaataagaaatatgaagaagtgcctaatatagaactcaatcctatggacaagtttactctttctaatctaattcttggatatactccagtgactaatattacaagcagcatcatgcagaaagtgtctactgatcatctacctgatgtcataattactgaagaatatacaaatgaaaaagaaatgttaacatccagtctctctaagccgagcaactttgtaggtgtggttttcaaagactccatgtcctatgaacttcgtttttttcctgatatgattccagtatcttctatttatatggattcaagagctggctgttcaaaatcatgtgaggctgctcagtactggtcctcaggtttcacagttttacaagcatccatagatgctgccattatacagttgaagaccaatgtttctctttggaaggagctggagtcaactaaagctgttattatgggagaaactgctgttgtagaaatagatacctttccccgaggagtaattttaatatacctagttatagcattttcaccttttggatactttttggcaattcatatcgtagcagaaaaagaaaaaaaaataaaagaatttttaaagataatgggacttcatgatactgccttttggctttcctgggttcttctatatacaagtttaatttttcttatgtcccttcttatggcagtcattgcgacagcttctttgttatttcctcaaagtagcagcattgtgatatttctgctttttttcctttatggattatcatctgtattttttgctttaatgctgacacctctttttaaaaaatcaaaacatgtgggaatagttgaattttttgttactgtggcttttggatttattggccttatgataatcctcatagaaagttttcccaaatcgttagtgtggcttttcagtcctttctgtcactgtacttttgtgattggtattgcacaggtcatgcatttagaagattttaatgaaggtgcttcattttcaaatttgactgcaggcccatatcctctaattattacaattatcatgctcacacttaatagtatattctatgtcctcttggctgtctatcttgatcaagtcattccaggggaatttggcttacggagatcatctttatattttctgaagccttcatattggtcaaagagcaaaagaaattatgaggagttatcagagggcaatgttaatggaaatattagttttagtgaaattattgagccagtttcttcagaatttgtaggaaaagaagccataagaattagtggtattcagaagacatacagaaagaagggtgaaaatgtggaggctttgagaaatttgtcatttgacatatatgagggtcagattactgccttacttggccacagtggaacaggaaagagtacattgatgaatattctttgtggactctgcccaccttctgatgggtttgcatctatatatggacacagagtctcagaaatagatgaaatgtttgaagcaagaaaaatgattggcatttgtccacagttagatatacactttgatgttttgacagtagaagaaaatttatcaattttggcttcaatcaaagggataccagccaacaatataatacaagaagtgcagaaggttttactagatttagacatgcagactatcaaagataaccaagctaaaaaattaagtggtggtcaaaaaagaaagctgtcattaggaattgctgttcttgggaacccaaagatactgctgctagatgaaccaacagctggaatggacccctgttctcgacatattgtatggaatcttttaaaatacagaaaagccaatcgggtgacagtgttcagtactcatttcatggatgaagctgacattcttgcagataggaaagctgtgatatcacaaggaatgctgaaatgtgttggttcttcaatgttcctcaaaagtaaatgggggatcggctaccgcctgagcatgtacatagacaaatattgtgccacagaatctctttcttcactggttaaacaacatatacctggagctactttattacaacagaatgaccaacaacttgtgtatagcttgcctttcaaggacatggacaaattttcaggtttgttttctgccctagacagtcattcaaatttgggtgtcatttcttatggtgtttccatgacgactttggaagacgtatttttaaagctagaagttgaagcagaaattgaccaagcagattatagtgtatttactcagcagccactggaggaagaaatggattcaaaatcttttgatgaaatggaacagagcttacttattctttctgaaaccaaggctgctctagtgagcaccatgagcctttggaaacaacagatgtatacaatagcaaagtttcatttctttaccttgaaacgtgaaagtaaatcagtgagatcagtgttgcttctgcttttaatttttttcacagttcagatttttatgtttttggttcatcactcttttaaaaatgctgtggttcccatcaaacttgttccagacttatattttctaaaacctggagacaaaccacataaatacaaaacaagtctgcttcttcaaaattctgctgcagactcagatatcagtgatcttattagctttttcacaagccagaacataatggtgacgatgattaatgacagtgactatgtatccgtggctccccatagtgcggctttaaatgtgatgcattcagaaaaggactatgtttttgcagctgttttcaacagtactatggtttattctttacctatattagtgaatatcattagtaactactatctttatcatttaaatgtgactgaaaccatccagatctggagtaccccattctttcaagaaattactgatatagtttttaaaattgagctgtattttcaagcagctttgcttggaatcattgttactgcaatgccaccttactttgccatggaaaatgcagagaatcataagatcaaagcttatactcaacttaaactttcaggtcttttgccatctgcatattggattggacaagctgttgttgatatccccttattttttatcattcttattttgatgctaggaagcttattggcatttcattatggattatatttttatactgtaaagttccttgctgtggttttttgccttattggttatgttccatcagttattctgttcacttatattgcttctttcacctttaagaaaattttaaataccaaagaattttggtcatttatctattctgtggcagcgttggcttgtattgcaatcactgaaataactttctttatgggatacacaattgcaactattcttcattatgccttttgtatcatcattccaatctatccacttctaggttgcctgatttctttcataaagatttcttggaagaatgtacgaaaaaatgtggacacctataatccatgggataggctttcagtagctgttatatcgccttacctgcagtgtgtactgtggattttcctcttacaatactatgagaaaaaatatggaggcagatcaataagaaaagatccctttttcagaaacctttcaacgaagtctaaaaataggaagcttccagaaccaccagacaatgaggatgaagatgaagatgtcaaagctgaaagactaaaggtcaaagagctgatgggttgccagtgttgtgaggagaaaccatccattatggtcagcaatttgcataaagaatatgatgacaagaaagattttcttctttcaagaaaagtaaagaaagtggcaactaaatacatctctttctgtgtgaaaaaaggagagatcttaggactattgggtccaaatggtgctggcaaaagcacaattattaatattctggttggtgatattgaaccaacttcaggccaggtatttttaggagattattcttcagagacaagtgaagatgatgattcactgaagtgtatgggttactgtcctcagataaaccctttgtggccagatactacattgcaggaacattttgaaatttatggagctgtcaaaggaatgagtgcaagtgacatgaaagaagtcataagtcgaataacacatgcacttgatttaaaagaacatcttcagaagactgtaaagaaactacctgcaggaatcaaacgaaagttgtgttttgctctaagtatgctagggaatcctcagattactttgctagatgaaccatctacaggtatggatcccaaagccaaacagcacatgtggcgagcaattcgaactgcatttaaaaacagaaagcgggctgctattctgaccactcactatatggaggaggcagaggctgtctgtgatcgagtagctatcatggtgtctgggcagttaagatgtatcggaacagtacaacatctaaagagtaaatttggaaaaggctactttttggaaattaaattgaaggactggatagaaaacctagaagtagaccgccttcaaagagaaattcagtatattttcccaaatgcaagccgtcaggaaagtttttcttctattttggcttataaaattcctaaggaagatgttcagtccctttcacaatctttttttaagctggaagaagctaaacatgcttttgccattgaagaatatagcttttctcaagcaacattggaacaggtttttgtagaactcactaaagaacaagaggaggaagataatagttgtggaactttaaacagcacactttggtgggaacgaacacaagaagatagagtagtattttgaatttgtattgttcggtctgcttactgggacttctttctttttcacttaattttaactttggtttaaaaagttttttattggaatggtaactggagaaccaagaacgcacttgaaatttttctaagctccttaattgaaatgctgtggttgtgtgttttgcttttctttaaataaaacgtatgtataattaagtgaagctgcatgtttgtattgaagtatattgaactatatagtttgtatgtcatctttttcaccattcagaaacagtgcttctgaatttgtgatttaaaggaattgtaatagaatagttttatttttaagttatctttaagtttatgccatcttcttaaataagtacgtaatgttccaatctaaataaaaaactaattcataactaatgcatagaaaagatacataaagcaatgtgaaagtttcttgcttctcctttttaatttctaaaaaagccactttgaatggaagttgtcatccgtaaaagctgaagtgtaagcactaggaaatctcaatatagagatttgaggaaagttatatccactaggtggcagtcattgatcataataagtgaaatgagcccttgttctagtacatgattttaggcttaggtaattaggtatgtgaaattacatttctttaatttaaagtaaaattcagaaggttttagttattataattaaaggaagactgtgtgtagaatcttacgtaatagtctgattctttgactctgtggctagaatgacagttatctatggaggtggtagaattaagccataccttttccttcatcactcttggaacatataaattttttgtcatcttccttgcaaagggcacatttaattttgttcttgaataaaatattttattgggtatttgtttttattggtaaactttagtgaatctcttctataaaattgtaagtagatcagtgtgtagatttatttagtaacttacctcattgactttggaacatggtaggatatgaataaactctttcaagggttaaattaagaattgtaagtgcagtgcgcctatttctttttaataagaaccagaatttcatttttgatagagttaaaggcatggctaatattttcttagaaatacttccttgtacaacccatgtattggctcaaggtataaaatagtgtaaataatgctagttgacattacatttcaaccaaatgaaagtattaacttcataaaacaaatatattgagagtgtgattattgtattagacaacaacaacagcaatgacagaaggatttggtactgaattactttaaataagcaaaacctttcagtggcattattcattctttaatgtaggcaaaatttaatgaacttttagctttattgtgtaataagacatctgtgattttaggctctagcagtggatttaaaagtgttctttctcggtacaaagtacgtggctgatattttcccccattgctgggggcagttgctatacactttcctaaagtatatataatgttcacataaatacccagggacctcttttttgggatgtgcttttgtaattatgtgtaaccttgaatacttaagtttagtaaaagcaacaaaattatatctatagtttactaaggcagtcacgaaaaagcatagttttttttagaacctgaccatcctaagaaagttatgtcatctgaagatagagcatgactaatgaagaaaattacctgcttttgcacgtagatttggtaactttcactttacatttgtgaatgtgtaattggtgcaaagtaaattttttttcctgcaaagtgaaagttgagtagtcacaatcatgttatttattttgttcatttagttactttgcttttaatgtatatgaatacatgctcttgtaaacaattttaaaagacattcaaatttttttttagtttttatatactcagaatatattttggttgttaaattaaattatgttccctttttcacagtaacaaaatctgactcaggagaaatataacttaattcttaggaaaacaagggtaagtgagctggaaagcaaaggaggcaaaaagtgaaatatatttatttacagtgtacagttcatgtttatgaacatactaattttaaaatgtcttaaattactgatctcaaaacttttttctatgtcagtacagataaataaataaatatacatattaggcaaaagcaacatcaccaaccttatatttcccattcatggtcaaattttcaaaggaaagtaaaagctgagctttactgagtgagtgtttactgactaataaggcaagaaaaaacatgatgagtgtactttacatcttacttttgtgggctcttaatttttttctctagtttgttttcagtaaagacagtgggttttctttaaaataatttttttcttttaaatttgcacaaattatcttaggtcagtattttggttttaatcattaaaacatttttagagtaatgtaatttaacaaatattttaagtgattatgtttccagaaatggattctttggagagaactcggatgactatcagttttggccctgtaagatcgtggagatctgtaagatagatacttatataacttacataaaatatatataatatattacttatataacttatataactagctattattttatataactaactataatatgacaaatcctttgctagtagtactaacaacgttttataggagcacaattaattttacttaggataagtgttgttattattgtttttattgttgttctgttagttactcaaaacttcattctaattgtgccctgagtttgttaaaataccatactgtatttttgtgtaacatgtaaataggcattaatttttgagaaatagaaatgtttatccttaatgtatttttaatttgctaacattgattttttattttctttcctgaaatagcttatttcctaaaatgaaagaatttattctcagatgaataatttttatatcagctattcttatcaggtaaaagtttaattattttttatttataatatatgtaagcaattctcaatgctgctctttaagaaaaataaatatgattatattaataataagc

SEQ ID NO: 2919 - DNA, 5296 bp, Homo sapiens
  source 1..5296: mol_type = unassigned DNA
ctgctggagtaggcacccatttaaagaaaaaatgaagaagcagcaataaagaagttgtaatcgttacctagacaaacagagaactggttttgacagtgtttctagagtgctttttattattttcctgacagttgtgttccaccatgattactttctccttcagcgaataggctaaatgaatatgaaacagaaaagcgtgtatcagcaaaccaaagcacttctgtgcaagaattttcttaagaaatggaggatgaaaagagagagcttattggaatggggcctctcaatacttctaggactgtgtattgctctgttttccagttccatgagaaatgtccagtttcctggaatggctcctcagaatctgggaagggtagataaatttaatagctcttctttaatggttgtgtatacaccaatatctaatttaacccagcagataatgaataaaacagcacttgctcctcttttgaaaggaacaagtgtcattggggcaccaaataaaacacacatggacgaaatacttctggaaaatttaccatatgctatgggaatcatctttaatgaaactttctcttataagttaatatttttccagggatataacagtccactttggaaagaagatttctcagctcattgctgggatggatatggtgagttttcatgtacattgaccaaatactggaatagaggatttgtggctttacaaacagctattaatactgccattatagaaatcacaaccaatcaccctgtgatggaggagttgatgtcagttactgctataactatgaagacattacctttcataactaaaaatcttcttcacaatgagatgtttattttattcttcttgcttcatttctccccacttgtatattttatatcactcaatgtaacaaaagagagaaaaaagtctaagaatttgatgaaaatgatgggtctccaagattcagcattctggctctcctggggtctaatctatgctggcttcatctttattatttccatattcgttacaattatcataacattcacccaaattatagtcatgactggcttcatggtcatatttatactcttttttttatatggcttatctttggtagctttggtgttcctgatgagtgtgctgttaaagaaagctgtcctcaccaatttggttgtgtttctccttaccctcttttggggatgtctgggattcactgtattttatgaacaacttccttcatctctggagtggattttgaatatttgtagcccttttgcctttactactggaatgattcagattatcaaactggattataacttgaatggtgtaatttttcctgacccttcaggagactcatatacaatgatagcaactttttctatgttgcttttggatggtctcatctacttgctattggcattatactttgacaaaattttaccctatggagatgagcgccattattctcctttatttttcttgaattcatcatcttgtttccaacaccaaaggactaatgctaaggttattgagaaagaaatcgatgctgagcatccctctgatgattattttgaaccagtagctcctgaattccaaggaaaagaagccatcagaatcagaaatgttaagaaggaatataaaggaaaatctggaaaagtggaagcattgaaaggcttgctctttgacatatatgaaggtcaaatcacggcaatcctgggtcacagtggagctggcaaatcttcactgctaaatattcttaatggattgtctgttccaacagaaggatcagttaccatctataataaaaatctctctgaaatgcaagacttggaggaaatcagaaagataactggcgtctgtcctcaattcaatgttcaatttgacatactcaccgtgaaggaaaacctcagcctgtttgctaaaataaaagggattcatctaaaggaagtggaacaagaggtacaacgaatattattggaattggacatgcaaaacattcaagataaccttgctaaacatttaagtgaaggacagaaaagaaagctgacttttgggattaccattttaggagatcctcaaattttgcttttagatgaaccaactactggattggatcccttttccagagatcaagtgtggagcctcctgagagagcgtagagcagatcatgtgatccttttcagtacccagtccatggatgaggctgacatcctggctgatagaaaagtgatcatgtccaatgggagactgaagtgtgcaggttcttctatgtttttgaaaagaaggtggggtcttggatatcacctaagtttacataggaatgaaatatgtaacccagaacaaataacatccttcattactcatcacatccccgatgctaaattaaaaacagaaaacaaagaaaagcttgtatatactttgccactggaaaggacaaatacatttccagatcttttcagtgatctggataagtgttctgaccagggagtgacaggttatgacatttccatgtcaactctaaatgaagtctttatgaaactggaaggacagtcaactatcgaacaagatttcgaacaagtggagatgataagagactcagaaagcctcaatgaaatggagctggctcactcttccttctctgaaatgcagacagctgtgagtgacatgggcctctggagaatgcaagtctttgccatggcacggctccgtttcttaaagttaaaacgtcaaactaaagtgttattgaccctattattggtatttggaatcgcaatattccctttgattgttgaaaatataatgtatgctatgttaaatgaaaagatcgattgggaatttaaaaacgaattgtattttctctctcctggacaacttccccaggaaccccgtaccagcctgttgatcatcaataacacagaatcaaatattgaagattttataaaatcactgaagcatcaaaatatacttttggaagtagatgactttgaaaacagaaatggtactgatggcctctcatacaatggagctatcatagtttctggtaaacaaaaggattatagattttcagttgtgtgtaataccaagagattgcactgttttccaattcttatgaatattatcagcaatgggctacttcaaatgtttaatcacacacaacatattcgaattgagtcaagcccatttcctcttagccacataggactctggactgggttgccggatggttcctttttcttatttttggttctatgtagcatttctccttatatcaccatgggcagcatcagtgattacaagaaaaatgctaagtcccagctatggatttcaggcctctacacttctgcttactggtgtgggcaggcactagtggacgtcagcttcttcattttaattctccttttaatgtatttaattttctacatagaaaacatgcagtaccttcttattacaagccaaattgtgtttgctttggttatagttactcctggttatgcagcttctcttgtcttcttcatatatatgatatcatttatttttcgcaaaaggagaaaaaacagtggcctttggtcattttacttcttttttgcctccaccatcatgttttccatcactttaatcaatcattttgacctaagtatattgattaccaccatggtattggttccttcatataccttgcttggatttaaaacttttttggaagtgagagaccaggagcactacagagaatttccagaggcaaattttgaattgagtgccactgattttctagtctgcttcataccctactttcagactttgctattcgtttttgttctaagatgcatggaactaaaatgtggaaagaaaagaatgcgaaaagatcctgttttcagaatttccccccaaagtagagatgctaagccaaatccagaagaacccatagatgaagatgaagatattcaaacagaaagaataagaacagccactgctctgaccacttcaatcttagatgagaaacctgttataattgccagctgtctacacaaagaatatgcaggccagaagaaaagttgcttttcaaagaggaagaagaaaatagcagcaagaaatatctctttctgtgttcaagaaggtgaaattttgggattgctaggacccaatggtgctggaaaaagttcatctattagaatgatatctgggatcacaaagccaactgctggagaggtggaactgaaaggctgcagttcagttttgggccacctggggtactgccctcaagagaacgtgctgtggcccatgctgacgttgagggaacacctggaggtgtatgctgccgtcaaggggctcaggaaagcggacgcgaggctcgccatcgcaagattagtgagtgctttcaaactgcatgagcagctgaatgttcctgtgcagaaattaacagcaggaatcacgagaaagttgtgttttgtgctgagcctcctgggaaactcacctgtcttgctcctggatgaaccatctacgggcatagaccccacagggcagcagcaaatgtggcaggcaatccaggcagtcgttaaaaacacagagagaggtgtcctcctgaccacccataacctggctgaggcggaagccttgtgtgaccgtgtggccatcatggtgtctggaaggcttagatgcattggctccatccaacacctgaaaaacaaacttggcaaggattacattctagagctaaaagtgaaggaaacgtctcaagtgactttggtccacactgagattctgaagcttttcccacaggctgcagggcaggaaaggtattcctctttgttaacctataagctgcccgtggcagacgtttaccctctatcacagacctttcacaaattagaagcagtgaagcataactttaacctggaagaatacagcctttctcagtgcacactggagaaggtattcttagagctttctaaagaacaggaagtaggaaattttgatgaagaaattgatacaacaatgagatggaaactcctccctcattcagatgaaccttaaaacctcaaacctagtaattttttgttgatctcctataaactcatgttttatgtaataattaatagtatgtttaattttaaagatcatttaaaattaacatcaggtatattttgtaaatttagttaacaaatacataaattttaaaattattcttcctctcaaacataggggtgatagcaaacctgtgataaaggcaatacaaaatattagtaaagtcacccaaagagtcaggcactgggtattgtggaaataaaactatataaactt

SEQ ID NO: 2920 - DNA, 2176 bp, Homo sapiens
  source 1..2176: mol_type = unassigned DNA
agtgcaatggggcgatctctgctcactgcaacctctgcctcccagattcaagcgattctcctgcctcagcctcccaagttgctgggattacagacatttaccaccacacctggctgattttgtatttttagtagagatggggtttcaccatgttggtcaggctggttcagactcctgacctcaagtgatcctttttaaggttgaatagtatccattgtttgtatatacatacacattttgttaatccattaatttggacttttgggttgcttccacttagccacataggactctggactgggttgccggatggttcctttttcttatttttggttctatgtagcatttctccttatatcaccatgggcagcatcagtgattacaagaaaaatgctaagtcccagctatggatttcaggcctctacacttctgcttactggtgtgggcaggcactagtggacgtcagcttcttcattttaattctccttttaatgtatttaattttctacatagaaaacatgcagtaccttcttattacaagccaaattgtgtttgctttggttatagttactcctggttatgcagcttctcttgtcttcttcatatatatgatatcatttatttttcgcaaaaggagaaaaaacagtggcctttggtcattttacttcttttttgcctccaccatcatgttttccatcactttaatcaatcattttgacctaagtatattgattaccaccatggtattggttccttcatataccttgcttggatttaaaacttttttggaagtgagagaccaggagcactacagagaatttccagaggcaaattttgaattgagtgccactgattttctagtctgcttcataccctactttcagactttgctattcgtttttgttctaagatgcatggaactaaaatgtggaaagaaaagaatgcgaaaagatcctgttttcagaatttccccccaaagtagagatgctaagccaaatccagaagaacccatagatgaagatgaagatattcaaacagaaagaataagaacagccactgctctgaccacttcaatcttagatgagaaacctgttataattgccagctgtctacacaaagaatatgcaggccagaagaaaagttgcttttcaaagaggaagaagaaaatagcagcaagaaatatctctttctgtgttcaagaaggtgaaattttgggattgctaggacccaatggtgctggaaaaagttcatctattagaatgatatctgggatcacaaagccaactgctggagaggtggaactgaaaggctgcagttcagttttgggccacctggggtactgccctcaagagaacgtgctgtggcccatgctgacgttgagggaacacctggaggtgtatgctgccgtcaaggggctcaggaaagcggacgcgaggctcgccatcgcaagattagtgagtgctttcaaactgcatgagcagctgaatgttcctgtgcagaaattaacagcaggaatcacgagaaagttgtgttttgtgctgagcctcctgggaaactcacctgtcttgctcctggatgaaccatctacgggcatagaccccacagggcagcagcaaatgtggcaggcaatccaggcagtcgttaaaaacacagagagaggtgtcctcctgaccacccataacctggctgaggcggaagccttgtgtgaccgtgtggccatcatggtgtctggaaggcttagatgcattggctccatccaacacctgaaaaacaaacttggcaaggattacattctagagctaaaagtgaaggaaacgtctcaagtgactttggtccacactgagattctgaagcttttcccacaggctgcagggcaggaaaggtattcctctttgttaacctataagctgcccgtggcagacgtttaccctctatcacagacctttcacaaattagaagcagtgaagcataactttaacctggaagaatacagcctttctcagtgcacactggagaaggtattcttagagctttctaaagaacaggaagtaggaaattttgatgaagaaattgatacaacaatgagatggaaactcctccctcattcagatgaaccttaaaacctcaaacctagtaattttttgttgatctcctataaactcatgttttatgtaat

SEQ ID NO: 2921 - DNA, 6816 bp, Homo sapiens
  source 1..6816: mol_type = unassigned DNA
gggcaagctcagcgcacttggcttaaggggcggcgcgctccctgcctgctgctgggcggagggaaggcggcaagagctgcggagcccctggaagagcttccaggaaccctgcgctgtgggataaaggaatgaggttcagaaaggggcagggagttgcccgcagccgcaccgcacgtcttcagcccgaccgttgtcctgacctctctgtcccgtcccctgcccagtctcaccatggccttctggacacagctgatgctgctgctctggaagaatttcatgtatcgccggagacagccggtccagctcctggtcgaattgctgtggcctctcttcctcttcttcatcctggtggctgttcgccactcccacccgcccctggagcaccatgaatgccacttcccaaacaagccactgccatcggcgggcaccgtgccctggctccagggtctcatctgtaatgtgaacaacacctgctttccgcagctgacaccgggcgaggagcccgggcgcctgagcaacttcaacgactccctggtctcccggctgctagccgatgcccgcactgtgctgggaggggccagtgcccacaggacgctggctggcctagggaagctgatcgccacgctgagggctgcacgcagcacggcccagcctcaaccaaccaagcagtctccactggaaccacccatgctggatgtcgcggagctgctgacgtcactgctgcgcacggaatccctggggttggcactgggccaagcccaggagcccttgcacagcttgttggaggccgctgaggacctggcccaggagctcctggcgctgcgcagcctggtggagcttcgggcactgctgcagagaccccgagggaccagcggccccctggagttgctgtcagaggccctctgcagtgtcaggggacctagcagcacagtgggcccctccctcaactggtacgaggctagtgacctgatggagctggtggggcaggagccagaatccgccctgccagacagcagcctgagccccgcctgctcggagctgattggagccctggacagccacccgctgtcccgcctgctctggagacgcctgaagcctctgatcctcgggaagctactctttgcaccagatacaccttttacccggaagctcatggcccaggtgaaccggaccttcgaggagctcaccctgctgagggatgtccgggaggtgtgggagatgctgggaccccggatcttcaccttcatgaacgacagttccaatgtggccatgctgcagcggctcctgcagatgcaggatgaaggaagaaggcagcccagacctggaggccgggaccacatggaggccctgcgatcctttctggaccctgggagcggtggctacagctggcaggacgcacacgctgatgtggggcacctggtgggcacgctgggccgagtgacggagtgcctgtccttggacaagctggaggcggcaccctcagaggcagccctggtgtcgcgggccctgcaactgctcgcggaacatcgattctgggccggcgtcgtcttcttgggacctgaggactcttcagaccccacagagcacccaaccccagacctgggccccggccacgtgcgcatcaaaatccgcatggacattgacgtggtcacgaggaccaataagatcagggacaggttttgggaccctggcccagccgcggaccccctgaccgacctgcgctacgtgtggggcggcttcgtgtacctgcaagacctggtggagcgtgcagccgtccgcgtgctcagcggcgccaacccccgggccggcctctacctgcagcagatgccctatccgtgctatgtggacgacgtgttcctgcgtgtgctgagccggtcgctgccgctcttcctgacgctggcctggatctactccgtgacactgacagtgaaggccgtggtgcgggagaaggagacgcggctgcgggacaccatgcgcgccatggggctcagccgcgcggtgctctggctaggctggttcctcagctgcctcgggcccttcctgctcagcgccgcactgctggttctggtgctcaagctgggagacatcctcccctacagccacccgggcgtggtcttcctgttcttggcagccttcgcggtggccacggtgacccagagcttcctgctcagcgccttcttctcccgcgccaacctggctgcggcctgcggcggcctggcctacttctccctctacctgccctacgtgctgtgtgtggcttggcgggaccggctgcccgcgggtggccgcgtggccgcgagcctgctgtcgcccgtggccttcggcttcggctgcgagagcctggctctgctggaggagcagggcgagggcgcgcagtggcacaacgtgggcacccggcctacggcagacgtcttcagcctggcccaggtctctggccttctgctgctggacgcggcgctctacggcctcgccacctggtacctggaagctgtgtgcccaggccagtacgggatccctgaaccatggaattttccttttcggaggagctactggtgcggacctcggccccccaagagtccagccccttgccccaccccgctggacccaaaggtgctggtagaagaggcaccgcccggcctgagtcctggcgtctccgttcgcagcctggagaagcgctttcctggaagcccgcagccagccctgcgggggctcagcctggacttctaccagggccacatcaccgccttcctgggccacaacggggccggcaagaccaccaccctgtccatcttgagtggcctcttcccacccagtggtggctctgccttcatcctgggccacgacgtccgctccagcatggccgccatccggccccacctgggcgtctgtcctcagtacaacgtgctgtttgacatgctgaccgtggacgagcacgtctggttctatgggcggctgaagggtctgagtgccgctgtagtgggccccgagcaggaccgtctgctgcaggatgtggggctggtctccaagcagagtgtgcagactcgccacctctctggtgggatgcaacggaagctgtccgtggccattgcctttgtgggcggctcccaagttgttatcctggacgagcctacggctggcgtggatcctgcttcccgccgcggtatttgggagctgctgctcaaataccgagaaggtcgcacgctgatcctctccacccaccacctggatgaggcagagctgctgggagaccgtgtggccgtggtggcaggtggccgcttgtgctgctgtggctccccactcttcctgcgccgtcacctgggctccggctactacctgacgctggtgaaggcccgcctgcccctgaccaccaatgagaaggctgacactgacatggagggcagtgtggacaccaggcaggaaaagaagaatggcagccagggcagcagagtcggcactcctcagctgctggccctggtacagcactgggtgcccggggcacggctggtggaggagctgccacacgagctggtgctggtgctgccctacacgggtgcccatgacggcagcttcgccacactcttccgagagctagacacgcggctggcggagctgaggctcactggctacgggatctccgacaccagcctcgaggagatcttcctgaaggtggtggaggagtgtgctgcggacacagatatggaggatggcagctgcgggcagcacctatgcacaggcattgctggcctagacgtaaccctacggctcaagatgccgccacaggagacagcgctggagaacggggaaccagctgggtcagccccagagactgaccagggctctgggccagacgccgtgggccgggtacagggctgggcactgacccgccagcagctccaggccctgcttctcaagcgctttctgcttgcccgccgcagccgccgcggcctgttcgcccagatcgtgctgcctgccctctttgtgggcctggccctcgtgttcagcctcatcgtgcctcctttcgggcactacccggctctgcggctcagtcccaccatgtacggtgctcaggtgtccttcttcagtgaggacgccccaggggaccctggacgtgcccggctgctcgaggcgctgctgcaggaggcaggactggaggagcccccagtgcagcatagctcccacaggttctcggcaccagaagttcctgctgaagtggccaaggtcttggccagtggcaactggaccccagagtctccatccccagcctgccagtgtagccggcccggtgcccggcgcctgctgcccgactgcccggctgcagctggtggtccccctccgccccaggcagtgaccggctctggggaagtggttcagaacctgacaggccggaacctgtctgacttcctggtcaagacctacccgcgcctggtgcgccagggcctgaagactaagaagtgggtgaatgaggtcagatacggaggcttctcgctggggggccgagacccaggcctgccctcgggccaagagttgggccgctcagtggaggagttgtgggcgctgctgagtcccctgcctggcggggccctcgaccgtgtcctgaaaaacctcacagcctgggctcacagcctggatgctcaggacagtctcaagatctggttcaacaacaaaggctggcactccatggtggcctttgtcaaccgagccagcaacgcaatcctccgtgctcacctgcccccaggcccggcccgccacgcccacagcatcaccacactcaaccaccccttgaacctcaccaaggagcagctgtctgagggtgcactgatggcctcctcggtggacgtcctcgtctccatctgtgtggtctttgccatgtcctttgtcccggccagcttcactcttgtcctcattgaggagcgagtcacccgagccaagcacctgcagctcatggggggcctgtcccccaccctctactggcttggcaactttctctgggacatgtgtaactacttggtgccagcatgcatcgtggtgctcatctttctggccttccagcagagggcatatgtggcccctgccaacctgcctgctctcctgctgttgctactactgtatggctggtcgatcacaccgctcatgtacccagcctccttcttcttctccgtgcccagcacagcctatgtggtgctcacctgcataaacctctttattggcatcaatggaagcatggccacctttgtgcttgagctcttctctgatcagaagctgcaggaggtgagccggatcttgaaacaggtcttccttatcttcccccacttctgcttgggccgggggctcattgacatggtgcggaaccaggccatggctgatgcctttgagcgcttgggagacaggcagttccagtcacccctgcgctgggaggtggtcggcaagaacctcttggccatggtgatacaggggcccctcttccttctcttcacactactgctgcagcaccgaagccaactcctgccacagcccagggtgaggtctctgccactcctgggagaggaggacgaggatgtagcccgtgaacgggagcgggtggtccaaggagccacccagggggatgtgttggtgctgaggaacttgaccaaggtataccgtgggcagaggatgccagctgttgaccgcttgtgcctggggattccccctggtgagtgttttgggctgctgggtgtgaatggagcagggaagacgtccacgtttcgcatggtgacgggggacacattggccagcaggggcgaggctgtgctggcaggccacagcgtggcccgggaacccagtgctgcgcacctcagcatgggatactgccctcaatccgatgccatctttgagctgctgacgggccgcgagcacctggagctgcttgcgcgcctgcgcggtgtcccggaggcccaggttgcccagaccgctggctcgggcctggcgcgtctgggactctcatggtacgcagaccggcctgcaggcacctacagcggagggaacaaacgcaagctggcgacggccctggcgctggttggggacccagccgtggtgtttctggacgagccgaccacaggcatggaccccagcgcgcggcgcttcctttggaacagccttttggccgtggtgcgggagggccgttcagtgatgctcacctcccatagcatggaggagtgtgaagcgctctgctcgcgcctggccatcatggtgaatgggcggttccgctgcctgggcagcccgcaacatctcaagggcagattcgcggcgggtcacacactgaccctgcgggtgcccgccgcaaggtcccagccggcagcggccttcgtggcggccgagttccctggggcggagctgcgcgaggcacatggaggccgcctgcgcttccagctgccgccgggagggcgctgcgccctggcgcgcgtctttggagagctggcggtgcacggcgcagagcacggcgtggaggacttttccgtgagccagacgatgctggaggaggtattcttgtacttctccaaggaccaggggaaggacgaggacaccgaagagcagaaggaggcaggagtgggagtggaccccgcgccaggcctgcagcaccccaaacgcgtcagccagttcctcgatgaccctagcactgccgagactgtgctctgagcctccctcccctgcggggccgcggggaggccctgggaatggcaagggcaaggtagagtgcctaggagccctggactcaggctggcagaggggctggtgccctggagaaaataaagagaaggctggagagaagccgtggtggtg

SEQ ID NO: 2922 - DNA, 6585 bp, Homo sapiens
  source 1..6585: mol_type = unassigned DNA
atggccttctggacacagctgatgctgctgctctggaagaatttcatgtatcgccggagacagccggtccagctcctggtcgaattgctgtggcctctcttcctcttcttcatcctggtggctgttcgccactcccacccgcccctggagcaccatgaatgccacttcccaaacaagccactgccatcggcgggcaccgtgccctggctccagggtctcatctgtaatgtgaacaacacctgctttccgcagctgacaccgggcgaggagcccgggcgcctgagcaacttcaacgactccctggtctcccggctgctagccgatgcccgcactgtgctgggaggggccagtgcccacaggacgctggctggcctagggaagctgatcgccacgctgagggctgcacgcagcacggcccagcctcaaccaaccaagcagtctccactggaaccacccatgctggatgtcgcggagctgctgacgtcactgctgcgcacggaatccctggggttggcactgggccaagcccaggagcccttgcacagcttgttggaggccgctgaggacctggcccaggagctcctggcgctgcgcagcctggtggagcttcgggcactgctgcagagaccccgagggaccagcggccccctggagttgctgtcagaggccctctgcagtgtcaggggacctagcagcacagtgggcccctccctcaactggtacgaggctagtgacctgatggagctggtggggcaggagccagaatccgccctgccagacagcagcctgagccccgcctgctcggagctgattggagccctggacagccacccgctgtcccgcctgctctggagacgcctgaagcctctgatcctcgggaagctactctttgcaccagatacaccttttacccggaagctcatggcccaggtgaaccggaccttcgaggagctcaccctgctgagggatgtccgggaggtgtgggagatgctgggaccccggatcttcaccttcatgaacgacagttccaatgtggccatgctgcagcggctcctgcagatgcaggatgaaggaagaaggcagcccagacctggaggccgggaccacatggaggccctgcgatcctttctggaccctgggagcggtggctacagctggcaggacgcacacgctgatgtggggcacctggtgggcacgctgggccgagtgacggagtgcctgtccttggacaagctggaggcggcaccctcagaggcagccctggtgtcgcgggccctgcaactgctcgcggaacatcgattctgggccggcgtcgtcttcttgggacctgaggactcttcagaccccacagagcacccaaccccagacctgggccccggccacgtgcgcatcaaaatccgcatggacattgacgtggtcacgaggaccaataagatcagggacaggttttgggaccctggcccagccgcggaccccctgaccgacctgcgctacgtgtggggcggcttcgtgtacctgcaagacctggtggagcgtgcagccgtccgcgtgctcagcggcgccaacccccgggccggcctctacctgcagcagatgccctatccgtgctatgtggacgacgtgttcctgcgtgtgctgagccggtcgctgccgctcttcctgacgctggcctggatctactccgtgacactgacagtgaaggccgtggtgcgggagaaggagacgcggctgcgggacaccatgcgcgccatggggctcagccgcgcggtgctctggctaggctggttcctcagctgcctcgggcccttcctgctcagcgccgcactgctggttctggtgctcaagctgggagacatcctcccctacagccacccgggcgtggtcttcctgttcttggcagccttcgcggtggccacggtgacccagagcttcctgctcagcgccttcttctcccgcgccaacctggctgcggcctgcggcggcctggcctacttctccctctacctgccctacgtgctgtgtgtggcttggcgggaccggctgcccgcgggtggccgcgtggccgcgagcctgctgtcgcccgtggccttcggcttcggctgcgagagcctggctctgctggaggagcagggcgagggcgcgcagtggcacaacgtgggcacccggcctacggcagacgtcttcagcctggcccaggtctctggccttctgctgctggacgcggcgctctacggcctcgccacctggtacctggaagctgtgtgcccaggccagtacgggatccctgaaccatggaattttccttttcggaggagctactggtgcggacctcggccccccaagagtccagccccttgccccaccccgctggacccaaaggtgctggtagaagaggcaccgcccggcctgagtcctggcgtctccgttcgcagcctggagaagcgctttcctggaagcccgcagccagccctgcgggggctcagcctggacttctaccagggccacatcaccgccttcctgggccacaacggggccggcaagaccaccaccctgtccatcttgagtggcctcttcccacccagtggtggctctgccttcatcctgggccacgacgtccgctccagcatggccgccatccggccccacctgggcgtctgtcctcagtacaacgtgctgtttgacatgctgaccgtggacgagcacgtctggttctatgggcggctgaagggtctgagtgccgctgtagtgggccccgagcaggaccgtctgctgcaggatgtggggctggtctccaagcagagtgtgcagactcgccacctctctggtgggatgcaacggaagctgtccgtggccattgcctttgtgggcggctcccaagttgttatcctggacgagcctacggctggcgtggatcctgcttcccgccgcggtatttgggagctgctgctcaaataccgagaaggtcgcacgctgatcctctccacccaccacctggatgaggcagagctgctgggagaccgtgtggccgtggtggcaggtggccgcttgtgctgctgtggctccccactcttcctgcgccgtcacctgggctccggctactacctgacgctggtgaaggcccgcctgcccctgaccaccaatgagaaggctgacactgacatggagggcagtgtggacaccaggcaggaaaagaagaatggcagccagggcagcagagtcggcactcctcagctgctggccctggtacagcactgggtgcccggggcacggctggtggaggagctgccacacgagctggtgctggtgctgccctacacgggtgcccatgacggcagcttcgccacactcttccgagagctagacacgcggctggcggagctgaggctcactggctacgggatctccgacaccagcctcgaggagatcttcctgaaggtggtggaggagtgtgctgcggacacagatatggaggatggcagctgcgggcagcacctatgcacaggcattgctggcctagacgtaaccctacggctcaagatgccgccacaggagacagcgctggagaacggggaaccagctgggtcagccccagagactgaccagggctctgggccagacgccgtgggccgggtacagggctgggcactgacccgccagcagctccaggccctgcttctcaagcgctttctgcttgcccgccgcagccgccgcggcctgttcgcccagatcgtgctgcctgccctctttgtgggcctggccctcgtgttcagcctcatcgtgcctcctttcgggcactacccggctctgcggctcagtcccaccatgtacggtgctcaggtgtccttcttcagtgaggacgccccaggggaccctggacgtgcccggctgctcgaggcgctgctgcaggaggcaggactggaggagcccccagtgcagcatagctcccacaggttctcggcaccagaagttcctgctgaagtggccaaggtcttggccagtggcaactggaccccagagtctccatccccagcctgccagtgtagccggcccggtgcccggcgcctgctgcccgactgcccggctgcagctggtggtccccctccgccccaggcagtgaccggctctggggaagtggttcagaacctgacaggccggaacctgtctgacttcctggtcaagacctacccgcgcctggtgcgccagggcctgaagactaagaagtgggtgaatgaggtcagatacggaggcttctcgctggggggccgagacccaggcctgccctcgggccaagagttgggccgctcagtggaggagttgtgggcgctgctgagtcccctgcctggcggggccctcgaccgtgtcctgaaaaacctcacagcctgggctcacagcctggatgctcaggacagtctcaagatctggttcaacaacaaaggctggcactccatggtggcctttgtcaaccgagccagcaacgcaatcctccgtgctcacctgcccccaggcccggcccgccacgcccacagcatcaccacactcaaccaccccttgaacctcaccaaggagcagctgtctgagggtgcactgatggcctcctcggtggacgtcctcgtctccatctgtgtggtctttgccatgtcctttgtcccggccagcttcactcttgtcctcattgaggagcgagtcacccgagccaagcacctgcagctcatggggggcctgtcccccaccctctactggcttggcaactttctctgggacatgtgtaactacttggtgccagcatgcatcgtggtgctcatctttctggccttccagcagagggcatatgtggcccctgccaacctgcctgctctcctgctgttgctactactgtatggctggtcgatcacaccgctcatgtacccagcctccttcttcttctccgtgcccagcacagcctatgtggtgctcacctgcataaacctctttattggcatcaatggaagcatggccacctttgtgcttgagctcttctctgatcagaagctgcaggaggtgagccggatcttgaaacaggtcttccttatcttcccccacttctgcttgggccgggggctcattgacatggtgcggaaccaggccatggctgatgcctttgagcgcttgggagacaggcagttccagtcacccctgcgctgggaggtggtcggcaagaacctcttggccatggtgatacaggggcccctcttccttctcttcacactactgctgcagcaccgaagccaactcctgccacagcccagggtgaggtctctgccactcctgggagaggaggacgaggatgtagcccgtgaacgggagcgggtggtccaaggagccacccagggggatgtgttggtgctgaggaacttgaccaaggtataccgtgggcagaggatgccagctgttgaccgcttgtgcctggggattccccctggtgagtgttttgggctgctgggtgtgaatggagcagggaagacgtccacgtttcgcatggtgacgggggacacattggccagcaggggcgaggctgtgctggcaggccacagcgtggcccgggaacccagtgctgcgcacctcagcatgggatactgccctcaatccgatgccatctttgagctgctgacgggccgcgagcacctggagctgcttgcgcgcctgcgcggtgtcccggaggcccaggttgcccagaccgctggctcgggcctggcgcgtctgggactctcatggtacgcagaccggcctgcaggcacctacagcggagggaacaaacgcaagctggcgacggccctggcgctggttggggacccagccgtggtgtttctggacgagccgaccacaggcatggaccccagcgcgcggcgcttcctttggaacagccttttggccgtggtgcgggagggccgttcagtgatgctcacctcccatagcatggaggagtgtgaagcgctctgctcgcgcctggccatcatggtgaatgggcggttccgctgcctgggcagcccgcaacatctcaagggcagattcgcggcgggtcacacactgaccctgcgggtgcccgccgcaaggtcccagccggcagcggccttcgtggcggccgagttccctggggcggagctgcgcgaggcacatggaggccgcctgcgcttccagctgccgccgggagggcgctgcgccctggcgcgcgtctttggagagctggcggtgcacggcgcagagcacggcgtggaggacttttccgtgagccagacgatgctggaggaggtattcttgtacttctccaaggaccaggggaaggacgaggacaccgaagagcagaaggaggcaggagtgggagtggaccccgcgccaggcctgcagcaccccaaacgcgtcagccagttcctcgatgaccctagcactgccgagactgtgctctgagcctccctcccctgcggggccgcggggaggccctgggaatggcaagggcaaggtagagtgcctaggagccctggactcaggctggcagaggggctggtgccctggagaaaataaagagaaggctggagagaagccgtggtggtg

SEQ ID NO: 2923 - DNA, 576 bp, Homo sapiens
  source 1..576: mol_type = unassigned DNA
ttggcttaaggggcggcgcgctccctgcctgctgctgggcggagggaaggcggcaagagctgcggagcccctggaagtctcaccatggccttctggacacagctgatgctgctgctctggaagaatttcatgtatcgccggagacagccggtccagctcctggtcgaattgctgtggcctctcttcctcttcttcatcctggtggctgttcgccactcccacccgcccctggagcaccatgaatgccacttcccaaacaagccactgccatcggcgggcaccgtgccctggctccagggtctcatctgtaatgtgaacaacacctgctttccgcagctgacaccgggcgaggagcccgggcgcctgagcaacttcaacgactccctggtctcccggctgctagccgatgcccgcactgtgctgggaggggccagtgcccacaggacgctggctggcctagggaagctgatcgccacgctgagggctgcacgcagcacggcccagcctcaaccaaccaagcagtctccactggaaccacccatgctggatgtcgcggagctgctgacgtcactgctg

SEQ ID NO: 2924 - DNA, 5718 bp, Homo sapiens
  source 1..5718: mol_type = unassigned DNA
ataacctccactctgaaagcagtcttcacagaaacttttcacagaagtcaaatagttaaagcaaattctagatacatggtagagaccaggagaaaatatgaataactttcttctaaacaaggagctcagtggataaaccatacctctagattccttgcttccattttcccagaaacaagatgaggaagagaaagatcagtgtgtgtcaacaaacttgggccttattatgcaagaactttcttaaaaaatggagaatgaaaagagagtccttaatggaatggctgaattcattgctcctactactttgtttgtatatatatcctcatagtcatcaagtaaatgatttttcttcactgcttaccatggacctgggacgggtagatacatttaatgaatccagattttctgttgtatacacacctgtcaccaacacgacccaacagataatgaataaagtagcctctactcccttcctggcaggtaaagaggtcttgggactgccagatgaggaaagtattaaagaattcacagcaaattatcctgaagaaatagtaagagtcacctttactaatacatactcatatcatttgaagttcttgctaggacatggaatgccagcaaagaaggagcacaaggaccatacagctcattgttatgaaacaaatgaagatgtttactgtgaagtttcagtattttggaaggaaggttttgtggctcttcaagctgccattaatgctgctattatagaaatcacaacaaatcactcagtgatggaggagctgatgtcagttactggaaaaaatatgaagatgcattccttcattggtcaatcaggagttataactgatttgtaccttttttcctgcattatttcattttcctcattcatttactatgcatctgttaatgtcacaagagagaggaaaaggatgaaggccttgatgacaatgatgggtcttcgggattcagcgttctggctctcctggggtttgctctatgctggtttcatcttcattatggcccttttcttggcacttgttataagatctacccagtttatcattttgtctggcttcatggtagtcttcagcctctttctcctgtatggattatctttggtagctttggctttcttaatgagcatcttggtaaagaaatctttcctcaccggcctggtcgtgttcctcctcactgtcttttgggggtgtctggggttcacatcactgtacagacaccttcctgcatccttggagtggattttaagcttgcttagtccctttgccttcatgcttggaatggcccagcttttacacttggactatgatttgaattctaatgcatttcctcatccatcggacggctcaaatctcattgtagcaacaaatttcatgttggcatttgacacttgcctctatctggcattggcgatttactttgaaaaaattttgccaaatgaatatggacatcgacgtccacctttgtttttcctgaagtcctcattttggtctcaaacacaaaagactgatcacgtggcccttgaagatgaaatggatgccgatccttcatttcatgactcttttgaacaagcgcctccagaattccaagggaaagaagccatcagaatcagaaatgttacaaaagaatataaaggaaagcctgataaaatagaagccttgaaagatctggtatttgacatttacgaaggccaaatcactgcaatacttggtcacagtggagctggaaagtcaacactgctaaacattcttagtgggttgtctgttcccaccaaaggttcagtcaccatctataacaataagctttcagaaatggctgacctagaaaatctcagcaagctgaccggagtttgtccacaatccaatgtgcaatttgacttcctcactgtaagagaaaacctcagactctttgctaaaataaaagggattctgccacaagaagtggataaagagattttcctgttggatgaaccaactgctggattggatcccttttcaagacaccaagtatggaaccttctgaaagaacgcaaaacagaccgcgtgatcctcttcagtacccagttcatggatgaggccgacatcctggcggacaggaaagtatttctctcccaagggaagctaaagtgcgcgggctcttctttgtttctaaagaagaaatgggggattggatatcacttaagcttgcagttaaatgaaatatgtgttgaggaaaacataacatcacttgttaaacagcacatccctgatgccaaattatcagccaaaagcgaaggaaaacttatttatacattacccttagaaagaacaaataaatttccagaactttacaaggatcttgatagctatcctgacctaggaattgagaattatggtgtttccatgacaactttgaatgaagtattcctgaagctagaaggaaaatctacaattaatgaatcggacattgctattttgggagaagtacaagcggaaaaagctgacgacactgaaaggcttgttgagatggaacaagtcctctcttcacttaacaagatgagaaagacaataggtggtgtggctctctggcgacagcaaatctgcgcaattgcaagggttcgcttgttaaagttaaagcatgaaagaaaagctcttttagcactgctattaattctaatggctggattttgccctcttcttgtggagtataccatggtgaaaatatatcaaaacagttacacctgggaactttctcctcatttgtatttccttgctcctggacaacaaccacatgaccctctcactcaactactgatcatcaataaaacaggggcaagcattgatgactttatacagtctgtggagcaccagaacatagctttagaagtggatgcatttggaactagaaatggcacagatgacccatcttataatggagccatcacagtgtgttgtaatgaaaagaattacagcttttcgttagcatgcaatgccaaaagattgaattgcttcccagttcttatggacattgttagtaatgggctacttggaatggttaaaccatcagtacatatccgaactgaaagaagtacatttttggagaatggacaggacaatccaatcggattcctggcatatatcatgttctggctggttttaacatcgagttgcccaccttacattgccatgagcagcatcgatgattataagaacagagctcggtcccagctacggatttccggactctccccttctgcttactggtttgggcaggcgctggtggatgtttccctgtacttcttggtcttcgtttttatatatttaatgagctacatttcaaacttcgaagacatgctacttacaataattcatattattcaaatcccatgtgctgttggttattccttttccctcatcttcatgacatacgtgatttccttcatctttcgcaaggggagaaaaaatagtggcatttggtcattttgtttctatgttgtcactgtattctctgtggctggatttgcgttcagtatcttcgaaagtgatattccatttatcttcacttttttaataccacctgccacaatgattggctgtttgttcttatcttctcatcttctcttttcttctctcttttctgaagaacgaatggatgtacagccatttctggtattcctaattcctttccttcattttatcatttttctttttactcttcgatgtctggaatggaagtttggaaagaaatcaatgagaaaggatcctttctttagaatttctccaagaagtagtgatgtgtgtcaaaatccagaagaaccagaaggagaggatgaagatgttcagatggaaagagtgagaacagcaaatgccttgaattctactaattttgatgagaagccagtcatcattgccagctgtctacgcaaggagtatgcagggaagaggaaaggctgtttttccaagaggaagaataagatagccacgagaaatgtctccttctgtgttagaaaaggtgaagttttaggattattaggacacaatggagctggtaaaagcacatccattaaggtgataactggagacacaaaaccaactgctggacaagtgctactgaaagggagcggtggaggggatgccctggagttcctggggtactgccctcaggagaacgcgctgtggcccaacctgacagtgaggcagcacctggaggtgtacgccgccgtgaaagggctgaggaaaggggatgctgaggttgccatcacacggttagtggatgcgctcaagctgcaggaccagctgaagtctcccgtgaagaccttgtcagagggaataaagagaaagctgtgctttgtcctgagcatactggggaacccgtcagtggtgcttctggatgagccgtcgaccgggatggaccccgaggggcagcagcaaatgtggcaggccatccgggccacctttagaaacacggaaaggggtgccctcctaaccacccactacatggcagaggctgaggccgtgtgtgaccgagtggccatcatggtatctgggaggttgagatgtatcggttccatccaacacctgaaaagcaaatttggcaaagattacctgctggagatgaaggtgaagaacctggcacaagtggagcccctccatgcagagatcctgaggcttttcccccaggctgctcggcaggaaaggtactcctctctgatggtttataagttgccagtggaagatgtgcaacctttagcccaagctttcttcaaattagagaaggttaaacagagctttgacctagaggagtacagcctctcacagtctaccctggagcaggttttcctggagctctccaaggagcaggagctgggtgattttgaggaggattttgatccctcagtgaagtggaagctcctcccccaggaagagccttaaaaccccaaattctgtgttcctgtttaaacccgtggttttttttaaatacatttatttttatagcagcaatgttctatttttagaaactatattataagtacagaaatggttctccgtgtggtgggaggaggaggttcgggtgctgggtaagtgccatgtcagtgtggacagaggcatttgactaagccaacctcctctcacagcctctgtatctctgcaggccatactggttccattgttctgtataatactgaataaataaatttacttttacatgatcgtataagtttctagataagataaacaaattttgtttaaatttttttaataaaaatcttaaaacactttttttctaacctagactgagaaattcatgtttacttttctaggtgtatgatactttgtaaagttgatactttcctaagaatttaacatgtcatatttttgaaatagatttaagtgtgcttcttattgctaaaaatactaaatgtcatgggtcatagtatctgatatcaatatcgttgataacatatccacaggtaacaccatgatgtaggcataaatggaaaacaaaaaccctactatttcaaatatattgtacttttttatttctgtaagccaactgtgtgccattttcactggacttttaaatctagactttagtgatgtctacattgtaaatgatcttttgtggatatttgtcacttggtttcagaaagttcacaaatgtagcaacagctcacatgactgagtaggtagaaaatgtgaaataaatctcatatatatagttttg

SEQ ID NO: 2925 - DNA, 1595 bp, Homo sapiens
  source 1..1595: mol_type = unassigned DNA
cagaagtcaaatagttaaagcaaattctagatacatggtagagaccaggagaaaatatgaataactttcttctaaacaaggagctcagtggataaaccatacctctagattccttgcttccattttcccagaagttttggtagcaggatgatgttggcctcataatgtgagttagagaggagtccctctttttcgactgtttggaattgtttcagaaggaatgctaccagctcctcttgtaccactggtagaattcagctgtgaatctgtctggtcctgggctttttttgattgacaagatgaggaagagaaagatcagtgtgtgtcaacaaacttgggccttattatgcaagaactttcttaaaaaatggagaatgaaaagagagtccttaatggaatggctgaattcattgctcctactactttgtttgtatatatatcctcatagtcatcaagtaaatgatttttcttcactgcttaccatggacctgggacgggtagatacatttaatgaatccagattttctgttgtatacacacctgtcaccaacacgacccaacagataatgaataaagtagcctctactcccttcctggcaggtaaagaggtcttgggactgccagatgaggaaagtattaaagaattcacagcaaattatcctgaagaaatagtaagagtcacctttactaatacatactcatatcatttgaagttcttgctaggacatggaatgccagcaaagaaggagcacaaggaccatacagctcattgttatgaaacaaatgaagatgtttactgtgaagtttcagtattttggaaggaaggttttgtggctcttcaagctgccattaatgctgctattatagaaatcacaacaaatcactcagtgatggaggagctgatgtcagttactggaaaaaatatgaagatgcattccttcattggtcaatcaggagttataactgatttgtaccttttttcctgcattatttcattttcctcattcatttactatgcatctgttaatgtcacaagagagaggaaaaggatgaaggccttgatgacaatgatgggtcttcgggattcagcgttctggtgagtcaaacgcagcacaaataaataaacggaggaactcaggaaaactgggaatcttcaatgcatctttttttttttgaaatggagtctcgctctgtcgcccaggctggagtgcagtggcgtgatctcagctcactgcaagctccgcctcacaggttcacgccattctcctgcctcggcctcccaagtagctgggactgcaggtgccgaccaccatgcctggataattttttgtattttctgtagagacggggtttcaccgtgttagccaggatggtctcgatctcctgacctcgtgatccacccacctcggcctcccaaagtgctgggattacaggcgcgagccaccacgcccggcctcttcaatgcgtctttattaaaacctgtttctccacaaccaaggggtacaaatgagagatacctacacagaataatttcagatcatgaacaaatttccacttagttaatttcagtggggagaaatgctctgcagtgatgg

SEQ ID NO: 2926 - DNA, 4949 bp, Homo sapiens
  source 1..4949: mol_type = unassigned DNA
agaacttcatattaattttatcttctttctttttcattaaacaagacaagatgaggaagagaaagatcagtgtgtgtcaacaaacttgggccttattatgcaagaactttcttaaaaaatggagaatgaaaagagagtccttaatggaatggctgaattcattgctcctactactttgtttgtatatatatcctcatagtcatcaagtaaatgatttttcttcactgcttaccatggacctgggacgggtagatacatttaatgaatccagattttctgttgtatacacacctgtcaccaacacgacccaacagataatgaataaagtagcctctactcccttcctggcaggtaaagaggtcttgggactgccagatgaggaaagtattaaagaattcacagcaaattatcctgaagaaatagtaagagtcacctttactaatacatactcatatcatttgaagttcttgctaggacatggaatgccagcaaagaaggagcacaaggaccatacagctcattgttatgaaacaaatgaagatgtttactgtgaagtttcagtattttggaaggaaggttttgtggctcttcaagctgccattaatgctgctattatagaaatcacaacaaatcactcagtgatggaggagctgatgtcagttactggaaaaaatatgaagatgcattccttcattggtcaatcaggagttataactgatttgtaccttttttcctgcattatttcattttcctcattcatttactatgcatctgttaatgtcacaagagagaggaaaaggatgaaggccttgatgacaatgatgggtcttcgggattcagcgttctggctctcctggggtttgctctatgctggtttcatcttcattatggcccttttcttggcacttgttataagatctacccagtttatcattttgtctggcttcatggtagtcttcagcctctttctcctgtatggattatctttggtagctttggctttcttaatgagcatcttggtaaagaaatctttcctcaccggcctggtcgtgttcctcctcactgtcttttgggggtgtctggggttcacatcactgtacagacaccttcctgcatccttggagtggattttaagcttgcttagtccctttgccttcatgcttggaatggcccagcttttacacttggactatgatttgaattctaatgcatttcctcatccatcggacggctcaaatctcattgtagcaacaaatttcatgttggcatttgacacttgcctctatctggcattggcgatttactttgaaaaaattttgccaaatgaatatggacatcgacgtccacctttgtttttcctgaagtcctcattttggtctcaaacacaaaagactgatcacgtggcccttgaagatgaaatggatgccgatccttcatttcatgactcttttgaacaagcgcctccagaattccaagggaaagaagccatcagaatcagaaatgttacaaaagaatataaaggaaagcctgataaaatagaagccttgaaagatctggtatttgacatttacgaaggccaaatcactgcaatacttggtcacagtggagctggaaagtcaacactgctaaacattcttagtgggttgtctgttcccaccaaaggttcagtcaccatctataacaataagctttcagaaatggctgacctagaaaatctcagcaagctgaccggagtttgtccacaatccaatgtgcaatttgacttcctcactgtaagagaaaacctcagactctttgctaaaataaaagggattctgccacaagaagtggataaagagatacaaagggttctgctggaattggaaatgaaaaatattcaggatgttcttgctcaaaacttaagtggtggacagaaaagaaagctaacctttgggattgccattttaggagatcctcagattttcctgttggatgaaccaactgctggattggatcccttttcaagacaccaagtatggaaccttctgaaagaacgcaaaacagaccgcgtgatcctcttcagtacccagttcatggatgaggccgacatcctggcggacaggaaagtatttctctcccaagggaagctaaagtgcgcgggctcttctttgtttctaaagaagaaatgggggattggatatcacttaagcttgcagttaaatgaaatatgtgttgaggaaaacataacatcacttgttaaacagcacatccctgatgccaaattatcagccaaaagcgaaggaaaacttatttatacattacccttagaaagaacaaataaatttccagaactttacaaggatcttgatagctatcctgacctaggaattgagaattatggtgtttccatgacaactttgaatgaagtattcctgaagctagaaggaaaatctacaattaatgaatcggacattgctattttgggagaagtacaagcggaaaaagctgacgacactgaaaggcttgttgagatggaacaagtcctctcttcacttaacaagatgagaaagacaataggtggtgtggctctctggcgacagcaaatctgcgcaattgcaagggttcgcttgttaaagttaaagcatgaaagaaaagctcttttagcactgctattaattctaatggctggattttgccctcttcttgtggagtataccatggtgaaaatatatcaaaacagttacacctgggaactttctcctcatttgtatttccttgctcctggacaacaaccacatgaccctctcactcaactactgatcatcaataaaacaggggcaagcattgatgactttatacagtctgtggagcaccagaacatagctttagaagtggatgcatttggaactagaaatggcacagatgacccatcttataatggagccatcacagtgtgttgtaatgaaaagaattacagcttttcgttagcatgcaatgccaaaagattgaattgcttcccagttcttatggacattgttagtaatgggctacttggaatggttaaaccatcagtacatatccgaactgaaagaagtacatttttggagaatggacaggacaatccaatcggattcctggcatatatcatgttctggctggttttaacatcgagttgcccaccttacattgccatgagcagcatcgatgattataagaacagagctcggtcccagctacggatttccggactctccccttctgcttactggtttgggcaggcgctggtggatgtttccctgtacttcttggtcttcgtttttatatatttaatgagctacatttcaaacttcgaagacatgctacttacaataattcatattattcaaatcccatgtgctgttggttattccttttccctcatcttcatgacatacgtgatttccttcatctttcgcaaggggagaaaaaatagtggcatttggtcattttgtttctatgttgtcactgtattctctgtggctggatttgcgttcagtatcttcgaaagtgatattccatttatcttcacttttttaataccacctgccacaatgattggctgtttgttcttatcttctcatcttctcttttcttctctcttttctgaagaacgaatggatgtacagccatttctggtattcctaattcctttccttcattttatcatttttctttttactcttcgatgtctggaatggaagtttggaaagaaatcaatgagaaaggatcctttctttagaatttctccaagaagtagtgatgtgtgtcaaaatccagaagaaccagaaggagaggatgaagatgttcagatggaaagagtgagaacagcaaatgccttgaattctactaattttgatgagaagccagtcatcattgccagctgtctacgcaaggagtatgcagggaagaggaaaggctgtttttccaagaggaagaataagatagccacgagaaatgtctccttctgtgttagaaaaggtgaagttttaggattattaggacacaatggagctggtaaaagcacatccattaaggtgataactggagacacaaaaccaactgctggacaagtgctactgaaagggagcggtggaggggatgccctggagttcctggggtactgccctcaggagaacgcgctgtggcccaacctgacagtgaggcagcacctggaggtgtacgccgccgtgaaagggctgaggaaaggggatgctgaggttgccatcacacggttagtggatgcgctcaagctgcaggaccagctgaagtctcccgtgaagaccttgtcagagggaataaagagaaagctgtgctttgtcctgagcatactggggaacccgtcagtggtgcttctggatgagccgtcgaccgggatggaccccgaggggcagcagcaaatgtggcaggccatccgggccacctttagaaacacggaaaggggtgccctcctaaccacccactacatggcagaggctgaggccgtgtgtgaccgagtggccatcatggtatctgggaggttgagatgtatcggttccatccaacacctgaaaagcaaatttggcaaagattacctgctggagatgaaggtgaagaacctggcacaagtggagcccctccatgcagagatcctgaggcttttcccccaggctgctcggcaggaaaggtactcctctctgatggtttataagttgccagtggaagatgtgcaacctttagcccaagctttcttcaaattagagaaggttaaacagagctttgacctagaggagtacagcctctcacagtctaccctggagcaggttttcctggagctctccaaggagcaggagctgggtgattttgaggaggattttgatccctcagtgaagtggaagctcctcccccaggaagagccttaaaaccccaaattctgtgttcctgtttaaacccgt

SEQ ID NO: 2927 - DNA, 3657 bp, Homo sapiens
  source 1..3657: mol_type = unassigned DNA
ctagatacatggtagagaccaggagaaaatatgaataactttcttctaaacaaggagctcagtggataaaccatacctctagattccttgcttccattttcccagaagaatggctgaattcattgctcctactactttgtttgtatatatatcctcatagtcatcaagtaaatgatttttcttcactgcttaccatggacctgggacgggtagatacatttaatgaatccagattttctgttgtatacacacctgtcaccaacacgacccaacagataatgaataaagtagcctctactcccttcctggcaggtaaagaggtcttgggactgccagatgaggaaagtattaaagaattcacagcaaattatcctgaagaaatagtaagagtcacctttactaatacatactcatatcatttgaagttcttgctaggacatggaatgccagcaaagaaggagcacaaggaccatacagctcattgttatgaaacaaatgaagatgtttactgtgaagtttcagtattttggaaggaaggttttgtggctcttcaagctgccattaatgctgctattatagaaatcacaacaaatcactcagtgatggaggagctgatgtcagttactggaaaaaatatgaagatgcattccttcattggtcaatcaggagttataactgatttgtaccttttttcctgcattatttcattttcctcattcatttactatgcatctgttaatgtcacaagagagaggaaaaggatgaaggccttgatgacaatgatgggtcttcgggattcagcgttctggctctcctggggtttgctctatgctggtttcatcttcattatggcccttttcttggcacttgttataagatctacccagtttatcattttgtctggcttcatggtagtcttcagcctctttctcctgtatggattatctttggtagctttggctttcttaatgagcatcttggtaaagaaatctttcctcaccggcctggtcgtgttcctcctcactgtcttttgggggtgtctggggttcacatcactgtacagacaccttcctgcatccttggagtggattttaagcttgcttagtccctttgccttcatgcttggaatggcccagcttttacacttggactatgatttgaattctaatgcatttcctcatccatcggacggctcaaatctcattgtagcaacaaatttcatgttggcatttgacacttgcctctatctggcattggcgatttactttgaaaaaattttgccaaatgaatatggacatcgacgtccacctttgtttttcctgaagtcctcattttggtctcaaacacaaaagactgatcacgtggcccttgaagatgaaatggatgccgatccttcatttcatgactcttttgaacaagcgcctccagaattccaagggaaagaagccatcagaatcagaaatgttacaaaagaatataaaggaaagcctgataaaatagaagccttgaaagatctggtatttgacatttacgaaggccaaatcactgcaatacttggtcacagtggagctggaaagtcaacactgctaaacattcttagtgggttgtctgttcccaccaaaggttcagtcaccatctataacaataagctttcagaaatggctgacctagaaaatctcagcaagctgaccggagtttgtccacaatccaatgtgcaatttgacttcctcactgtaagagaaaacctcagactctttgctaaaataaaagggattctgccacaagaagtggataaagagatacaaagggttctgctggaattggaaatgaaaaatattcaggatgttcttgctcaaaacttaagtggtggacagaaaagaaagctaacctttgggattgccattttaggagatcctcagattttcctgttggatgaaccaactgctggattggatcccttttcaagacaccaagtatggaaccttctgaaagaacgcaaaacagaccgcgtgatcctcttcagtacccagttcatggatgaggccgacatcctggcggacaggaaagtatttctctcccaagggaagctaaagtgcgcgggctcttctttgtttctaaagaagaaatgggggattggatatcacttaagcttgcagttaaatgaaatatgtgttgaggaaaacataacatcacttgttaaacagcacatccctgatgccaaattatcagccaaaagcgaaggaaaacttatttatacattacccttagaaagaacaaataaatttccagaactttacaaggatcttgatagctatcctgacctaggaattgagaattatggtgtttccatgacaactttgaatgaagtattcctgaagctagaaggaaaatctacaattaatgaatcggacattgctattttgggagaagtacaagcggaaaaagctgacgacactgaaaggcttgttgagatggaacaagtcctctcttcacttaacaagatgagaaagacaataggtggtgtggctctctggcgacagcaaatctgcgcaattgcaagggttcgcttgttaaagttaaagcatgaaagaaaagctcttttagcactgctattaattctaatggctggattttgccctcttcttgtggagtataccatggtgaaaatatatcaaaacagttacacctgggaactttctcctcatttgtatttccttgctcctggacaacaaccacatgaccctctcactcaactactgatcatcaataaaacaggggcaagcattgatgactttatacagtctgtggagcaccagaacatagctttagaagtggatgcatttggaactagaaatggcacagatgacccatcttataatggagccatcacagtgtgttgtaatgaaaagaattacagcttttcgttagcatgcaatgccaaaagattgaattgcttcccagttcttatggacattgttagtaatgggctacttggaatggttaaaccatcagtacatatccgaactgaaagaagtacatttttggagaatggacaggacaatccaatcggattcctggcatatatcatgttctggctggttttaacatcgagttgcccaccttacattgccatgagcagcatcgatgattataagaacagagctcggtcccagctacggatttccggactctccccttctgcttactggtttgggcaggcgctggtggatgtttccctgtacttcttggtcttcgtttttatatatttaatgagctacatttcaaacttcgaagacatgctacttacaataattcatattattcaaatcccatgtgctgttggttattccttttccctcatcttcatgacatacgtgatttccttcatctttcgcaaggggagaaaaaatagtggcatttggtcattttgtttctatgttgtaagtatatttcttgtggatgtatactgtatatatttgatatacaattctgagctaatcctttaaattttgccctctgtaggatgataatattatggtctataataaacacaagattacaaattcagttactgacatggtcaaaactagaaattacttcaccaaagtccctaataagaattaattccataaagcctctcttcttttgtctaaatta

SEQ ID NO: 2928 - DNA, 3264 bp, Homo sapiens
  source 1..3264: mol_type = unassigned DNA
actctgaaagcagtcttcacagaaacttttcacagaagtcaaatagttaaagcaaattctagatacatggtagagaccaggagaaaatatgaataactttcttctaaacaaggagctcagtggataaaccatacctctagattccttgcttccattttcccagaaacaagatgaggaagagaaagatcagtgtgtgtcaacaaacttgggccttattatgcaagaactttcttaaaaaatggagaatgaaaagagagtccttaatggaatggctgaattcattgctcctactactttgtttgtatatatatcctcatagtcatcaagtaaatgatttttcttcactgcttaccatggacctgggacgggtagatacatttaatgaatccagattttctgttgtatacacacctgtcaccaacacgacccaacagataatgaataaagtagcctctactcccttcctggcaggtaaagaggtcttgggactgccagatgaggaaagtattaaagaattcacagcaaattatcctgaagaaatagtaagagtcacctttactaatacatactcatatcatttgaagttcttgctaggacatggaatgccagcaaagaaggagcacaaggaccatacagctcattgttatgaaacaaatgaagatgtttactgtgaagtttcagtattttggaaggaaggttttgtggctcttcaagctgccattaatgctgctattatagaaatcacaacaaatcactcagtgatggaggagctgatgtcagttactggaaaaaatatgaagatgcattccttcattggtcaatcaggagttataactgatttgtaccttttttcctgcattatttcattttcctcattcatttactatgcatctgttaatgtcacaagagagaggaaaaggatgaaggccttgatgacaatgatgggtcttcgggattcagcgttctggctctcctggggtttgctctatgctggtttcatcttcattatggcccttttcttggcacttgttataagatctacccagtttatcattttgtctggcttcatggtagtcttcagcctctttctcctgtatggattatctttggtagctttggctttcttaatgagcatcttggtaaagaaatctttcctcaccggcctgcatccttggagtggattttaagcttgcttagtccctttgccttcatgcttggaatggcccagcttttacacttggactatgatttgaattctaatgcatttcctcatccatcggacggctcaaatctcattgtagcaacaaatttcatgttggcatttgacacttgcctctatctggcattggcgatttactttgaaaaaattttgccaaatgaatatggacatcgacgtccacctttgtttttcctgaagtcctcattttggtctcaaacacaaaagactgatcacgtggcccttgaagatgaaatggatgccgatccttcatttcatgactcttttgaacaagcgcctccagaattccaagggaaagaagccatcagaatcagaaatgttacaaaagaatataaaggaaagcctgataaaatagaagccttgaaagatctggtatttgacatttacgaaggccaaatcactgcaatattggtcacagtggagctggaaagtcaacactgctaaacattcttagtgggttgtctgttcccaccaaaggttcagtcaccatctataacaataagctttcagaaatggctgacctagaaaatctcagcaagctgaccggagtttgtccacaatccaatgtgcaatttgacttcctcactgtaagagaaaacctcagactctttgctaaaataaaagggattctgccacaagaagtggataaagagatacaaagggttctgctggaattggaaatgaaaaatattcaggatgttcttgctcaaaacttaagtggtggacagaaaagaaagctaacctttgggattgccattttaggagatcctcagattttcctgttggatgaaccaactgctggattggatcccttttcaagacaccaagtatggaaccttctgaaagaacgcaaaacagaccgcgtgatcctcttcagtacccagttcatggatgaggccgacatcctggcggacaggaaagtatttctctcccaagggaagctaaagtgcgcgggctcttctttgtttctaaagaagaaatgggggattggatatcacttaagcttgcagttaaatgaaatatgtgttgaggaaaacataacatcacttgttaaacagcacatccctgatgccaaattatcagccaaaagcgaaggaaaacttatttatacattacccttagaaagaacaaataaatttccagaactttacaaggatcttgatagctatcctgacctaggaattgagaattatggtgtttccatgacaactttgaatgaagtattcctgaagctagaaggaaaatctacaattaatgaatcggacattgctattttgggagaagtacaagcggaaaaagctgacgacactgaaaggcttgttgagatggaacaagtcctctcttcacttaacaagatgagaaagacaataggtggtgtggctctctggcgacagcaaatctgcgcaattgcaagggttcgcttgttaaagttaaagcatgaaagaaaagctcttttagcactgctattaattctaatggctggattttgccctcttcttgtggagtataccatggtgaaaatatatcaaaacagttacacctgggaactttctcctcatttgtatttccttgctcctggacaacaaccacatgaccctctcactcaactactgatcatcaataaaacaggggcaagcattgatgactttatacagtctgtggagcaccagaacatagctttagaagtggatgcatttggaactagaaatggcacagatgacccatcttataatggagccatcacagtgtgttgtaatgaaaagaattacagcttttcgttagcatgcaatgccaaaagattgaattgcttcccagttcttatggacattgttagtaatgggctacttggaatggttaaaccatcagtacatatccgaactgaaagaagtacatttttggaggtaaatatatataatcttacaattcctgactctcctctatcaggaatctcccagatcacccttttaagtgctggaatcttgtttttattgagtaaaccactgcataataaattaacatttggactc

SEQ ID NO: 2929 - DNA, 6445 bp, Homo sapiens
  source 1..6445: mol_type = unassigned DNA
attcacaatgaatgtgaaattaaaagcatgatgtagtagtgacccaaaaggaatgtgaattctcctccagaacatgcagagacccatggatgaactgtgtttctagatttttcctccagctttcctgagagaaacaggtcaaaatgagcaagagacgcatgagcgtgggtcagcaaacatgggctcttctctgcaagaactgtctcaaaaaatggagaatgaaaagacagaccttgttggaatggctcttttcatttcttctggtactgtttctgtacctatttttctccaatttacatcaagttcatgacactcctcaaatgtcttcaatggatctgggacgtgtagatagttttaatgatactaattatgttattgcatttgcacctgaatccaaaactacccaagagataatgaacaaagtggcttcagccccattcctaaaaggaagaacaatcatggggtggcctgatgaaaaaagcatggatgaattggatttgaactattcaatagacgcagtgagagtcatctttactgataccttctcctaccatttgaagttttcttggggacatagaatccccatgatgaaagagcacagagaccattcagctcactgtcaagcagtgaatgaaaaaatgaagtgtgaaggttcagagttctgggagaaaggctttgtagcttttcaagctgccattaatgctgctatcatagaaatcgcaacaaatcattcagtgatggaacagctgatgtcagttactggtgtacatatgaagatattaccttttgttgcccaaggaggagttgcaactgattttttcattttcttttgcattatttctttttctacatttatatactatgtatcagtcaatgttacacaagaaagacaatacattacgtcattgatgacaatgatgggactccgagagtcagcattctggctttcctggggtttgatgtatgctggcttcatccttatcatggccactttaatggctcttattgtaaaatctgcacaaattgtcgtcctgactggttttgtgatggtcttcaccctctttctcctctatggcctgtctttgataactttagctttcctgatgagtgtgttgataaagaaacctttccttacgggcttggttgtgtttctccttattgtcttttgggggatcctgggattcccagcattgtatacacgtcttcctgcatttttggaatggactttgtgtcttcttagcccctttgccttcactgttgggatggcccagcttatacatttggactatgatgtgaattctaatgcccacttggattcttcacaaaatccatacctcataatagctactcttttcatgttggtttttgacacccttctgtatttggtattgacattatattttgacaaaattttgcccgctgaatatggacatcgatgttctcccttgtttttcctgaaatcctgtttttggtttcaacacggaagggctaatcatgtggtccttgagaatgaaacagattctgatcctacacctaatgactgttttgaaccagtgtctccagaattctgtgggaaagaagccatcagaatcaaaaatcttaaaaaagaatatgcagggaagtgtgagagagtagaagctttgaaaggtgtggtgtttgacatatatgaaggccagatcactgccctccttggtcacagtggagctggaaaaactaccctgttaaacatacttagtgggttgtcagttccaacatcaggttcagtcactgtctataatcacacactttcaagaatggctgatatagaaaatatcagcaagttcactggattttgtccacaatccaatgtgcaatttggatttctcactgtgaaagaaaacctcaggctgtttgctaaaataaaagggattttgccacatgaagtggagaaagaggtacaacgagttgtacaggaattagaaatggaaaatattcaagacatccttgctcaaaacttaagtggtggacaaaataggaaactaacttttgggattgccattttaggagatcctcaagttttgctattggatgaaccgactgctggattggatcctctttcaaggcaccgaatatggaatctcctgaaagaggggaaatcagacagagtaattctcttcagcacccagtttatagatgaggctgacattctggcggacaggaaggtgttcatatccaatgggaagctgaagtgtgcaggctcttctctgttccttaagaagaaatggggcataggctaccatttaagtttgcatctgaatgaaaggtgtgatccagagagtataacatcactggttaagcagcacatctctgatgccaaattgacagcacaaagtgaagaaaaacttgtatatattttgcctttggaaaggacaaacaaatttccagaactttacagggatcttgatagatgttctaaccaaggcattgaggattatggtgtttccataacaactttgaatgaggtgtttctgaaattagaaggaaaatcaactattgatgaatcagatattggaatttggggacaattacaaactgatggggcaaaagatataggaagccttgttgagctggaacaagttttgtcttccttccacgaaacaaggaaaacaatcagtggcgtggcgctctggaggcagcaggtctgtgcaatagcaaaagttcgcttcctaaagttaaagaaagaaagaaaaagcctgtggactatattattgctttttggtattagctttatccctcaacttttggaacatctattctacgagtcatatcagaaaagttacccgtgggaactgtctccaaatacatacttcctctcaccaggacaacaaccacaggatcctctgacccatttactggtcatcaataagacagggtcaaccattgataactttttacattcactgaggcgacagaacatagctatagaagtggatgcctttggaactagaaatggcacagatgacccatcttacaatggtgctatcattgtgtcaggtgatgaaaaggatcacagattttcaatagcatgtaatacaaaacggctgaattgctttcctgtcctcctggatgtcattagcaatggactacttggaatttttaattcgtcagaacacattcagactgacagaagcacattttttgaagagcatatggattatgagtatgggtaccgaagtaacaccttcttctggataccgatggcagcctctttcactccatacattgcaatgagcagcattggtgactacaaaaaaaaagctcattcccagctacggatttcaggcctctacccttctgcatactggtttggccaagcactggtggatgtttccctgtactttttgatcctcctgctaatgcaaataatggattatatttttagcccagaggagattatatttataattcaaaacctgttaattcaaatcctgtgtagtattggctatgtctcatctcttgttttcttgacatatgtgatttcattcatttttcgcaatgggagaaaaaatagtggcatttggtcatttttcttcttaattgtggtcatcttctcgatagttgctactgatctaaatgaatatggatttctagggctattttttggcaccatgttaatacctcccttcacattgattggctctctattcattttttctgagatttctcctgattccatggattacttaggagcttcagaatctgaaattgtatacctggcactgctaataccttaccttcattttctcatttttcttttcattctgcgatgcctagaaatgaactgcaggaagaaactaatgagaaaggatcctgtgttcagaatttctccaagaagcaacgctatttttccaaacccagaagagcctgaaggagaggaggaagatatccagatggaaagaatgagaacagtgaatgctatggctgtgcgagactttgatgagacacccgtcatcattgccagctgtctacggaaggaatatgcaggcaaaaagaaaaattgcttttctaaaaggaagaaaaaaattgccacaagaaatgtctctttttgtgttaaaaaaggtgaagttataggactgttaggacacaatggagctggtaaaagtacaactattaagatgataactggagacacaaaaccaactgcaggacaggtgattttgaaagggagcggtggaggggaacccctgggcttcctggggtactgccctcaggagaatgcgctgtggcccaacctgacagtgaggcagcacctggaggtgtacgctgccgtgaaaggtctcaggaaaggggacgcaatgatcgccatcacacggttagtggatgcgctcaagctgcaggaccagctgaaggctcccgtgaagaccttgtcagagggaataaagcgaaagctgtgctttgtgctgagcatcctggggaacccgtcagtggtgcttctggatgagccgtcgaccgggatggaccccgaggggcagcagcaaatgtggcaggtgattcgggccacctttagaaacacggagaggggcgccctcctgaccacccactacatggcagaggctgaggcggtgtgtgaccgagtggccatcatggtgtcaggaaggctgagatgtattggttccatccaacacctgaaaagcaaatttggcaaagactacctgctggagatgaagctgaagaacctggcacaaatggagcccctccatgcagagatcctgaggcttttcccccaggctgctcagcaggaaaggttctcctccctgatggtctataagttgcctgttgaggatgtgcgacctttatcacaggctttcttcaaattagagatagttaaacagagtttcgacctggaggagtacagcctctcacagtctaccctggagcaggttttcctggagctctccaaggagcaggagctgggtgatcttgaagaggactttgatccctcggtgaagtggaaactcctcctgcaggaagagccttaaagctccaaataccctatatctttctttaatcctgtgactcttttaaagataatattttatagccttaatatgccttatatcagaggtggtacaaaatgcatttgaaactcatgcaataattatcctcagtagtatttcttacagtgagacaacaggcgatgtcagtgagggcgatcatagggcataagcctaagccataccatgcagcctttgtgccagcaaccaaatcccatgtttcctactgtgttaagtttaaaaatgcatttattatagaattgtctacatttctgaggatgtcatggagaatgcttaattttctttctctgaacttcaaaatattaaatattttcttatttatttttttgattaaagtataaattaagacaccctattgacttccgggtaaggggagtcaattgattacccagcagcacagtatttgctttttataattccctttttaaatacttgttcttaattcactggttttccttttctgtcatttttcagagtttagattgtgagtccatgttttgtctgttgtgcctataaaggaaatttgaaatctgtatcattctactataaagacacatgcacacgtatgtttattgcagcactgtttacaatagcaaagacttggaaccaaccaaaatacccacaaatgatagaccggataaagaaaacgtgacacatatacaccatggaatactatgcagccatagaaaaggatgagttcatattcttcacagggacatggatgaagctggaaaccatcatcctcagcaaactaacacaggaacagaaaaccaaacaccgcatgttctcactcataagtgggaattgaacaatgagaatacatggacacagggaggggaacaccacaccctggggcctgttggggggatgggggctaggggagggatagcattaggagaaatacctgatgtagatgatgggttgatgggtgcagcaaagtaccatggcacatgtatacctgtgtaacaaacctgcacattcagcacatgtatcccagaacttaaagtataataaaaataaataaataatttcagtaagaacctgatcaagttgaacatgtatatatatgttatacacaagtttgaaacatatttctgtttttatatgttttcttatgatgcaagggcatactcttatgcaaataattaaaacttcataggtcttaatttcccatatctctatatattattatgacctatccaactggtaaccctatgaacaccttaaaataaacttgtatactcttatttaggtgagtttttcttgttaatactattattattgctatctaattgaatacttgaaggaagttgtgtgaaagaccttggctttgattttagttcttatattcttctagtttttgaaaataaaacacttccatcaacccgtaa

SEQ ID NO: 2930 - DNA, 6205 bp, Homo sapiens
  source 1..6205: mol_type = unassigned DNA
attcacaatgaatgtgaaattaaaagcatgatgtagtagtgacccaaaaggaatgtgaattctcctccagaacatgcagagacccatggatgaactgtgtttctagatttttcctccagctttcctgagagaaacaggtcaaaatgagcaagagacgcatgagcgtgggtcagcaaacatgggctcttctctgcaagaactgtctcaaaaaatggagaatgaaaagacagaccttgttggaatggctcttttcatttcttctggtactgtttctgtacctatttttctccaatttacatcaagttcatgacactcctcaaatgtcttcaatggatctgggacgtgtagatagttttaatgatactaattatgttattgcatttgcacctgaatccaaaactacccaagagataatgaacaaagtggcttcagccccattcctaaaaggaagaacaatcatggggtggcctgatgaaaaaagcatggatgaattggatttgaactattcaatagacgcagtgagagtcatctttactgataccttctcctaccatttgaagttttcttggggacatagaatccccatgatgaaagagcacagagaccattcagctcactgtcaagcagtgaatgaaaaaatgaagtgtgaaggttcagagttctgggagaaaggctttgtagcttttcaagctgccattaatgctgctatcatagaaatcgcaacaaatcattcagtgatggaacagctgatgtcagttactggtgtacatatgaagatattaccttttgttgcccaaggaggagttgcaactgattttttcattttcttttgcattatttctttttctacatttatatactatgtatcagtcaatgttacacaagaaagacaatacattacgtcattgatgacaatgatgggactccgagagtcagcattctggctttcctggggtttgatgtatgctggcttcatccttatcatggccactttaatggctcttattgtaaaatctgcacaaattgtcgtcctgactggttttgtgatggtcttcaccctctttctcctctatggcctgtctttgataactttagctttcctgatgagtgtgttgataaagaaacctttccttacgggcttggttgtgtttctccttattgtcttttgggggatcctgggattcccagcattgtatacacgtcttcctgcatttttggaatggactttgtgtcttcttagcccctttgccttcactgttgggatggcccagcttatacatttggactatgatgtgaattctaatgcccacttggattcttcacaaaatccatacctcataatagctactcttttcatgttggtttttgacacccttctgtatttggtattgacattatattttgacaaaattttgcccgctgaatatggacatcgatgttctcccttgtttttcctgaaatcctgtttttggtttcaacacggaagggctaatcatgtggtccttgagaatgaaacagattctgatcctacacctaatgactgttttgaaccagtgtctccagaattctgtgggaaagaagccatcagaatcaaaaatcttaaaaaagaatatgcagggaagtgtgagagagtagaagctttgaaaggtgtggtgtttgacatatatgaaggccagatcactgccctccttggtcacagtggagctggaaaaactaccctgttaaacatacttagtgggttgtcagttccaacatcaggttcagtcactgtctataatcacacactttcaagaatggctgatatagaaaatatcagcaagttcactggattttgtccacaatccaatgtgcaatttggatttctcactgtgaaagaaaacctcaggctgtttgctaaaataaaagggattttgccacatgaagtggagaaagaggtacaacgagttgtacaggaattagaaatggaaaatattcaagacatccttgctcaaaacttaagtggtggacaaaataggaaactaacttttgggattgccattttaggagatcctcaagttttgctattggatgaaccgactgctggattggatcctctttcaaggcaccgaatatggaatctcctgaaagaggggaaatcagacagagtaattctcttcagcacccagtttatagatgaggctgacattctggcggacaggaaggtgttcatatccaatgggaagctgaagtgtgcaggctcttctctgttccttaagaagaaatggggcataggctaccatttaagtttgcatctgaatgaaaggtgtgatccagagagtataacatcactggttaagcagcacatctctgatgccaaattgacagcacaaagtgaagaaaaacttgtatatattttgcctttggaaaggacaaacaaatttccagaactttacagggatcttgatagatgttctaaccaaggcattgaggattatggtgtttccataacaactttgaatgaggtgtttctgaaattagaaggaaaatcaactattgatgaatcagatattggaatttggggacaattacaaactgatggggcaaaagatataggaagccttgttgagctggaacaagttttgtcttccttccacgaaacaaggaaaacaatcagtggcgtggcgctctggaggcagcaggtctgtgcaatagcaaaagttcgcttcctaaagttaaagaaagaaagaaaaagcctgtggactatattattgctttttggtattagctttatccctcaacttttggaacatctattctacgagtcatatcagaaaagttacccgtgggaactgtctccaaatacatacttcctctcaccaggacaacaaccacaggatcctctgacccatttactggtcatcaataagacagggtcaaccattgataactttttacattcactgaggcgacagaacatagctatagaagtggatgcctttggaactagaaatggcacagatgacccatcttacaatggtgctatcattgtgtcaggtgatgaaaaggatcacagattttcaatagcatgtaatacaaaacggctgaattgctttcctgtcctcctggatgtcattagcaatggactacttggaatttttaattcgtcagaacacattcagactgacagaagcacattttttgaagagcatatggattatgagtatgggtaccgaagtaacaccttcttctggataccgatggcagcctctttcactccatacattgcaatgagcagcattggtgactacaaaaaaaaagctcattcccagctacggatttcaggcctctacccttctgcatactggtttggccaagcactggtggatgtttccctgtactttttgatcctcctgctaatgcaaataatggattatatttttagcccagaggagattatatttataattcaaaacctgttaattcaaatcctgtgtagtattggctatgtctcatctcttgttttcttgacatatgtgatttcattcatttttcgcaatgggagaaaaaatagtggcatttggtcatttttcttcttaattgtggtcatcttctcgatagttgctactgatctaaatgaatatggatttctagggctattttttggcaccatgttaatacctcccttcacattgattggctctctattcattttttctgagatttctcctgattccatggattacttaggagcttcagaatctgaaattgtatacctggcactgctaataccttaccttcattttctcatttttcttttcattctgcgatgcctagaaatgaactgcaggaagaaactaatgagaaaggatcctgtgttcagaatttctccaagaagcaacgctatttttccaaacccagaagagcctgaaggagaggaggaagatatccagatggaaagaatgagaacagtgaatgctatggctgtgcgagactttgatgagacacccgtcatcattgccagctgtctacggaaggaatatgcaggcaaaaagaaaaattgcttttctaaaaggaagaaaaaaattgccacaagaaatgtctctttttgtgttaaaaaaggtgaagttataggactgttaggacacaatggagctggtaaaagtacaactattaagatgataactggagacacaaaaccaactgcaggacaggtgattttgaaagggagcggtggaggggaacccctgggcttcctggggtactgccctcaggagaatgcgctgtggcccaacctgacagtgaggcagcacctggaggtgtacgctgccgtgaaaggtctcaggaaaggggacgcaatgatcgccatcacacggttagtggatgcgctcaagctgcaggaccagctgaaggctcccgtgaagaccttgtcagagggaataaagcgaaaggcaggtgattcgggccacctttagaaacacggagaggggcgccctcctgaccacccactacatggcagaggctgaggcggtgtgtgaccgagtggccatcatggtgtcaggaaggctgagatgtattggttccatccaacacctgaaaagcaaatttggcaaagactacctgctggagatgaagctgaagaacctggcacaaatggagcccctccatgcagagatcctgaggcttttcccccaggctgctcagcaggaaaggttctcctccctgatggtctataagttgcctgttgaggatgtgcgacctttatcacaggctttcttcaaattagagatagttaaacagagtttcgacctggaggagtacagcctctcacagtctaccctggagcaggttttcctggagctctccaaggagcaggagctgggtgatcttgaagaggactttgatccctcggtgaagtggaaactcctcctgcaggaagagccttaaagctccaaataccctatatctttctttaatcctgtgactcttttaaagataatattttatagccttaatatgccttatatcagaggtggtacaaaatgcatttgaaactcatgcaataattatcctcagtagtatttcttacagtgagacaacaggcgatgtcagtgagggcgatcatagggcataagcctaagccataccatgcagcctttgtgccagcaaccaaatcccatgtttcctactgtgttaagtttaaaaatgcatttattatagaattgtctacatttctgaggatgtcatggagaatgcttaattttctttctctgaacttcaaaatattaaatattttcttatttatttttttgattaaagtataaattaagacaccctattgacttccgggtaaggggagtcaattgattacccagcagcacagtatttgctttttataattccctttttaaatacttgttcttaattcactggttttccttttctgtcatttttcagagtttagattgtgagtccatgttttgtctgttgtgcctataaaggaaatttgaaatctgtatcattctactataaagacacatgcacacgtatgtttattgcagcactgtttacaatagcaaagacttggaaccaaccaaaatacccacaaatgatagaccggataaagaaaacgtgacacatatacaccatggaatactatgcagccatagaaaaggatgagttcatattcttcacagggacatggatgaagctggaaaccatcatcctcagcaaactaacacaggaacagaaaaccaaacaccgcatgttctcactcataagtgggaattgaacaatgagaatacatggacacagggaggggaacaccacaccctggggcctgttggggggatgggggctaggggagggatagcattaggagaaatacctgatgtagatgatgggttgatgggtgcagcaaagtaccatggcacatgtatacctgtgtaacaaacctgcacattcagcacatgtatcccagaacttaaagtataataaaaataaataaataatttcagtaagaacctgatcaagttgaacatgtatatatatgttatacacaagtttgaaacatatttctgtttttatatgttttcttatgatgcaagggcatactcttatgcaaataattaaaacttcataggtcttaatttcccatatctctatatattattatgacctatccaactggtaaccctatgaacaccttaaaataaacttgtatactctt

SEQ ID NO: 2931 - DNA, 3581 bp, Homo sapiens
  source 1..3581: mol_type = unassigned DNA
attcacaatgaatgtgaaattaaaagcatgatgtagtagtgacccaaaaggaatgtgaattctcctccagaacatgcagagacccatggatgaactgtgtttctagatttttcctccagctttcctgagagaaacaggtcaaaatgagcaagagacgcatgagcgtgggtcagcaaacatgggctcttctctgcaagaactgtctcaaaaaatggagaatgaaaagacagaccttgttggaatggctcttttcatttcttctggtactgtttctgtacctatttttctccaatttacatcaagttcatgacactcctcaaatgtcttcaatggatctgggacgtgtagatagttttaatgatactaattatgttattgcatttgcacctgaatccaaaactacccaagagataatgaacaaagtggcttcagccccattcctaaaaggaagaacaatcatggggtggcctgatgaaaaaagcatggatgaattggatttgaactattcaatagacgcagtgagagtcatctttactgataccttctcctaccatttgaagttttcttggggacatagaatccccatgatgaaagagcacagagaccattcagctcactgtcaagcagtgaatgaaaaaatgaagtgtgaaggttcagagttctgggagaaaggctttgtagcttttcaagctgccattaatgctgctatcatagaaatcgcaacaaatcattcagtgatggaacagctgatgtcagttactggtgtacatatgaagatattaccttttgttgcccaaggaggagttgcaactgattttttcattttcttttgcattatttctttttctacatttatatactatgtatcagtcaatgttacacaagaaagacaatacattacgtcattgatgacaatgatgggactccgagagtcagcattctggctttcctggggtttgatgtatgctggcttcatccttatcatggccactttaatggctcttattgtaaaatctgcacaaattgtcgtcctgactggttttgtgatggtcttcaccctctttctcctctatggcctgtctttgataactttagctttcctgatgagtgtgttgataaagaaacctttccttacgggcttggttgtgtttctccttattgtcttttgggggatcctgggattcccagcattgtatacacgtcttcctgcatttttggaatggactttgtgtcttcttagcccctttgccttcactgttgggatggcccagcttatacatttggactatgatgtgaattctaatgcccacttggattcttcacaaaatccatacctcataatagctactcttttcatgttggtttttgacacccttctgtatttggtattgacattatattttgacaaaattttgcccgctgaatatggacatcgatgttctcccttgtttttcctgaaatcctgtttttggtttcaacacggaagggctaatcatgtggtccttgagaatgaaacagattctgatcctacacctaatgactgttttgaaccagtgtctccagaattctgtgggaaagaagccatcagaatcaaaaatcttaaaaaagaatatgcagggaagtgtgagagagtagaagctttgaaaggtgtggtgtttgacatatatgaaggccagatcactgccctccttggtcacagtggagctggaaaaactaccctgttaaacatacttagtgggttgtcagttccaacatcaggttcagtcactgtctataatcacacactttcaagaatggctgatatagaaaatatcagcaagttcactggattttgtccacaatccaatgtgcaatttggatttctcactgtgaaagaaaacctcaggctgtttgctaaaataaaagggattttgccacatgaagtggagaaagaggtacaacgagttgtacaggaattagaaatggaaaatattcaagacatccttgctcaaaacttaagtggtggacaaaataggaaactaacttttgggattgccattttaggagatcctcaagttttgctattggatgaaccgactgctggattggatcctctttcaaggcaccgaatatggaatctcctgaaagaggggaaatcagacagagtaattctcttcagcacccagtttatagatgaggctgacattctggcggacaggaaggtgttcatatccaatgggaagctgaagtgtgcaggctcttctctgttccttaagaagaaatggggcataggctaccatttaagtttgcatctgaatgaaaggtgtgatccagagagtataacatcactggttaagcagcacatctctgatgccaaattgacagcacaaagtgaagaaaaacttgtatatattttgcctttggaaaggacaaacaaatttccagaactttacagggatcttgatagatgttctaaccaaggcattgaggattatggtgtttccataacaactttgaatgaggtgtttctgaaattagaaggaaaatcaactattgatgaatcagatattggaatttggggacaattacaaactgatggggcaaaagatataggaagccttgttgagctggaacaagttttgtcttccttccacgaaacaaggaaaacaatcagtggcgtggcgctctggaggcagcaggtctgtgcaatagcaaaagttcgcttcctaaagttaaagaaagaaagaaaaagcctgtggactatattattgctttttggtattagctttatccctcaacttttggaacatctattctacgagtcatatcagaaaagttacccgtgggaactgtctccaaatacatacttcctctcaccaggacaacaaccacaggatcctctgacccatttactggtcatcaataagacagggtcaaccattgataactttttacattcactgaggcgacagaacatagctatagaagtggatgcctttggaactagaaatggcacagatgacccatcttacaatggtgctatcattgtgtcaggtgatgaaaaggatcacagattttcaatagcatgtaatacaaaacggctgaattgctttcctgtcctcctggatgtcattagcaatggactacttggaatttttaattcgtcagaacacattcagactgacagaagcacattttttgaagagcatatggattatgagtatgggtaccgaagtaacaccttcttctggataccgatggcagcctctttcactccatacattgcaatgagcagcattggtgactacaaaaaaaaagctcattcccagctacggatttcaggcctctacccttctgcatactggtttggccaagcactggtggatgtttccctgtactttttgatcctcctgctaatgcaaataatggattatatttttagcccagaggagattatatttataattcaaaacctgttaattcaagtggtcatcttctcgatagttgctactgatctaaatgaatatggatttctagggctattttggcaccatgttaatacctcccttcacattgattggctctctattcattttttctga

SEQ ID NO: 2932 - DNA, 3857 bp, Homo sapiens
  source 1..3857: mol_type = unassigned DNA
cgcctggccggcgggctgaggcgtacgggtcgcacgcagcgccatgcgaggcccccctgcctggccgctgcggctgctcgagccaccgagccctgccgagccaggtcggctcctgccggtagcctgcgtgtgggccgcggccagccgcgttcccgggtccctatcgccgttcactggcctgaggccggcgcggctatggggcgcggggcccgcgctgctctggggcgttggagccgcgcgccgctggaggagcggctgccggggcgggggtccgggcgcctcgcggggcgtcctgggcctcgcgcggctcctggggctgtgggctcgcggccccggcagctgcaggtgcggggcttttgccgggccaggcgctcctcggctcccgcgcgcccggttcccgggcggtcccgcagccgctgcctgggcaggggacgaggcctggcggcgcgggccggcggcgcctcccggggacaaggggcggctgcgccccgcagcggccggactcccggaggcccggaagctcctggggctggcgtaccctgagcgccggaggctggcagctgcggttggatttctcacgatgtccagtgttatctccatgtctgcccctttcttcctggggaagatcattgatgtcatctataccaaccccactgtggactacagcgacaacctgacccgcctctgcctagggctcagtgccgtgtttctgtgtggtgctgccgccaatgccattcgtgtctacctcatgcaaacttcaggtcagcgcattgtgaataggctgagaacttcattattctcctccattctgaggcaggaggttgctttctttgacaagactcgcacaggagaattgattaaccgcctctcatcagacactgcactcctggggcgctcagtgactgaaaacctctcagatgggctcagggccggggcccaggcttccgtaggcatcagtatgatgttttttgtctcacctaatctggccacctttgttttgagcgtggtgcctccagtgtcaatcattgctgtaatttatgggcgatatctacggaaactgaccaaagtcactcaggattccctggcacaagccactcagctagctgaggaacgtattggaaatgtaagaactgttcgagcttttgggaaagaaatgactgaaatcgagaaatatgccagcaaagtggaccatgtaatgcagttagcaaggaaagaggcattcgcccgggctggtttctttggagcaactgggctctccggaaacctgatcgtgctttctgtcctgtacaaaggagggctgctgatgggcagtgcccacatgaccgtgggtgaactctcttccttcctaatgtatgctttctgggttggaataagcattggaggtctgagctctttctactcggagctgatgaaaggactgggtgcaggggggcgcctctgggagctcctggagagagagcccaagctgccttttaacgagggggtcatcttaaatgagaaaagcttccagggtgctttggagtttaagaacgtgcattttgcctatccagctcgcccagaggtgcccatatttcaggatttcagcctttccattccgtcaggatctgtcacggcactggttggcccaagtggttctggcaaatcaacagtgctttcactcctgctgaggttgtacgaccctgcttctggaactattagtcttgatggccatgacatccgtcagctaaacccagtgtggctgagatccaaaattgggacagtgagtcaggaacccattttgttttcttgctctattgctgagaacattgcttatggtgctgatgacccttcctctgtgaccgctgaggaaatccagagagtggctgaagtggccaatgcagtggccttcatccggaatttcccccaagggttcaacactgtggttggagaaaagggtgttctcctctcaggtgggcagaaacagcggattgcgattgcccgtgctctgctaaagaatcccaaaattcttctcctagatgaagcaaccagtgcgctggatgccgaaaatgagtaccttgttcaagaagctctagatcgactgatggatggaagaacggtgttagttattgcccatcgtctgtccaccattaagaatgctaatatggttgctgttcttgaccaaggaaaaattactgaatatggaaaacatgaagagctgctttcaaaaccaaatgggatatacagaaaactaatgaacaaacaaagttttatttcagcataaggaagcaattactggtaaacaatatgagactttaatgcaaaacagtgttgcagaaaaaaaactcagagactatgaaatacataaaccatatatcaagttatttgaaaaatacctatttttttccaaagtgtgtaaaagattgttttgaaacgtacctgttctcaagatctttttattcagagttttaataattgtaactttttaaatgtctatagcactgaagttattttcaggttttgtattttcttttcttgtggaatattttaattaatatagcatggcacctcattttcttttgcctgctgttaaagattgaagctattgtcaaatgacaactttaaaaaggcaattataaataaaaagcctgattattttaggccagtttaccaatcactgtgtaattcttctggtagtattctacctacttttaagtctaattttacagatagaataatggaaattgaaaatttaaccctttattccgataatctcatgaagcaaacctaactatttaacatcagctggaaagaagggaacatttatattgcccatctcctgtgtcttcaaaggtgtgagagctgaggaatatgtgttcctatgggaactatgtttgaatatgtgcagttttcaacattttggcacatgaaagcctgacaagtttttaaaagggcagaagctttattttttgaacaggaaaacatgttttttaaattcacatgtttgtatgagtacttttgcgaagcaaggcatgaactgctaggtattattaagaatgaatgatttttgcatttaagttgtttgaaggcatgtattttgaaaaatatctgttacaaatttataatttcaagacaaattgaatcttattttataatacttttggaatttcattaataaggctaaaatttgaggaatataactaattttcagccttaagacatttaagtttggaagtccttgctattcaacagaataacaagaaaacttcagaatgtatcactctcctgaaaagaagatattaataagcccttttatttatggttatagttttatttatagtctcaaaattcctaaagcaatgctacaaccattgaatttgccatattttgtatcagtgctgttaatttgctgttgcctcaagaaaaagtgctttttctccatggatgaggctagaccctaagaagtaattaagtcaatgtaaatcaaatggaagttttcccatgaactaagcatttattagttccctgattagactggaagaagaaaccactatttcatgaaaagcatggaatattatattttattgttcataattaatgaataaaattgatatgaatgaatatagtgttctttgaattagtaaacagtacatctgtgacaatcatttttaacaagctctacttgtgttctttataaagtgtgattttcagaaagcaaacaacacaattacaaggttgaatctgaggaaaataatccttgtgccatagaagtatttacgaaattgcatttcattgttatgttttattttctgatacatgatgttcaattttatctttaggtaatattttatatcatagattaaaatttatagtgaacttta

SEQ ID NO: 2933 - DNA, 3016 bp, Homo sapiens
  source 1..3016: mol_type = unassigned DNA
ccgtggagcgcggtgcgagtccaacaccgagcattcccgtgggcctgcagttggcaggagggtcccgggcccagagccagcggggccgtgctgagacggcgtacgtgccctgcgtgagtgcgtggcggcggcgcgtgcgctaggggagtgggcggtgaggcctggtccacgtgcgtcccttcccgggacccccgcagcttggcgcccagcggctacgtgagccaaggcacccggatgtccgcgcccctctccgagtgaccagtcccggcctccggtcccgcagtgcccgcagcctcggccggcgtccacgcattgccatggtgactgtgggcaactactgcgaggccgaagggcccgtgggtccggcctggatgcaggatggcctgagtccctgcttcttcttcacgctcgtgccctcgacgcggatggctctggggactctggccttggtgctggctcttccctgcagacgccgggagcggcccgctggtgctgattcgctgtcttggggggccggccctcgcatctctccctacgtgctgcagctgcttctggccacacttcaggcggcgctgcccctggccggcctggctggccgggtgggcactgcccggggggccccactgccaagctatctacttctggcctccgtgctggagagtctggccggcgcctgtggcctgtggctgcttgtcgtggagcggagccaggcacggcagcgtctggcaatgggcatctggatcaagttcaggcacagccctggtctcctgctcctctggactgtggcgtttgcagctgagaacttggccctggtgtcttggaacagcccacagtggtggtgggcaagggcagacttgggccagcaggttcagtttagcctgtgggtgctgcggtatgtggtctctggagggctgtttgtcctgggtctctgggcccctggacttcgtccccagtcctatacattgcaggttcatgaagaggaccaagatgtggaaaggagccaggttcggtcagcagcccaacagtctacctggcgagattttggcaggaagctccgcctcctgagtggctacctgtggcctcgagggagtccagctctgcagctggtggtgctcatctgcctggggctcatgggtttggaacgggcactcaatgtgttggtgcctatattctataggaacattgtgaacttgctgactgagaaggcaccttggaactctctggcctggactgttaccagttacgtcttcctcaagttcctccaggggggtggcactggcagtacaggcttcgtgagcaacctgcgcaccttcctgtggatccgggtgcagcagttcacgtctcggcgggtggagctgctcatcttctcccacctgcacgagctctcactgcgctggcacctggggcgccgcacaggggaggtgctgcggatcgcggatcggggcacatccagtgtcacagggctgctcagctacctggtgttcaatgtcatccccacgctggccgacatcatcattggcatcatctacttcagcatgttcttcaacgcctggtttggcctcattgtgttcctgtgcatgagtctttacctcaccctgaccattgtggtcactgagtggagaaccaagtttcgtcgtgctatgaacacacaggagaacgctacccgggcacgagcagtggactctctgctaaacttcgagacggtgaagtattacaacgccgagagttacgaagtggaacgctatcgagaggccatcatcaaatatcagggtttggagtggaagtcgagcgcttcactggttttactaaatcagacccagaacctggtgattgggctcgggctcctcgccggctccctgctttgcgcatactttgtcactgagcagaagctacaggttggggactatgtgctctttggcacctacattatccagctgtacatgcccctcaattggtttggcacctactacaggatgatccagaccaacttcattgacatggagaacatgtttgacttgctgaaagaggagacagaagtgaaggaccttcctggagcagggccccttcgctttcagaagggccgtattgagtttgagaacgtgcacttcagctatgccgatgggcgggagactctgcaggacgtgtctttcactgtgatgcctggacagacacttgccctggtgggcccatctggggcagggaagagcacaattttgcgcctgctgtttcgcttctacgacatcagctctggctgcatccgaatagatgggcaggacatttcacaggtgacccaggcctctctccggtctcacattggagttgtgccccaagacactgtcctctttaatgacaccatcgccgacaatatccgttacggccgtgtcacagctgggaatgatgaggtggaggctgctgctcaggctgcaggcatccatgatgccattatggctttccctgaagggtacaggacacaggtgggcgagcggggactgaagctgagcggcggggagaagcagcgcgtcgccattgcccgcaccatcctcaaggctccgggcatcattctgctggatgaggcaacgtcagcgctggatacatctaatgagagggccatccaggcttctctggccaaagtctgtgccaaccgcaccaccatcgtagtggcacacaggctctcaactgtggtcaatgctgaccagatcctcgtcatcaaggatggctgcatcgtggagaggggacgacacgaggctctgttgtcccgaggtggggtgtatgctgacatgtggcagctgcagcagggacaggaagaaacctctgaagacactaagcctcagaccatggaacggtgacaaaagtttggccacttccctctcaaagactaacccagaagggaataagatgtgtctcctttccctggcttatttcatcctggtcttggggtatggtgctagctatggtaagggaaagggacctttccgaaaaacatcttttggggaaataaaaatgtggactgtgcgag

SEQ ID NO: 2934 - DNA, 1258 bp, Homo sapiens
  source 1..1258: mol_type = unassigned DNA
attcccgtgggcctgcagttggcaggagggtcccgggcccagagccagcggggccgtgctgagacggcgtacgtgccctgcgtgagtgcgtggcggcggcgcgtgcgctaggggagtgggcggtgaggcctggtccacgtgcgtcccttcccgggacccccgcagcttggcgcccagcggctacgtgagccaaggcacccggatgtccgcgcccctctccgagtgaccagtcccggcctccggtcccgcagtgcccgcagcctcggccggcgtccacgcattgccatggtgactgtgggcaactactgcgaggccgaagggcccgtgggtccggcctggatgcaggatggcctgagtccctgcttcttcttcacgctcgtgccctcgacgcggatggctctggggactctggccttggtgctggctcttccctgcagacgccgggagcggcccgctggtgctgattcgctgtcttggggggccggccctcgcatctctccctacgcactgcccggggggccccactgccaagctatctacttctggcctccgtgctggagagtctggccggcgcctgtggcctgtggctgcttgtcgtggagcggagccaggcacggcagcgtctggcaatgggcatctggatcaagttcaggcacagccctggtctcctgctcctctggactgtggcgtttgcagctgagaacttggccctggtgtcttggaacagcccacagtggtggtgggcaagggcagacttgggccagcaggttcagtttagcctgtgggtgctgcggtatgtggtctctggagggctgtttgtcctgggtctctgggcccctggacttcgtccccagtcctatacattgcaggttcatgaagaggaccaagatgtggaaaggagccagtgaacttgctgactgagaaggcaccttggaactctctggcctggactgttaccagttacgtcttcctcaagttcctccaggggggtggcactggcagtacagctacctggtgttcaatgtcatccccacgctggccgacatcatcattggcatcatctacttcagcatgttcttcaacgcctggtttggcctcattgtgttcctgtgcatgagtctttacctcaccctgaccattgtggtcactgagtggagaaccaagtttcgtcgtgctatgaacacacaggagaacgctacccgggcacgagcagtggactctctgctaaacttcgagacggtgaagtattacaacgccg

SEQ ID NO: 2935 - DNA, 2834 bp, Homo sapiens
  source 1..2834: mol_type = unassigned DNA
gggcctgcagttggcaggagggtcccgggcccagagccagcggggccgtgctgagacggcgtacgtgccctgcgtgagtgcgtggcggcggcgcgtgcgctaggggagtgggcggtgaggcctggtccacgtgcgtcccttcccgggacccccgcagcttggcgcccagcggctacgtgagccaaggcacccggatgtccgcgcccctctccgagtgaccagtcccggcctccggtcccgcagtgcccgcagcctcggccggcgtccacgcattgccatggtgactgtgggcaactactgcgaggccgaagggcccgtgggtccggcctggatgcaggatggcctgagtccctgcttcttcttcacgctcgtgccctcgacgcggatggctctggggactctggccttggtgctggctcttccctgcagacgccgggagcggcccgctggtgctgattcgctgtcttggggggccggccctcgcatctctccctacgtgctgcagctgcttctggccacacttcaggcggcgctgcccctggccggcctggctggccgggtgggcactgcccggggggccccactgccaagctatctacttctggcctccgtgctggagagtctggccggcgcctgtggcctgtggctgcttgtcgtggagcggagccaggcacggcagcgtctggcaatgggcatctggatcaagttcaggcacagccctggtctcctgctcctctggactgtggcgtttgcagctgagaacttggccctggtgtcttggaacagcccacagtggtggtgggcaagggcagacttgggccagcaggttcggtcagcagcccaacagtctacctggcgagattttggcaggaagctccgcctcctgagtggctacctgtggcctcgagggagtccagctctgcagctggtggtgctcatctgcctggggctcatgggtttggaacgggcactcaatgtgttggtgcctatattctataggaacattgtgaacttgctgactgagaaggcaccttggaactctctggcctggactgttaccagttacgtcttcctcaagttcctccaggggggtggcactggcagtacaggcttcgtgagcaacctgcgcaccttcctgtggatccgggtgcagcagttcacgtctcggcgggtggagctgctcatcttctcccacctgcacgagctctcactgcgctggcacctggggcgccgcacaggggaggtgctgcggatcgcggatcggggcacatccagtgtcacagggctgctcagctacctggtgttcaatgtcatccccacgctggccgacatcatcattggcatcatctacttcagcatgttcttcaacgcctggtttggcctcattgtgttcctgtgcatgagtctttacctcaccctgaccattgtggtcactgagtggagaaccaagtttcgtcgtgctatgaacacacaggagaacgctacccgggcacgagcagtggactctctgctaaacttcgagacggtgaagtattacaacgccgagagttacgaagtggaacgctatcgagaggccatcatcaaatatcagggtttggagtggaagtcgagcgcttcactggttttactaaatcagacccagaacctggtgattgggctcgggctcctcgccggctccctgctttgcgcatactttgtcactgagcagaagctacaggttggggactatgtgctctttggcacctacattatccagctgtacatgcccctcaattggtttggcacctactacaggatgatccagaccaacttcattgacatggagaacatgtttgacttgctgaaagaggagacagaagtgaaggaccttcctggagcagggccccttcgctttcagaagggccgtattgagtttgagaacgtgcacttcagctatgccgatgggcgggagactctgcaggacgtgtctttcactgtgatgcctggacagacacttgccctggtgggcccatctggggcagggaagagcacaattttgcgcctgctgtttcgcttctacgacatcagctctggctgcatccgaatagatgggcaggacatttcacaggtgacccaggcctctctccggtctcacattggagttgtgccccaagacactgtcctctttaatgacaccatcgccgacaatatccgttacggccgtgtcacagctgggaatgatgaggtggaggctgctgctcaggctgcaggcatccatgatgccattatggctttccctgaagggtacaggacacaggtgggcgagcggggactgaagctgagcggcggggagaagcagcgcgtcgccattgcccgcaccatcctcaaggctccgggcatcattctgctggatgaggcaacgtcagcgctggatacatctaatgagagggccatccaggcttctctggccaaagtctgtgccaaccgcaccaccatcgtagtggcacacaggctctcaactgtggtcaatgctgaccagatcctcgtcatcaaggatggctgcatcgtggagaggggacgacacgaggctctgttgtcccgaggtggggtgtatgctgacatgtggcagctgcagcagggacaggaagaaacctctgaagacactaagcctcagaccatggaacggtgacaaaagtttggccacttccctctcaaagactaacccagaagggaataagatgtgtctcctttccctggcttatttcatcctggtcttggggtatggtgctagctatggtaagggaaagggacctttccgaaaaacatcttttggggaaataaaaatgtggactgtg

SEQ ID NO: 2936 - DNA, 2377 bp, Homo sapiens
  source 1..2377: mol_type = unassigned DNA
ctcggttcctctttcctcgctcaagatggcgctgctcgcgatgcattcttggcgctgggcggccgcggcggctgctttcgaaaagcgccggcactccgcgattctgatccggcctttagtctctgttagcggctcaggtccgcagtggaggccacatcaactcggcgccttgggaaccgctcgagcctaccagcagattccagagtcattaaaaagtatcacatggcagagattgggaaaaggcaattcaggacagttcttagatgctgcaaaggctctccaggtatggccactgatagaaaagaggacatgttggcatggtcatgcaggaggaggactccacacagacccaaaagaagggttaaaagatgttgatactcggaaaatcataaaagcaatgctttcttatgtgtggcccaaagacaggccagatctacgagctagagttgccatttcgctgggatttttgggtggtgcaaaggccatgaatattgtggttcccttcatgtttaaatatgctgtagacagcctcaaccagatgtcgggaaacatgctgaacctgagtgatgcaccaaatacagttgcaaccatggcaacagcagttctgattggctatggtgtatcaagagctggagctgctttttttaacgaagttcgaaatgcagtatttggcaaggtagcccagaattcaatccgaagaatagccaaaaatgtctttctccatcttcacaacctggatctgggttttcacctgagcagacagacgggagctttatctaaggctattgacagaggaacaaggggtatcagttttgtcctgagtgctttggtatttaatcttcttcccatcatgtttgaagtgatgcttgtcagtggtgttttgtattacaaatgcggtgcccagtttgctttggtaacccttggaacacttggtacatacacagcattcacagttgcagtcacacggtggagaactagatttagaatagaaatgaacaaagcagataatgatgcaggtaatgctgctatagactcactgctgaattatgaaactgtgaagtattttaataatgaaagatatgaagcacagagatatgatggatttttgaagacgtatgagactgcttcattgaaaagtacctctactctggctatgctgaactttggtcaaagtgctattttcagtgtcggtttaacagctataatggtgctcgccagtcagggaattgtggcaggtacccttactgttggagatctagtaatggtgaatggactgctttttcagctttcattacccctgaactttctgggaactgtatatagagagactagacaagcactcatagatatgaacaccttgtttactctactcaaggtagacacccaaattaaagacaaagtgatggcatctccccttcagatcacaccacagacagctaccgtggcctttgataatgtgcattttgaatacattgagggccagaaagtccttagtggaatatcctttgaagtccctgcaggaaagaaagtggccattgtaggaggtagtgggtcagggaaaagcacaatagtgaggctattatttcgcttctatgagcctcaaaagggtagcatttatcttgctggtcaaaatatacaagatgtgagcctggaaagccttcggagggcagtgggagtggtacctcaggatgctgtcctcttccataatactatttattacaacctcttatatggaaacatcagtgcttcacctgaggaagtgtatgcagtggcaaaattagctggacttcatgatgcaattcttcgaatgccacatggatatgacacccaagtaggggaacgaggactcaagctttcaggaggagaaaagcaaagagtagcaattgcaagagccattttgaaggaccccccagtcatactctatgatgaagctacttcatcgttagattcgattactgaagagactattcttggtgccatgaaggatgtggtcaaacacagaacttctattttcattgcacacagattgtcaacagtggttgatgcagatgaaatcattgtcttggatcagggtaaggtagccgaacgtggtacccaccatggtttgcttgctaaccctcatagtatctattcagaaatgtggcatacacagagcagccgtgtgcagaaccatgataaccccaaatgggaagcaaagaaagaaaatatatccaaagaggaggaaagaaagaaactacaagaagaaattgtcaatagtgtgaaaggctgtggaaactgttcgtgctaagtcacataagacattttctttttttgttgttttggactacatatttgcactgaagcagaattgttttattaaaaaaatcatacattccca

SEQ ID NO: 2937 - DNA, 2353 bp, Homo sapiens
  source 1..2353: mol_type = unassigned DNA
cgctcaagatggcgctgctcgcgatgcattcttggcgctgggcggccgcggcggctgctttcgaaaagcgccggcactccgcgattctgatccggcctttagtctctgttagcggctcaggtccgcagtggaggccacatcaactcggcgccttgggaaccgctcgagcctaccagattccagagtcattaaaaagtatcacatggcagagattgggaaaaggcaattcaggacagttcttagatgctgcaaaggctctccaggtatggccactgatagaaaagaggacatgttggcatggtcatgcaggaggaggactccacacagacccaaaagaagggttaaaagatgttgatactcggaaaatcataaaagcaatgctttcttatgtgtggcccaaagacaggccagatctacgagctagagttgccatttcgctgggatttttgggtggtgcaaaggccatgaatattgtggttcccttcatgtttaaatatgctgtagacagcctcaaccagatgtcgggaaacatgctgaacctgagtgatgcaccaaatacagttgcaaccatggcaacagcagttctgattggctatggtgtatcaagagctggagctgctttttttaacgaagttcgaaatgcagtatttggcaaggtagcccagaattcaatccgaagaatagccaaaaatgtctttctccatcttcacaacctggatctgggttttcacctgagcagacagacgggagctttatctaaggctattgacagaggaacaaggggtatcagttttgtcctgagtgctttggtatttaatcttcttcccatcatgtttgaagtgatgcttgtcagtggtgttttgtattacaaatgcggtgcccagtttgctttggtaacccttggaacacttggtacatacacagcattcacagttgcagtcacacggtggagaactagatttagaatagaaatgaacaaagcagataatgatgcaggtaatgctgctatagactcactgctgaattatgaaactgtgaagtattttaataatgaaagatatgaagcacagagatatgatggatttttgaagacgtatgagactgcttcattgaaaagtacctctactctggctatgctgaactttggtcaaagtgctattttcagtgtcggtttaacagctataatggtgctcgccagtcagggaattgtggcaggtacccttactgttggagatctagtaatggtgaatggactgctttttcagctttcattacccctgaactttctgggaactgtatatagagagactagacaagcactcatagatatgaacaccttgtttactctactcaaggtagacacccaaattaaagacaaagtgatggcatctccccttcagatcacaccacagacagctaccgtggcctttgataatgtgcattttgaatacattgagggccagaaagtccttagtggaatatcctttgaagtccctgcaggaaagaaagtggccattgtaggaggtagtgggtcagggaaaagcacaatagtgaggctattatttcgcttctatgagcctcaaaagggtagcatttatcttgctggtcaaaatatacaagatgtgagcctggaaagccttcggagggcagtgggagtggtacctcaggatgctgtcctcttccataatactatttattacaacctcttatatggaaacatcagtgcttcacctgaggaagtgtatgcagtggcaaaattagctggacttcatgatgcaattcttcgaatgccacatggatatgacacccaagtaggggaacgaggactcaagctttcaggaggagaaaagcaaagagtagcaattgcaagagccattttgaaggaccccccagtcatactctatgatgaagctacttcatcgttagattcgattactgaagagactattcttggtgccatgaaggatgtggtcaaacacagaacttctattttcattgcacacagattgtcaacagtggttgatgcagatgaaatcattgtcttggatcagggtaaggtagccgaacgtggtacccaccatggtttgcttgctaaccctcatagtatctattcagaaatgtggcatacacagagcagccgtgtgcagaaccatgataaccccaaatgggaagcaaagaaagaaaatatatccaaagaggaggaaagaaagaaactacaagaagaaattgtcaatagtgtgaaaggctgtggaaactgttcgtgctaagtcacataagacattttctttttttgttgttttggactacatatttgcactgaagcagaattgttttattaaaaaaatcatacatt

SEQ ID NO: 2938 - DNA, 2116 bp, Homo sapiens
  source 1..2116: mol_type = unassigned DNA
ctcgctcaagatggcgctgctcgcgatgcattcttggcgctgggcggccgcggcggctgctttcgaaaagcgccggcactccgcgattctgatccggcctttagtctctgttagcggctcaggtccgcagtggaggccacatcaactcggcgccttgggaaccgctcgagcctaccaggctctccaggtatggccactgatagaaaagaggacatgttggcatggtcatgcaggaggaggactccacacagacccaaaagaagggttaaaagatgttgatactcggaaaatcataaaagcaatgctttcttatgtgtggcccaaagacaggccagatctacgagctagagttgccatttcgctgggatttttgggtggtgcaaaggccatgaatattgtggttcccttcatgtttaaatatgctgtagacagcctcaaccagatgtcgggaaacatgctgaacctgagtgatgcaccaaatacagttgcaaccatggcaacagcagttctgattggctatggtgtatcaagagctggagctgctttttttaacgaagttcgaaatgcagtatttggcaaggtagcccagaattcaatccgaagaatagccaaaaatgtctttctccatcttcacaacctggatctgggttttcacctgagcagacagacgggagctttatctaaggctattgacagaggaacaaggggtatcagttttgtcctgagtgctttggtatttaatcttcttcccatcatgtttgaagtgatgcttgtcagtggtgttttgtattacaaatgcggtgcccagtttgctttggtaacccttggaacacttggtacatacacagcattcacagttgcagtcacacggtggagaactagatttagaatagaaatgaacaaagcagataatgatgcaggtaatgctgctatagactcactgctgaattatgaaactgtgaagtattttaataatgaaagatatgaagcacagagatatgatggatttttgaagacgtatgagactgcttcattgaaaagtacctctactctggctatgctgaactttggtcaaagtgctattttcagtgtcggtttaacagctataatggtgctcgccagtcagggaattgtggcaggtacccttactgttggagatctagtaatggtgaatggactgctttttcagctttcattacccctgaactttctgggaactgtatatagagagactagacaagcactcatagatatgaacaccttgtttactctactcaaggtagacacccaaattaaagacaaagtgatggcatctccccttcagatcacaccacagacagctaccgtggcctttgataatgtgcattttgaatacattgagggccagaaagtccttagtggaatatcctttgaagtccctgcaggaaagaaagtggccattgtaggaggtagtgggtcagggaaaagcacaatagtgaggctattatttcgcttctatgagcctcaaaagggtagcatttatcttgctggtcaaaatatacaagatgtgagcctggaaagccttcggagggcagtgggagtggtacctcaggatgctgtcctcttccataatactatttattacaacctcttatatggaaacatcagtgcttcacctgaggaagtgtatgcagtggcaaaattagctggacttcatgatgcaattcttcgaatgccacatggatatgacacccaagtaggggaacgaggactcaagctttcaggaggagaaaagcaaagagtagcaattgcaagagccattttgaaggaccccccagtcatactctatgatgaagctacttcatcgttagattcgattactgaagagactattcttggtgccatgaaggatgtggtcaaacacagaacttctattttcattgcacacagattgtcaacagtggttgatgcagatgaaatcattgtcttggatcagggtaaggtagccgaacgtggtacccaccatggtttgcttgctaaccctcatagtatctattcagaaatgtggcatacacagagcagccgtgtgcagaaccatgataaccccaaatgggaagcaaagaaagaaaatatatcc

SEQ ID NO: 2939 - DNA, 2302 bp, Homo sapiens
  source 1..2302: mol_type = unassigned DNA
ctcggttcctctttcctcgctcaagatggcgctgctcgcgatgcattcttggcgctgggcggccgcggcggctgctttcgaaaagcgccggcactccgcgattctgatccggcctttagtctctgttagcggctcaggtccgcagtggaggccacatcaactcggcgccttgggaaccgctcgagcctaccaggctctccaggtatggccactgatagaaaagaggacatgttggcatggtcatgcaggaggaggactccacacagacccaaaagaagggttaaaagatgttgatactcggaaaatcataaaagcaatgctttcttatgtgtggcccaaagacaggccagatctacgagctagagttgccatttcgctgggatttttgggtggtgcaaaggccatgaatattgtggttcccttcatgtttaaatatgctgtagacagcctcaaccagatgtcgggaaacatgctgaacctgagtgatgcaccaaatacagttgcaaccatggcaacagcagttctgattggctatggtgtatcaagagctggagctgctttttttaacgaagttcgaaatgcagtatttggcaaggtagcccagaattcaatccgaagaatagccaaaaatgtctttctccatcttcacaacctggatctgggttttcacctgagcagacagacgggagctttatctaaggctattgacagaggaacaaggggtatcagttttgtcctgagtgctttggtatttaatcttcttcccatcatgtttgaagtgatgcttgtcagtggtgttttgtattacaaatgcggtgcccagtttgctttggtaacccttggaacacttggtacatacacagcattcacagttgcagtcacacggtggagaactagatttagaatagaaatgaacaaagcagataatgatgcaggtaatgctgctatagactcactgctgaattatgaaactgtgaagtattttaataatgaaagatatgaagcacagagatatgatggatttttgaagacgtatgagactgcttcattgaaaagtacctctactctggctatgctgaactttggtcaaagtgctattttcagtgtcggtttaacagctataatggtgctcgccagtcagggaattgtggcaggtacccttactgttggagatctagtaatggtgaatggactgctttttcagctttcattacccctgaactttctgggaactgtatatagagagactagacaagcactcatagatatgaacaccttgtttactctactcaaggtagacacccaaattaaagacaaagtgatggcatctccccttcagatcacaccacagacagctaccgtggcctttgataatgtgcattttgaatacattgagggccagaaagtccttagtggaatatcctttgaagtccctgcaggaaagaaagtggccattgtaggaggtagtgggtcagggaaaagcacaatagtgaggctattatttcgcttctatgagcctcaaaagggtagcatttatcttgctggtcaaaatatacaagatgtgagcctggaaagccttcggagggcagtgggagtggtacctcaggatgctgtcctcttccataatactatttattacaacctcttatatggaaacatcagtgcttcacctgaggaagtgtatgcagtggcaaaattagctggacttcatgatgcaattcttcgaatgccacatggatatgacacccaagtaggggaacgaggactcaagctttcaggaggagaaaagcaaagagtagcaattgcaagagccattttgaaggaccccccagtcatactctatgatgaagctacttcatcgttagattcgattactgaagagactattcttggtgccatgaaggatgtggtcaaacacagaacttctattttcattgcacacagattgtcaacagtggttgatgcagatgaaatcattgtcttggatcagggtaaggtagccgaacgtggtacccaccatggtttgcttgctaaccctcatagtatctattcagaaatgtggcatacacagagcagccgtgtgcagaaccatgataaccccaaatgggaagcaaagaaagaaaatatatccaaagaggaggaaagaaagaaactacaagaagaaattgtcaatagtgtgaaaggctgtggaaactgttcgtgctaagtcacataagacattttctttttttgttgttttggactacatatttgcactgaagcagaattgttttattaaaaaaatcatacattcccattttct

SEQ ID NO: 2940 - DNA, 2487 bp, Homo sapiens
  source 1..2487: mol_type = unassigned DNA
atagagccctcagtgggatgagggtgaaactgctattgccggcggctcctgttttaccgcgtcagcatgctggtgcatttatttcgggtcgggattcggggtggcccattcccaggcaggctgctaccgcccctccgcttccagacattctcagctgtcagaaacacatggcgtaatgggaaaactggacagttacacaaggcagaaggagagtactctgatggctaccgcagctcctccctcctccgggccgtggcccacctgcggtcccagctctgggcccacctccctcgagcccccctagctcccagatggagcccctctgcctggtgctgggttgggggagccctgctaggccccatggtactgagtaagcatccccacctctgccttgtggccctgtgtgaggcagaagaggcccctcctgccagctccacaccccatgtcgtggggtctcgctttaactggaagctcttctggcagtttctgcacccccacctgctggtcctgggggtagccgtcgtgctggccttgggtgcggcactcgtgaatgtacagatccccctgctcctgggccagctggtagaggtcgtggccaagtacacaagggaccacgtagggagtttcatgactgagtcccagaatctcagcacccacctgcttatcctctatggtgtccagggactgctgaccttcgggtacctggtgctgctgtcccacgttggcgagcgcatggctgtggacatgcggagggccctcttcagctccctgctccgacaagacatcaccttctttgacgccaataagacagggcagctggtgagccgcttgacaactgacgtgcaggagtttaagtcatccttcaagcttgtcatctcccaggggctgcgaagctgcacccaggtggcaggctgcctggtgtccctgtccatgctgtcgacacgcctcacgctgctgctgatggtggccacaccagccctgatgggagtgggcaccctgatgggctcaggcctccgaaaattgtctcgccagtgtcaggagcagatcgccagggcaatgggcgtagcagacgaggccctgggcaatgtgcggactgtgcgtgccttcgccatggagcaacgggaagaggagcgctatggggcagagctggaagcctgccgctgccgggcagaggagctgggccgcggcatcgccttgttccaagggctttccaacatcgccttcaactgcatggtcttgggtaccctatttattgggggctcccttgtggccggacagcagctgacagggggagacctcatgtccttcctggtggcctcccagacagtgcaaaggtccatggccaacctctctgtcctgtttgggcaggtggtccgggggctgagtgcaggtgcccgggtctttgagtacatggccctgaacccctgcatcccactgtctgggggctgctgcgtccccaaagagcagctgcgtggctccgttacatttcagaacgtctgcttcagctacccctgccgccccggcttcgaggtgctgaaagacttcaccctgacgctgccccctggcaagatcgtggccctcgtgggccagtctggcggaggaaagaccaccgtggcttccctgctggagcgcttctacgaccccacggcaggcgtggtgatgctggatgggcgggacctgcgcacccttgacccctcctggctccggggccaggttgtcggcttcatcagccaggagcccgtcctgtttgggacgaccatcatggaaaacatccgctttgggaagctggaagcttccgatgaagaggtgtacacagccgcccgggaagcgaatgctcacgagttcatcaccagcttccccgagggctacaacacggtcgtcggtgaacggggcactaccctgtctgggggccagaagcagcgcctggccatcgcccgagcccttatcaagcagcccacggtgctgatactggatgaagctaccagcgcgctggatgcagagtccgagcgggttgtacaggaggccctggaccgggccagtgcaggccgcacggtgctggtaattgcccaccggctcagcactgtccgtggggcccactgcattgtcgtcatggccgatggccgtgtctgggaggctgggacacatgaagagctcctgaagaaaggcgggctatacgccgagctcatccggaggcaggccctggatgccccgaggacagcggccccaccgcccaaaaagccagaaggccccaggagccaccagcacaagtcctgagaagggccccctgaggtgtggtcgctgccaagcatcagtgttagggctggggctcagcctgggggagcctactggggactgagcccccaggagggccagcatgtggagagtcgctgcggctgctcctgctcacaataaagccggggccgagcagctggcaggggaggccaatccctccctcccctccccagtcctgccggctgcctccctccc

SEQ ID NO: 2941 - DNA, 2539 bp, Homo sapiens
  source 1..2539: mol_type = unassigned DNA
gtgggatgagggtgaaactgctattgccggcggctcctgttttaccgcgtcagcatgctggtgcatttatttcgggtcgggattcggggtggcccattcccaggcaggctgctaccgcccctccgcttccagacattctcagctgtcaggaggctcctgcgtctgcagccgcgtgtcagccagaaggaggggacgctcggggtcagtgaccacgcccagtccgcactcccgaccgggggtcccctttcctggccctggaggtactctgatggctaccgcagctcctccctcctccgggccgtggcccacctgcggtcccagctctgggcccacctccctcgagcccccctagctcccagatggagcccctctgcctggtgctgggttgggggagccctgctaggccccatggtactgagtaagcatccccacctctgccttgtggccctgtgtgaggcagaagaggcccctcctgccagctccacaccccatgtcgtggggtctcgctttaactggaagctcttctggcagtttctgcacccccacctgctggtcctgggggtagccgtcgtgctggccttgggtgcggcactcgtgaatgtacagatccccctgctcctgggccagctggtagaggtcgtggccaagtacacaagggaccacgtagggagtttcatgactgagtcccagaatctcagcacccacctgcttatcctctatggtgtccagggactgctgaccttcgggtacctggtgctgctgtcccacgttggcgagcgcatggctgtggacatgcggagggccctcttcagctccctgctccgacaagacatcaccttctttgacgccaataagacagggcagctggtgagccgcttgacaactgacgtgcaggagtttaagtcatccttcaagcttgtcatctcccaggggctgcgaagctgcacccaggtggcaggctgcctggtgtccctgtccatgctgtcgacacgcctcacgctgctgctgatggtggccacaccagccctgatgggagtgggcaccctgatgggctcaggcctccgaaaattgtctcgccagtgtcaggagcagatcgccagggcaatgggcgtagcagacgaggccctgggcaatgtgcggactgtgcgtgccttcgccatggagcaacgggaagaggagcgctatggggcagagctggaagcctgccgctgccgggcagaggagctgggccgcggcatcgccttgttccaagggctttccaacatcgccttcaactgcatggtcttgggtaccctatttattgggggctcccttgtggccggacagcagctgacagggggagacctcatgtccttcctggtggcctcccagacagtgcaaaggcaggtccatggccaacctctctgtcctgtttgggcaggtggtccgggggctgagtgcaggtgcccgggtctttgagtacatggccctgaacccctgcatcccactgtctgggggctgctgcgtccccaaagagcagctgcgtggctccgttacatttcagaacgtctgcttcagctacccctgccgccccggcttcgaggtgctgaaagacttcaccctgacgctgccccctggcaagatcgtggccctcgtgggccagtctggcggaggaaagaccaccgtggcttccctgctggagcgcttctacgaccccacggcaggcgtggtgatgctggatgggcgggacctgcgcacccttgacccctcctggctccggggccaggttgtcggcttcatcagccaggagcccgtcctgtttgggacgaccatcatggaaaacatccgctttgggaagctggaagcttccgatgaagaggtgtacacagccgcccgggaagcgaatgctcacgagttcatcaccagcttccccgagggctacaacacggtcgtcggtgaacggggcactaccctgtctgggggccagaagcagcgcctggccatcgcccgagcccttatcaagcagcccacggtgctgatactggatgaagctaccagcgcgctggatgcagagtccgagcgggttgtacaggaggccctggaccgggccagtgcaggccgcacggtgctggtaattgcccaccggctcagcactgtccgtggggcccactgcattgtcgtcatggccgatggccgtgtctgggaggctgggacacatgaagagctcctgaagaaaggcgggctatacgccgagctcatccggaggcaggccctggatgccccgaggacagcggccccaccgcccaaaaagccagaaggccccaggagccaccagcacaagtcctgagaagggccccctgaggtgtggtcgctgccaagcatcagtgttagggctggggctcagcctgggggagcctactggggactgagcccccaggagggccagcatgtggagagtcgctgcggctgctcctgctcacaataaagccggggccgagcagctggcaggggaggccaatccctccctcccctccccagtcctgccggctgcctccctccc

SEQ ID NO: 2942 - DNA, 4683 bp, Homo sapiens
  source 1..4683: mol_type = unassigned DNA
gttgtcgggatgggggcgggagccaacatagagccctcagtgggatgagggtgaaactgctattgccggcggctcctgttttaccgcgtcagcatgctggtgcatttatttcgggtcgggattcggggtggcccattcccaggcaggctgctaccgcccctccgcttccagacattctcagctgtcaggtactctgatggctaccgcagctcctccctcctccgggccgtggcccacctgcggtcccagctctgggcccacctccctcgagcccccctagctcccagatggagcccctctgcctggtgctgggttgggggagccctgctaggccccatggtactgagtaagcatccccacctctgccttgtggccctgtgtgaggcagaagaggcccctcctgccagctccacaccccatgtcgtggggtctcgctttaactggaagctcttctggcagtttctgcacccccacctgctggtcctgggggtagccgtcgtgctggccttgggtgcggcactcgtgaatgtacagatccccctgctcctgggccagctggtagaggtcgtggccaagtacacaagggaccacgtagggagtttcatgactgagtcccagaatctcagcacccacctgcttatcctctatggtgtccagggactgctgaccttcgggtacctggtgctgctgtcccacgttggcgagcgcatggctgtggacatgcggagggccctcttcagctccctgctccgacaagacatcaccttctttgacgccaataagacagggcagctggtgagccgcttgacaactgacgtgcaggagtttaagtcatccttcaagcttgtcatctcccaggggctgcgaagctgcacccaggtggcaggctgcctggtgtccctgtccatgctgtcgacacgcctcacgctgctgctgatggtggccacaccagccctgatgggagtgggcaccctgatgggctcaggcctccgaaaattgtctcgccagtgtcaggagcagatcgccagggcaatgggcgtagcagacgaggccctgggcaatgtgcggactgtgcgtgccttcgccatggagcaacgggaagaggagcgctatggggcagagctggaagcctgccgctgccgggcagaggagctgggccgcggcatcgccttgttccaagggctttccaacatcgccttcaactgcatggtcttgggtaccctatttattgggggctcccttgtggccggacagcagctgacagggggagacctcatgtccttcctggtggcctcccagacagtgcaaaggtccatggccaacctctctgtcctgtttgggcaggtggtccgggggctgagtgcaggtgcccgggtctttgagtacatggccctgaacccctgcatcccactgtctgggggctgctgcgtccccaaagagcagctgcgtggctccgttacatttcagaacgtctgcttcagctacccctgccgccccggcttcgaggtgctgaaagacttcaccctgacgctgccccctggcaagatcgtggccctcgtgggccagtctggcggaggaaagaccaccgtggcttccctgctggagcgcttctacgaccccacggcaggcgtggtgatgctggatgggcgggacctgcgcacccttgacccctcctggctccggggccaggttgtcggcttcatcagccaggagcccgtcctgtttgggacgaccatcatggaaaacatccgctttgggaagctggaagcttccgatgaagaggtgtacacagccgcccgggaagcgaatgctcacgagttcatcaccagcttccccgagggctacaacacggtcgtcggtgaacggggcactaccctgtctgggggccagaagcagcgcctggccatcgcccgagcccttatcaagcagcccacggtgctgatactggatgaagctaccagcgcgctggatgcagagtccgagcgggttgtacaggaggccctggaccgggccagtgcaggccgcacggtgctggtaattgcccaccggctcagcactgtccgtggggcccactgcattgtcgtcatggccgatggccgtgtctgggaggctgggacacatgaagagctcctgaagaaaggcgggctatacgccgagctcatccggaggcaggccctggatgccccgaggacagcggccccaccgcccaaaaagccagaaggccccaggagccaccagcacaagtcctgagaagggccccctgaggtgtggtcgctgccaagcatcagtgttagggctggggctcagcctgggggagcctactggggactgagcccccaggagggccagcatgtggagagtcgctgcggctgctcctgctcacaataaagccggggccgagcagctggcaggggaggccaatccctccctcccctccccagtcctgccggctgcctccctcccaccagagtctgccagagtcattgggctgcaatgggcagagacagagttccacgagacacctccactctattctccctttgcccagacccctccagacctctcaagagacgttctggccagtctccctgccccacccagcagcttcaaattggccaggcctacagtagctccagggaatttttaaaaatcagggtctggaagtgggcctgggaattcaaacctaggctcttcccacacccttgctaggacctcacttccctagactggcgactgactccctctcctgtgtccccactccctccatgggagaaggagcctatcccctggctcaccccgggacccacagtccccatcttccaaacaacctccctcctttctccctgcacagtgaacacagtcctgatttctagatttcacctcccctccccacccacaagggacacaggcctaacagggcccaacacttgggtcagggtaggagggacggggccacaatggccagttcccacgagaagcgccagcctgcctggctgtcttccaccggccctgccctgtgtgcctggcgtctttcacccactgagattgtgaaccagcctccatctacaccaagaacacccagcactgaaggagatgggaggggctgatgcccacctggagctctctgcttcctgcccacagtgctgacgagtacagagctaaatggagcagctactgcagaatccagtacagaatcggtccaggagggtgcggctgtggacaggccagcatccccagcaggttctgggaggcgcaccttgaaaggggaaggcagacatcctgagtgatgggcgcctgtggccctgagactgtggatgagggggctaggctccagctggcttctgaggggcctggaaaggcacacaagtaggtccttggctgaactggtgccccagcaggacctcgtgtccctgcactgctgcagatgcatcagccctccccatgttggtgccgctgtcacttcctactgggatccttcccctatccagccacatccaggctgtgggactacacggtgccctgttcccctgggcaggagaagaggtggtacctgcaatgcaccttcacagccaggcaagcattctggatttaccctgtgtaaagaagggtggtaccctctttcaggggtgtgatacagtgcattgatggagcagctggtgctgctgggaggccagcctggaagaggcagcagtggctcaagtttgcgtgcaggagccagagtgggacccacgggctcttgtgggtgtggtttagaactagatggtgctttggggacaagccatccaaaaaccccaggcccacatccaccctgatttgatatcccacttcctgacagatcagaggctgtgtctttaagcagtggaggtccaggagcagagcctggggctggttcacagctaaacccctccttagggcagcccagagtagggcctcagctggcaagtccacaagccctgctggggccctgcttgttggcctgacccctccctcaccaggcagccagccaaggtggttcctgcttcacccactcagtcatcagcctcaggctgcccaaaatgcctctgacaccagatttatatcttctgggcggcttctttaaatccagcccttcacccgccccctagagaagcagtgaaaccccttggctagtccagctggaagagctagaccgcaggagccgcgccgtcttcctaacctcgcctcggccttcgctccacagtggagagtgggagcctagctgtgcttgatgctgaatgcctgttttgagagtgtgagtgggatcatctacagtaaatacttgcaaagcatggcactgtggctctggggagctggtacgcctgtgctgtaaccatggtactcagtccttccaaagtgtttattaatcaagcacctgtcatgtgccattgagcccacgatggggaatgaggacagtccctgcccccatgaagcttgtgtcctgttgggaggacagacaggtggcccagcagttgcagcatggtgtgtgcacacgtttggctggtggaaccatgtttctaccactcatggtcaaaaaaagcccaccaaagtcctgggagttcacatctgtgtgatgatacggcaacattgtttgtaatggaaagactggacacccccagtgcccatcagtgggggagtcattaaataaactatggtatgtgcacataa

SEQ ID NO: 2943 - DNA, 2392 bp, Homo sapiens
  source 1..2392: mol_type = unassigned DNA
agccaacatagagccctcagtgggatgagggtgaaactgctattgccggcggctcctgttttaccgcgtcagcatgctggtgcatttatttcgggtcgggattcggggtggcccattcccaggcaggctgctaccgcccctccgcttccagacattctcagctgtcaggtactctgatggctaccgcagctcctccctcctccgggccgtggcccacctgcggtcccagctctgggcccacctccctcgagccctgctaggccccatggtactgagtaagcatccccacctctgccttgtggccctgtgtgaggcagaagaggcccctcctgccagctccacaccccatgtcgtggggtctcgctttaactggaagctcttctggcagtttctgcacccccacctgctggtcctgggggtagccgtcgtgctggccttgggtgcggcactcgtgaatgtacagatccccctgctcctgggccagctggtagaggtcgtggccaagtacacaagggaccacgtagggagtttcatgactgagtcccagaatctcagcacccacctgcttatcctctatggtgtccagggactgctgaccttcgggtacctggtgctgctgtcccacgttggcgagcgcatggctgtggacatgcggagggccctcttcagctccctgctccgacaagacatcaccttctttgacgccaataagacagggcagctggtgagccgcttgacaactgacgtgcaggagtttaagtcatccttcaagcttgtcatctcccaggggctgcgaagctgcacccaggtggcaggctgcctggtgtccctgtccatgctgtcgacacgcctcacgctgctgctgatggtggccacaccagccctgatgggagtgggcaccctgatgggctcaggcctccgaaaattgtctcgccagtgtcaggagcagatcgccagggcaatgggcgtagcagacgaggccctgggcaatgtgcggactgtgcgtgccttcgccatggagcaacgggaagaggagcgctatggggcagagctggaagcctgccgctgccgggcagaggagctgggccgcggcatcgccttgttccaagggctttccaacatcgccttcaactgcatggtcttgggtaccctatttattgggggctcccttgtggccggacagcagctgacagggggagacctcatgtccttcctggtggcctcccagacagtgcaaaggtccatggccaacctctctgtcctgtttgggcaggtggtccgggggctgagtgcaggtgcccgggtctttgagtacatggccctgaacccctgcatcccactgtctgggggctgctgcgtccccaaagagcagctgcgtggctccgttacatttcagaacgtctgcttcagctacccctgccgccccggcttcgaggtgctgaaagacttcaccctgacgctgccccctggcaagatcgtggccctcgtgggccagtctggcggaggaaagaccaccgtggcttccctgctggagcgcttctacgaccccacggcaggcgtggtgatgctggatgggcgggacctgcgcacccttgacccctcctggctccggggccaggttgtcggcttcatcagccaggagcccgtcctgtttgggacgaccatcatggaaaacatccgctttgggaagctggaagcttccgatgaagaggtgtacacagccgcccgggaagcgaatgctcacgagttcatcaccagcttccccgagggctacaacacggtcgtcggtgaacggggcactaccctgtctgggggccagaagcagcgcctggccatcgcccgagcccttatcaagcagcccacggtgctgatactggatgaagctaccagcgcgctggatgcagagtccgagcgggttgtacaggaggccctggaccgggccagtgcaggccgcacggtgctggtaattgcccaccggctcagcactgtccgtggggcccactgcattgtcgtcatggccgatggccgtgtctgggaggctgggacacatgaagagctcctgaagaaaggcgggctatacgccgagctcatccggaggcaggccctggatgccccgaggacagcggccccaccgcccaaaaagccagaaggccccaggagccaccagcacaagtcctgagaagggccccctgaggtgtggtcgctgccaagcatcagtgttagggctggggctcagcctgggggagcctactggggactgagcccccaggagggccagcatgtggagagtcgctgcggctgctcctgctcacaataaagccggggccgagcagctggcaggggaggccaatccctccctcccctccccagtcctgccggctgcctccctccc

SEQ ID NO: 2944 - DNA, 1596 bp, Homo sapiens
  source 1..1596: mol_type = unassigned DNA
atgagggtgaaactgctattgccggcggctcctgttttaccgcgtcagcatgctggtgcatttatttcgggtcgggattcggggtggcccattcccaggcaggctgctaccgcccctccgcttccagacattctcagctgtcaggtactctgatggctaccgcagctcctccctcctccgggccgtggcccacctgcggtcccagctctgggcccacctccctcgagcccccctagctcccagatggagcccctctgcctggtgctgggttgggggagccctgctaggccccatggtactgagtaagcatccccacctctgccttgtggccctgtgtgaggcagaagaggcccctcctgccagctccacaccccatgtcgtggggtctcgctttaactggaagctcttctggcagtttctgcacccccacctgctggtcctgggggtagccgtcgtgctggccttgggtgcggcactcgtgaatgtacagatccccctgctcctgggccagctggtagaggtcgtggccaagtacacaagggaccacgtagggagtttcatgactgagtcccagaatctcagcacccacctgcttatcctctatggtgtccagggactgctgaccttcgggtacctggtgctgctgtcccacgttggcgagcgcatggctgtggacatgcggagggccctcttcagctccctgctccgacaagacatcaccttctttgacgccaataagacagggcagctggtgagccgcttgacaactgacgtgcaggagtttaagtcatccttcaagcttgtcatctcccaggggctgcgaagctgcacccaggtggcaggctgcctggtgtccctgtccatgctgtcgacacgcctcacgctgctgctgatggtggccacaccagccctgatgggagtgggcaccctgatgggctcaggcctccgaaaattgtctcgccagtgtcaggagcagatcgccagggcaatgggcgtagcagacgaggccctgggcaatgtgcggactgtgcgtgccttcgccatggagcaacgggaagaggagcgctatggggcagagctggaagcctgccgctgccgggcagaggagctgggccgcggcatcgccttgttccaagggctttccaacatcgccttcaactgcatggtcttgggtaccctatttattgggggctcccttgtggccggacagcagctgacagggggagacctcatgtccttcctggtggcctcccagacagtgcaaagcttcctccgtgttgcaccctgtccgaattcccttccgctgcaggctgtgacattccatgcatggaaggaccatccttgacaggctgtgtgagctgcccttccccatgcctgccacttccagggatgacaagctgacccctgtccccacacaccccacccttatagcttattgctttgcgttggtccaaaaccacccgctcagctgagcctctgggatgaccagagctgatcaccagacagctcaaggcgggcctcccccctcctatctctttccaagctaaacacaagcagttctacataaatatgttatggtaaataatgagatagtaa

SEQ ID NO: 2945 - DNA, 2350 bp, Homo sapiens
  source 1..2350: mol_type = unassigned DNA
gtgggatgagggtgaaactgctattgccggcggctcctgttttaccgcgtcagcatgctggtgcatttatttcgggtcgggattcggggtggcccattcccaggcaggctgctaccgcccctccgcttccagacattctcagctgtcaggtactctgatggctaccgcagctcctccctcctccgggccgtggcccacctgcggtcccagctctgggcccacctccctcgagcccccctagctcccagatggagcccctctgcctggtgctgggttgggggagccctgctaggccccatggtactgagtaagcatccccacctctgccttgtggccctgtgtgaggcagaagaggcccctcctgccagctccacaccccatgtcgtggggtctcgctttaactggaagctcttctggcagtttctgcacccccacctgctggtcctgggggtagccgtcgtgctggccttgggtgcggcactcgtgaatgtacagatccccctgctcctgggccagctggtagaggtcgtggccaagtacacaagggaccacgtagggagtttcatgactgagtcccagaatctcagcacccacctgcttatcctctatggtgtccagggactgctgaccttcgggtacctggtgctgctgtcccacgttggcgagcgcatggctgtggacatgcggagggccctcttcagctccctgctccgacaagacatcaccttctttgacgccaataagacagggcagctggtgagccgcttgacaactgacgtgcaggagtttaagtcatccttcaagcttgtcatctcccaggggctgcgaagctgcacccaggtggcaggctgcctggtgtccctgtccatgctgtcgacacgcctcacgctgctgctgatggtggccacaccagccctgatgggagtgggcaccctgatgggctcaggcctccgaaaattgtctcgccagtgtcaggagcagatcgccagggcaatgggcgtagcagacgaggccctgggcaatgtgcggactgtgcgtgccttcgccatggagcaacgggaagaggagcgctatggggcagagctggaagcctgccgctgccgggcagaggagctgggccgcggcatcgccttgttccaagggctttccaacatcgccttcaactgcatggtcttgggtaccctatttattgggggctcccttgtggccggacagcagctgacagggggagacctcatgtccttcctggtggcctcccagacagtgcaaaggtccatggccaacctctctgtcctgtttgggcaggtggtccgggggctgagtgcaggtgcccgggtctttgagtacatggccctgaacccctgcatcccactgtctgggggctgctgcgtccccaaagagcagctgcgtggctccgttacatttcagaacgtctgcttcagctacccctgccgccccggcttcgaggtgctgaaagacttcaccctgacgctgccccctggcaagatcgtggccctcgtgggccagtctggcggaggaaagaccaccgtggcttccctgctggagcgcttctacgaccccacggcaggcgtggtgatgctggatgggcgggacctgcgcacccttgacccctcctggctccggggccaggttgtcggcttcatcagccaggagcccgtcctgtttgggacgaccatcatggaaaacatccgctttgggaagctggaagcttccgatgaagaggtgtacacagccgcccgggaagcgaatgctcacgagttcatcaccagcttccccgagggctacaacacggtcgtcggtgaacggggcactaccctgtctgggggccagaagcagcgcctggccatcgcccgagcccttatcaagcagcccacggtgctgatactggatgaagctaccagcgcgctggatgcagagtccgagcgggttgtacaggaggccctggaccgggccagtgcaggccgcacggtgctggctgggacacatgaagagctcctgaagaaaggcgggctatacgccgagctcatccggaggcaggccctggatgccccgaggacagcggccccaccgcccaaaaagccagaaggccccaggagccaccagcacaagtcctgagaagggccccctgaggtgtggtcgctgccaagcatcagtgttagggctggggctcagcctgggggagcctactggggactgagcccccaggagggccagcatgtggagagtcgctgcggctgctcctgctcacaataaagccggggccgagcagctggcaggggaggccaatccctccctcccctccccagtcctgccggctgcctccctccca

SEQ ID NO: 2946 - DNA, 1970 bp, Homo sapiens
  source 1..1970: mol_type = unassigned DNA
atagagccctcagtgggatgagggtgaaactgctattgccggcggctcctgttttaccgcgtcagcatgctggtgcatttatttcgggtcgggattcggggtggcccattcccaggcaggctgctaccgcccctccgcttccagacattctcagctgtcagctggccttgggtgcggcactcgtgaatgtacagatccccctgctcctgggccagctggtagaggtcgtggccaagtacacaagggaccacgtagggagtttcatgactgagtcccagaatctcagcacccacctgcttatcctctatggtgtccagggactgctgaccttcgggtacctggtgctgctgtcccacgttggcgagcgcatggctgtggacatgcggagggccctcttcagctccctgctccgacaagacatcaccttctttgacgccaataagacagggcagctggtgagccgcttgacaactgacgtgcaggagtttaagtcatccttcaagcttgtcatctcccaggggctgcgaagctgcacccaggtggcaggctgcctggtgtccctgtccatgctgtcgacacgcctcacgctgctgctgatggtggccacaccagccctgatgggagtgggcaccctgatgggctcaggcctccgaaaattgtctcgccagtgtcaggagcagatcgccagggcaatgggcgtagcagacgaggccctgggcaatgtgcggactgtgcgtgccttcgccatggagcaacgggaagaggagcgctatggggcagagctggaagcctgccgctgccgggcagaggagctgggccgcggcatcgccttgttccaagggctttccaacatcgccttcaactgcatggtcttgggtaccctatttattgggggctcccttgtggccggacagcagctgacagggggagacctcatgtccttcctggtggcctcccagacagtgcaaaggtccatggccaacctctctgtcctgtttgggcaggtggtccgggggctgagtgcaggtgcccgggtctttgagtacatggccctgaacccctgcatcccactgtctgggggctgctgcgtccccaaagagcagctgcgtggctccgttacatttcagaacgtctgcttcagctacccctgccgccccggcttcgaggtgctgaaagacttcaccctgacgctgccccctggcaagatcgtggccctcgtgggccagtctggcggaggaaagaccaccgtggcttccctgctggagcgcttctacgaccccacggcaggcgtggtgatgctggatgggcgggacctgcgcacccttgacccctcctggctccggggccaggttgtcggcttcatcagccaggagcccgtcctgtttgggacgaccatcatggaaaacatccgctttgggaagctggaagcttccgatgaagaggtgtacacagccgcccgggaagcgaatgctcacgagttcatcaccagcttccccgagggctacaacacggtcgtcggtgaacggggcactaccctgtctgggggccagaagcagcgcctggccatcgcccgagcccttatcaagcagcccacggtgctgatactggatgaagctaccagcgcgctggatgcagagtccgagcgggttgtacaggaggccctggaccgggccagtgcaggccgcacggtgctggtaattgcccaccggctcagcactgtccgtggggcccactgcattgtcgtcatggccgatggccgtgtctgggaggctgggacacatgaagagctcctgaagaaaggcgggctatacgccgagctcatccggaggcaggccctggatgccccgaggacagcggccccaccgcccaaaaagccagaaggccccaggagccaccagcacaagtcctgagaagggccccctgaggtgtggtcgctgccaagcatcagtgttagggctggggctcagcct

SEQ ID NO: 2947 - DNA, 3515 bp, Homo sapiens
  source 1..3515: mol_type = unassigned DNA
cgccccgtccatcagcctgtctcaacgcacgccagtctcagctccgaccttgcagcggcgcagcgcgggtgggaggcggggaggagcagcgggaagagcggagcgaggaccgcgtccggcgcagtcttcaatgagcagcgcggaaactgcaccccagacccgagcctgctgcgcgccccctcccagagctcacctggtgccaggtaacaggcctggcctcgccctgtggatgatgatggccttgcccccgtgagctacaacctggccttcagcacccgcccacctccaaccagcaggatgcggctgtggaaggcggtggtggtgactttggccttcatgagtgtggacatctgcgtgaccacggccatctatgtcttcagccacctggaccgcagcctcctggaggacatccgccacttcaacatctttgactcggtgctggatctctgggcagcctgcctgtaccgcagctgcctgctgctgggagccaccattggtgtggccaagaacagtgcgctggggccccggcggctgcgggcctcgtggctggtcatcaccctcgtgtgcctcttcgtgggcatctatgccatggtgaagctgctgctcttctcagaggtgcgcaggcccatccgggacccctggttttgggccctgttcgtgtggacgtacatttcactcggcgcatccttcctgctctggtggctgctgtccaccgtgcggccaggcacccaggccctggagccaggggcggccaccgaggctgagggcttccctgggagcggccggccaccgcccgagcaggcgtctggggccacgctgcagaagctgctctcctacaccaagcccgacgtggccttcctcgtggccgcctccttcttcctcatcgtggcagctctgggagagaccttcctgccctactacacgggccgcgccattgatggcatcgtcatccagaaaagcatggatcagttcagcacggctgtcgtcatcgtgtgcctgctggccattggcagctcatttgccgcaggtattcggggcggcatttttaccctcatatttgccagactgaacattcgccttcgaaactgtctcttccgctcactggtgtcccaggagacaagcttctttgatgagaaccgcacaggggacctcatctcccgcctgacctcggacaccaccatggtcagcgacctggtctcccagaacatcaatgtcttcctgcggaacacagtcaaggtcacgggcgtggtggtcttcatgttcagcctctcatggcagctctccttggtcaccttcatgggcttccccatcatcatgatggtgtccaacatctacggcaagtactacaagaggctctccaaagaggtccagaatgccctggccagagcgagcaacacggcggaggagaccatcagtgccatgaagactgtccggagcttcgccaatgaggaggaggaggcagaggtgtacctgcggaagctgcagcaggtgtacaagctgaacaggaaggaggcagctgcctacatgtactacgtctggggcagcgggctcacactgctggtggtccaggtcagcatcctctactacgggggccaccttgtcatctcaggccagatgaccagcggcaacctcatcgccttcatcatctacgagtttgtcctgggagattgtatggagtccgtgggctccgtctacagtggcctgatgcagggagtgggggctgctgagaaggtgttcgagttcatcgaccggcagccgaccatggtgcacgatggcagcttggcccccgaccacctggagggccgggtggactttgagaatgtgaccttcacctaccgcactcggccccacacccaggtcctgcagaatgtctccttcagcctgtcccccggcaaggtgacggccctggtggggccctcgggcagtgggaagagctcctgtgtcaacatcctggagaacttctaccccctggaggggggccgggtgctgctggacggcaagcccatcagcgcctacgaccacaagtacttgcaccgtgtgatctccctggtgagccaggagcccgtgctgttcgcccgctccatcacggataacatctcctacggcctgcccactgtgcctttcgagatggtggtggaggccgcacagaaggccaatgcccacggcttcatcatggaactccaggacggctacagcacagagacaggggagaagggcgcccagctgtcaggtggccagaagcagcgggtggccatggcccgggctctggtgcggaaccccccagtcctcatcctggatgaagccaccagcgctttggatgccgagagcgagtatctgatccagcaggccatccatggcaacctgcagaagcacacggtactcatcatcgcgcaccggctgagcaccgtggagcacgcgcacctcattgtggtgctggacaagggccgcgtagtgcagcagggcacccaccagcagctgctggcccagggcggcctctacgccaagctggtgcagcggcagatgctggggcttcagcccgccgcagacttcacagctggccacaacgagcctgtagccaacggcagtcacaaggcctgatggggggcccctgcttctcccggtggggcagaggacccggtgcctgcctggcagatgtgcccacggaggcccccagctgccctccgagcccaggcctgcagcactgaaagacgacctgccatgtcccatggatcaccgcttcctgcatcttgcccctggtccctgccccattcccagggcactccttacccctgctgccctgagccaacgccttcacggacctccctagcctcctaagcaaaggtagagctgcctttttaaacctaggtcttaccagggtttttactgtttggtttgaggcaccccagtcaactcctagatttcaaaaacctttttctaattgggagtaatggcgggcactttcaccaagatgttctagaaacttctgagccaggagtgaatggcccttccttagtagcctgggggatgtccagagactaggcctctcccctttacccctccagagaaggggcttccctgtcccggagggagacacggggaacgggattttccgtctctccctcttgccagctctgtgagtctggccagggcgggtagggagcgtggagggcatctgtctgccatcgcccgctgccaatctaagccagtctcactgtgaaccacacgaaacctcaactgggggagtgaggggctggccaggtctggaggggcctcaggggtgcccccagcccggcacccagcgctttcgcccctcgtccacccacccctggctggcagcctccctccccacacccgcccctgtgctctgctgtctggaggccacgtggatgttcatgagatgcattctcttctgtctttggtggatgggatggtggcaaagcccaggatctggctttgccagaggttgcaacatgttgagagaacccggtcaataaagtgtactacctcttacccct

SEQ ID NO: 2948 - DNA, 3399 bp, Homo sapiens
  source 1..3399: mol_type = unassigned DNA
gtcactgaggccccgccccgtccatcagcctgtctcaacgcacgccagtctcagctccgaccttgcagcggcgcagcgcgggtgggaggcggggaggagcagcgggaagagcggagcgaggaccgcgtccggcgcagtcttcaatgagcagcgcggaaactgcaccccagacccgagcctgctgcgcgccccctcccagagctcacctggtgccaggtaacaggcctggcctcgccctgtggatgatgatggccttgcccccgtgagctacaacctggccttcagcacccgcccacctccaaccagcaggatgcggctgtggaaggcggtggtggtgactttggccttcatgagtgtggacatctgcgtgaccacggccatctatgtcttcagccacctggaccgcagcctcctggaggacatccgccacttcaacatctttgactcggtgctggatctctgggcagcctgcctgtaccgcagctgcctgctgctgggagccaccattggtgtggccaagaacagtgcgctggggccccggcggctgcgggcctcgtggctggtcatcaccctcgtgtgcctcttcgtgggcatctatgccatggtgaagctgctgctcttctcagaggtgcgcaggcccatccgggacccctggttttgggccctgttcgtgtggacgtacatttcactcggcgcatccttcctgctctggtggctgctgtccaccgtgcggccaggcacccaggccctggagccaggggcggccaccgaggctgagggcttccctgggagcggccggccaccgcccgagcaggcgtctggggccacgctgcagaagctgctctcctacaccaagcccgacgtggccttcctcgtggccgcctccttcttcctcatcgtggcagctctgggagagaccttcctgccctactacacgggccgcgccattgatggcatcgtcatccagaaaagcatggatcagttcagcacggctgtcgtcatcgtgtgcctgctggccattggcagctcatttgccgcaggtattcggggcggcatttttaccctcatatttgccagactgaacattcgccttcgaaactgtctcttccgctcactggtgtcccaggagacaagcttctttgatgagaaccgcacaggggacctcatctcccgcctgacctcggacaccaccatggtcagcgacctggtctcccagaacatcaatgtcttcctgcggaacacagtcaaggtcacgggcgtggtggtcttcatgttcagcctctcatggcagctctccttggtcaccttcatgggcttccccatcatcatgatggtgtccaacatctacggcaagtactacaagaggctctccaaagaggtccagaatgccctggccagagcgagcaacacggcggaggagaccatcagtgccatgaagactgtccggagcttcgccaatgaggaggaggaggcagaggtgtacctgcggaagctgcagcaggtgtacaagctgaacaggaaggaggcagctgcctacatgtactacgtctggggcagcgggtccgtgggctccgtctacagtggcctgatgcagggagtgggggctgctgagaaggtgttcgagttcatcgaccggcagccgaccatggtgcacgatggcagcttggcccccgaccacctggagggccgggtggactttgagaatgtgaccttcacctaccgcactcggccccacacccaggtcctgcagaatgtctccttcagcctgtcccccggcaaggtgacggccctggtggggccctcgggcagtgggaagagctcctgtgtcaacatcctggagaacttctaccccctggaggggggccgggtgctgctggacggcaagcccatcagcgcctacgaccacaagtacttgcaccgtgtgatctccctggtgagccaggagcccgtgctgttcgcccgctccatcacggataacatctcctacggcctgcccactgtgcctttcgagatggtggtggaggccgcacagaaggccaatgcccacggcttcatcatggaactccaggacggctacagcacagagacaggggagaagggcgcccagctgtcaggtggccagaagcagcgggtggccatggcccgggctctggtgcggaaccccccagtcctcatcctggatgaagccaccagcgctttggatgccgagagcgagtatctgatccagcaggccatccatggcaacctgcagaagcacacggtactcatcatcgcgcaccggctgagcaccgtggagcacgcgcacctcattgtggtgctggacaagggccgcgtagtgcagcagggcacccaccagcagctgctggcccagggcggcctctacgccaagctggtgcagcggcagatgctggggcttcagcccgccgcagacttcacagctggccacaacgagcctgtagccaacggcagtcacaaggcctgatggggggcccctgcttctcccggtggggcagaggacccggtgcctgcctggcagatgtgcccacggaggcccccagctgccctccgagcccaggcctgcagcactgaaagacgacctgccatgtcccatggatcaccgcttcctgcatcttgcccctggtccctgccccattcccagggcactccttacccctgctgccctgagccaacgccttcacggacctccctagcctcctaagcaaaggtagagctgcctttttaaacctaggtcttaccagggtttttactgtttggtttgaggcaccccagtcaactcctagatttcaaaaacctttttctaattgggagtaatggcgggcactttcaccaagatgttctagaaacttctgagccaggagtgaatggcccttccttagtagcctgggggatgtccagagactaggcctctcccctttacccctccagagaaggggcttccctgtcccggagggagacacggggaacgggattttccgtctctccctcttgccagctctgtgagtctggccagggcgggtagggagcgtggagggcatctgtctgccatcgcccgctgccaatctaagccagtctcactgtgaaccacacgaaacctcaactgggggagtgaggggctggccaggtctggaggggcctcaggggtgcccccagcccggcacccagcgctttcgcccctcgtccacccacccctggctggcagcctccctccccacacccgcccctgtgctctgctgtctggaggccacgtggatgttcatgagatgcattctcttctgtctttggtggatgggatggtggcaaagcccaggatctggctttgccagaggttgcaacatgttgagagaacccggtcaataaagtgtactacctcttacccct

SEQ ID NO: 2949 - DNA, 3791 bp, Homo sapiens
  source 1..3791: mol_type = unassigned DNA
cacgcccccaaccgcgggaggcgcggaaccagcggccaaggggccgctctaagttcccaagggcggaaaaggacgaagacgcacctcgccaggaaacggtctgcggagaaagatgctcctgggccgggttgggaccggcggcctcctcgttccgcctcccagttttcccactacgaggcagggactaatggctccactttacagacagctgaactgggtcgtgccttcacaggacggggagaggaagggactcggagccccaaggcctttgacttaaacgccgacccaccccccgccgtctgcccggagctcgtggagaaccagccgagctgaggacagtttaaagagctcggaggtccgactagttcccgctggtgcttcaatcatccagccctgtacgtttcagtttggatttagcatctaccccgggtccctgcctggcgcttccggtccctccgccacagtctgttggattacctcagattgccccagcctggcctcgccctgtggatgatgatggccttgcccccgtgagctacaacctggccttcagcacccgcccacctccaaccagcaggatgcggctgtggaaggcggtggtggtgactttggccttcatgagtgtggacatctgcgtgaccacggccatctatgtcttcagccacctggaccgcagcctcctggaggacatccgccacttcaacatctttgactcggtgctggatctctgggcagcctgcctgtaccgcagctgcctgctgctgggagccaccattggtgtggccaagaacagtgcgctggggccccggcggctgcgggcctcgtggctggtcatcaccctcgtgtgcctcttcgtgggcatctatgccatggtgaagctgctgctcttctcagaggtgcgcaggcccatccgggacccctggttttgggccctgttcgtgtggacgtacatttcactcggcgcatccttcctgctctggtggctgctgtccaccgtgcggccaggcacccaggccctggagccaggggcggccaccgaggctgagggcttccctgggagcggccggccaccgcccgagcaggcgtctggggccacgctgcagaagctgctctcctacaccaagcccgacgtggccttcctcgtggccgcctccttcttcctcatcgtggcagctctgggagagaccttcctgccctactacacgggccgcgccattgatggcatcgtcatccagaaaagcatggatcagttcagcacggctgtcgtcatcgtgtgcctgctggccattggcagctcatttgccgcaggtattcggggcggcatttttaccctcatatttgccagactgaacattcgccttcgaaactgtctcttccgctcactggtgtcccaggagacaagcttctttgatgagaaccgcacaggggacctcatctcccgcctgacctcggacaccaccatggtcagcgacctggtctcccagaacatcaatgtcttcctgcggaacacagtcaaggtcacgggcgtggtggtcttcatgttcagcctctcatggcagctctccttggtcaccttcatgggcttccccatcatcatgatggtgtccaacatctacggcaagtactacaagaggctctccaaagaggtccagaatgccctggccagagcgagcaacacggcggaggagaccatcagtgccatgaagactgtccggagcttcgccaatgaggaggaggaggcagaggtgtacctgcggaagctgcagcaggtgtacaagctgaacaggaaggaggcagctgcctacatgtactacgtctggggcagcgggctcacactgctggtggtccaggtcagcatcctctactacgggggccaccttgtcatctcaggccagatgaccagcggcaacctcatcgccttcatcatctacgagtttgtcctgggagattgtatggagtccgtgggctccgtctacagtggcctgatgcagggagtgggggctgctgagaaggtgttcgagttcatcgaccggcagccgaccatggtgcacgatggcagcttggcccccgaccacctggagggccgggtggactttgagaatgtgaccttcacctaccgcactcggccccacacccaggtcctgcagaatgtctccttcagcctgtcccccggcaaggtgacggccctggtggggccctcgggcagtgggaagagctcctgtgtcaacatcctggagaacttctaccccctggaggggggccgggtgctgctggacggcaagcccatcagcgcctacgaccacaagtacttgcaccgtgtgatctccctggtgagccaggagcccgtgctgttcgcccgctccatcacggataacatctcctacggcctgcccactgtgcctttcgagatggtggtggaggccgcacagaaggccaatgcccacggcttcatcatggaactccaggacggctacagcacagagacaggggagaagggcgcccagctgtcaggtggccagaagcagcgggtggccatggcccgggctctggtgcggaaccccccagtcctcatcctggatgaagccaccagcgctttggatgccgagagcgagtatctgatccagcaggccatccatggcaacctgcagaagcacacggtactcatcatcgcgcaccggctgagcaccgtggagcacgcgcacctcattgtggtgctggacaagggccgcgtagtgcagcagggcacccaccagcagctgctggcccagggcggcctctacgccaagctggtgcagcggcagatgctggggcttcagcccgccgcagacttcacagctggccacaacgagcctgtagccaacggcagtcacaaggcctgatggggggcccctgcttctcccggtggggcagaggacccggtgcctgcctggcagatgtgcccacggaggcccccagctgccctccgagcccaggcctgcagcactgaaagacgacctgccatgtcccatggatcaccgcttcctgcatcttgcccctggtccctgccccattcccagggcactccttacccctgctgccctgagccaacgccttcacggacctccctagcctcctaagcaaaggtagagctgcctttttaaacctaggtcttaccagggtttttactgtttggtttgaggcaccccagtcaactcctagatttcaaaaacctttttctaattgggagtaatggcgggcactttcaccaagatgttctagaaacttctgagccaggagtgaatggcccttccttagtagcctgggggatgtccagagactaggcctctcccctttacccctccagagaaggggcttccctgtcccggagggagacacggggaacgggattttccgtctctccctcttgccagctctgtgagtctggccagggcgggtagggagcgtggagggcatctgtctgccatcgcccgctgccaatctaagccagtctcactgtgaaccacacgaaacctcaactgggggagtgaggggctggccaggtctggaggggcctcaggggtgcccccagcccggcacccagcgctttcgcccctcgtccacccacccctggctggcagcctccctccccacacccgcccctgtgctctgctgtctggaggccacgtggatgttcatgagatgcattctcttctgtctttggtggatgggatggtggcaaagcccaggatctggctttgccagaggttgcaacatgttgagagaacccggtcaataaagtgtactacctctta

SEQ ID NO: 2950 - DNA, 3799 bp, Homo sapiens
  source 1..3799: mol_type = unassigned DNA
cacgcccccaaccgcgggaggcgcggaaccagcggccaaggggccgctctaagttcccaagggcggaaaaggacgaagacgcacctcgccaggaaacggtctgcggagaaagatgctcctgggccgggttgggaccggcggcctcctcgttccgcctcccagttttcccactacgaggcagggactaatggctccactttacagacagctgaactgggtcgtgccttcacaggacggggagaggaagggactcggagccccaaggcctttgacttaaacgccgacccaccccccgccgtctgcccggagctcgtggagaaccagccgagctgaggacagtttaaagagctcggaggtccgactagttcccgctggtgcttcaatcatccagccctgtacgtttcagtttggatttagcatctaccccgggtccctgcctggcgcttccggtccctccgccacagtctgttggattacctcagattgccccagcctggcctcgccctgtggatgatgatggccttgcccccgtgagctacaacctggccttcagcacccgcccacctccaaccagcaggatgcggctgtggaaggcggtggtggtgactttggccttcatgagtgtggacatctgcgtgaccacggccatctatgtcttcagccacctggaccgcagcctcctggaggacatccgccacttcaacatctttgactcggtgctggatctctgggcagcctgcctgtaccgcagctgcctgctgctgggagccaccattggtgtggccaagaacagtgcgctggggccccggcggctgcgggcctcgtggctggtcatcaccctcgtgtgcctcttcgtgggcatctatgccatggtgaagctgctgctcttctcagaggtgcgcaggcccatccgggacccctggttttgggccctgttcgtgtggacgtacatttcactcggcgcatccttcctgctctggtggctgctgtccaccgtgcggccaggcacccaggccctggagccaggggcggccaccgaggctgagggcttccctgggagcggccggccaccgcccgagcaggcgtctggggccacgctgcagaagctgctctcctacaccaagcccgacgtggccttcctcgtggccgcctccttcttcctcatcgtggcagctctgggagagaccttcctgccctactacacgggccgcgccattgatggcatcgtcatccagaaaagcatggatcagttcagcacggctgtcgtcatcgtgtgcctgctggccattggcagctcatttgccgcaggtattcggggcggcatttttaccctcatatttgccagactgaacattcgccttcgaaactgtctcttccgctcactggtgtcccaggagacaagcttctttgatgagaaccgcacaggggacctcatctcccgcctgacctcggacaccaccatggtcagcgacctggtctcccagaacatcaatgtcttcctgcggaacacagtcaaggtcacgggcgtggtggtcttcatgttcagcctctcatggcagctctccttggtcaccttcatgggcttccccatcatcatgatggtgtccaacatctacggcaagtactacaagaggctctccaaagaggtccagaatgccctggccagagcgagcaacacggcggaggagaccatcagtgccatgaagactgtccggagcttcgccaatgaggaggaggaggcagaggtgtacctgcggaagctgcagcaggtgtacaagctgaacaggaaggaggcagctgcctacatgtactacgtctggggcagcgggctcacactgctggtggtccaggtcagcatcctctactacgggggccaccttgtcatctcaggccagatgaccagcggcaacctcatcgccttcatcatctacgagtttgtcctgggagattgtatggagtccgtgggctccgtctacagtggcctgatgcagggagtgggggctgctgagaaggtgttcgagttcatcgaccggcagccgaccatggtgcacgatggcagcttggcccccgaccacctggagggccgggtggactttgagaatgtgaccttcacctaccgcactcggccccacacccaggtcctgcagaatgtctccttcagcctgtcccccggcaaggtgacggccctggtggggccctcgggcagtgggaagagctcctgtgtcaacatcctggagaacttctaccccctggaggggggccgggtgctgctggacggcaagcccatcagcgcctacgaccacaagtacttgcaccgtgtgatctccctggtgagccaggagcccgtgctgttcgcccgctccatcacggataacatctcctacggcctgcccactgtgcctttcgagatggtggtggaggccgcacagaaggccaatgcccacggcttcatcatggaactccaggacggctacagcacagagacaggggagaagggcgcccagctgtcaggtggccagaagcagcgggtggccatggcccgggctctggtgcggaaccccccagtcctcatcctggatgaagccaccagcgctttggatgccgagagcgagtatctgtccccgcagatccagcaggccatccatggcaacctgcagaagcacacggtactcatcatcgcgcaccggctgagcaccgtggagcacgcgcacctcattgtggtgctggacaagggccgcgtagtgcagcagggcacccaccagcagctgctggcccagggcggcctctacgccaagctggtgcagcggcagatgctggggcttcagcccgccgcagacttcacagctggccacaacgagcctgtagccaacggcagtcacaaggcctgatggggggcccctgcttctcccggtggggcagaggacccggtgcctgcctggcagatgtgcccacggaggcccccagctgccctccgagcccaggcctgcagcactgaaagacgacctgccatgtcccatggatcaccgcttcctgcatcttgcccctggtccctgccccattcccagggcactccttacccctgctgccctgagccaacgccttcacggacctccctagcctcctaagcaaaggtagagctgcctttttaaacctaggtcttaccagggtttttactgtttggtttgaggcaccccagtcaactcctagatttcaaaaacctttttctaattgggagtaatggcgggcactttcaccaagatgttctagaaacttctgagccaggagtgaatggcccttccttagtagcctgggggatgtccagagactaggcctctcccctttacccctccagagaaggggcttccctgtcccggagggagacacggggaacgggattttccgtctctccctcttgccagctctgtgagtctggccagggcgggtagggagcgtggagggcatctgtctgccatcgcccgctgccaatctaagccagtctcactgtgaaccacacgaaacctcaactgggggagtgaggggctggccaggtctggaggggcctcaggggtgcccccagcccggcacccagcgctttcgcccctcgtccacccacccctggctggcagcctccctccccacacccgcccctgtgctctgctgtctggaggccacgtggatgttcatgagatgcattctcttctgtctttggtggatgggatggtggcaaagcccaggatctggctttgccagaggttgcaacatgttgagagaacccggtcaataaagtgtactacctctt

SEQ ID NO: 2951 - DNA, 3330 bp, Homo sapiens
  source 1..3330: mol_type = unassigned DNA
gccccgccccgtccatcagcctgtctcaacgcacgccagtctcagctccgaccttgcagcggcgcagcgcgggtgggaggcggggaggagcagcgggaagagcggagcgaggaccgcgtccggcgcagtcttcaatgagcagcgcggaaactgcaccccagacccgagcctgctgcgcgccccctcccagagctcacctggtgccaggtaacaggcctggcctcgccctgtggatgatgatggccttgcccccgtgagctacaacctggccttcagcacccgcccacctccaaccagcaggatgcggctgtggaaggcggtggtggtgactttggccttcatgagtgtggacatctgcgtgaccacggccatctatgtcttcagccacctggaccgcagcctcctggaggacatccgccacttcaacatctttgactcggtgctggatctctgggcagcctgcctgtaccgcagctgcctgctgctgggagccaccattggtgtggccaagaacagtgcgctggggccccggcggctgcgggcctcgtggctggtcatcaccctcgtgtgcctcttcgtgggcatctatgccatggtgaagctgctgctcttctcagaggtgcgcaggcccatccgggacccctggttttgggccctgttcgtgtggacgtacatttcactcggcgcatccttcctgctctggtggctgctgtccaccgtgcggccaggcacccaggccctggagccaggggcggccaccgaggctgagggcttccctgggagcggccggccaccgcccgagcaggcgtctggggccacgctgcagaagctgctctcctacaccaagcccgacgtggccttcctcgtggccgcctccttcttcctcatcgtggcagctctgggagagaccttcctgccctactacacgggccgcgccattgatggcatcgtcatccagaaaagcatggatcagttcagcacggctgtcgtcatcgtgtgcctgctggccattggcagctcatttgccgcaggtattcggggcggcatttttaccctcatatttgccagactgaacattcgccttcgaaactgtctcttccgctcactggtgtcccaggagacaagcttctttgatgagaaccgcacaggggacctcatctcccgcctgacctcggacaccaccatggtcagcgacctggtctcccagaacatcaatgtcttcctgcggaacacagtcaaggtcacgggcgtggtggtcttcatgttcagcctctcatggcagctctccttggtcaccttcatgggcttccccatcatcatgatggtgtccaacatctacggcaagtactacaagaggctctccaaagaggtccagaatgccctggccagagcgagcaacacggcggaggagaccatcagtgccatgaagactgtccggagcttcgccaatgaggaggaggaggcagaggtgtacctgcggaagctgcagcaggtgtacaagctgaacaggaaggaggcagctgcctacatgtactacgtctggggcagcgggctcacactgctggtggtccaggtcagcatcctctactacgggggccaccttgtcatctcaggccagatgaccagcggcaacctcatcgccttcatcatctacgagtttgtcctgggagattgtatggagaatgtctccttcagcctgtcccccggcaaggtgacggccctggtggggccctcgggcagtgggaagagctcctgtgtcaacatcctggagaacttctaccccctggaggggggccgggtgctgctggacggcaagcccatcagcgcctacgaccacaagtacttgcaccgtgtgatctccctggtgagccaggagcccgtgctgttcgcccgctccatcacggataacatctcctacggcctgcccactgtgcctttcgagatggtggtggaggccgcacagaaggccaatgcccacggcttcatcatggaactccaggacggctacagcacagagacaggggagaagggcgcccagctgtcaggtggccagaagcagcgggtggccatggcccgggctctggtgcggaaccccccagtcctcatcctggatgaagccaccagcgctttggatgccgagagcgagtatctgatccagcaggccatccatggcaacctgcagaagcacacggtactcatcatcgcgcaccggctgagcaccgtggagcacgcgcacctcattgtggtgctggacaagggccgcgtagtgcagcagggcacccaccagcagctgctggcccagggcggcctctacgccaagctggtgcagcggcagatgctggggcttcagcccgccgcagacttcacagctggccacaacgagcctgtagccaacggcagtcacaaggcctgatggggggcccctgcttctcccggtggggcagaggacccggtgcctgcctggcagatgtgcccacggaggcccccagctgccctccgagcccaggcctgcagcactgaaagacgacctgccatgtcccatggatcaccgcttcctgcatcttgcccctggtccctgccccattcccagggcactccttacccctgctgccctgagccaacgccttcacggacctccctagcctcctaagcaaaggtagagctgcctttttaaacctaggtcttaccagggtttttactgtttggtttgaggcaccccagtcaactcctagatttcaaaaacctttttctaattgggagtaatggcgggcactttcaccaagatgttctagaaacttctgagccaggagtgaatggcccttccttagtagcctgggggatgtccagagactaggcctctcccctttacccctccagagaaggggcttccctgtcccggagggagacacggggaacgggattttccgtctctccctcttgccagctctgtgagtctggccagggcgggtagggagcgtggagggcatctgtctgccatcgcccgctgccaatctaagccagtctcactgtgaaccacacgaaacctcaactgggggagtgaggggctggccaggtctggaggggcctcaggggtgcccccagcccggcacccagcgctttcgcccctcgtccacccacccctggctggcagcctccctccccacacccgcccctgtgctctgctgtctggaggccacgtggatgttcatgagatgcattctcttctgtctttggtggatgggatggtggcaaagcccaggatctggctttgccagaggttgcaacatgttgagagaacccggtcaataaagtgtactacctcttacccct

SEQ ID NO: 2952 - DNA, 6051 bp, Homo sapiens
  source 1..6051: mol_type = unassigned DNA
gaagaggaggaggagctggatcttgttctcctccgggccttctgcttgcttctctctgtgatgcagggagaaggtgaggctggaaggccaggaggggaagaggtaaaccttcgtcccctgctctggcctggggcaggcacagaccggctacagggtgagcgcttcctgaggggctttccagaacagagatggagcttcccagaggagccccttcctggctcctgcggcgcctggccctcacatctcaggcccggctgcacagaggcatgactgagcgtccccgaccactgctcgcccgacttccccgggtagtaactgcgcctcctctccccgatgcctgtggtcctcaccctccgccccaggggccgtgctggccttgcgaccttgggatgtggaggccgagcagttcctcgaggtgtctttcctgctcttcttctttctcttttccgacccccgtccccgggaccggctgcgactcctcgagcgcttgcgggagccgacgtgagccatggcgccgcgggctggcgacgaagaagacgcgcttgagccgaagcccccaaggccggccgcgggcgggctccaagggtggctctagcggggccggggcctggcgacgcccagtacccgtcaccgtcccgggaaaatgagcgaccctcacccacccccagcgctggggaccccggttttctccgccgactccagtccccgcagcggtgcctgttaagggcccgccccgtgcccggaggccccacgcctgcgcacccggctccaaacccctgggaactggccgccgtccgccgcgagtggcgtctggggcgctttcccgcgctctcctaccctccagccccgcgcccttcgcggcctcgccgcctcaagggggcccccggggctgctccgttcccacctcgaccgccctgcgggccggacagcccgccccgcgccttctcgagaggaagcggcggcgaggaggcttccggccggggcgctgcgcgggaggctggccggctgggaagcgcggcgccgctgcctttcgttctgacgccccaggttccgtcccgggcgcgcccacctcccgcagaggcaagcaggggcgccggccctcgagctccgcagcccctcacgcctgtgtctgccgaagctgcgcccacttccaaggctgccctctcggcgcacgcccgcagcacccacgcccccggtgccctgggaagaaggcgaccctcgcgcgcgccgccctcctccccggctggtcctgccctctccatacgactgcgagctccagactgaggcgccctggtctttccgacgcgcccacccagtgactcagaggtcgcaaactcgtgtccgtaggggccagaaagatcttggcagtgagcgcgggcatggaccccaggcccatccggaaggaagccaggattctgctccagctgatacgtgcaacgtggcatggggctggtgccccaccttcccagggagaccaaactcaagactgcaatatggaagccccctgagtttcaaatgtgtaacccaaagcgtggctgtgcgcttcatccaatctcgggcccccaagttgcaactcttccacaatgacagccgcaaacacaaagggatcttgcaaagcactttatatacgtcagcgcatttgactcccaaaacagctctaggaggtaggtgctaaatgaggaaacgaaggcaccaaaaggtgaaggctcacctaaagccacacagctggaagtggcagaagcagaatgggaacccgggcagcctggttcctggccctgccattcacccctctgccatctagaagatgctactggtggcccacccgagtccactggggggtgatgcctgctgctgagggttcacatctgtgctctctggaggcttcccttggctactggaaggcaccctgccctggagataagtgtctgggaagttattcactcctctctggccccctcatccaggagccagtaaccggtggtgtgggcacactgtggtactgtgggctctgcctggagctctccgtggggccagctgaggctggacgtcctctgaagccacttccttgcccagctgctccctcccctcccctgcttccctgactccctcgctgaagccccattccagaccctgcttctgacaaacctgaactaaggcagcatctttgcccatagaatgacccagaagctggcacaccgttgagccaagaagtgcagtaggctgcggggattttatttctgcccccagaccaaggcaacggagccctcacctgcctgccacccccacactgggcccaagcaagctcaggtgagcgcacatacatccaccgtggcgggctcctctcgggtgaagccatcaccgaagccctcatcgtccaccaggtcgggctcacggcagcacatgggacagaggctgttgcgcacagcagaggctcggagccagacgacaaggttccaacgctcaccagtgcccaagggccgggctccatgcagctggccgccacggtggaggacaccctggcccaccacgtgctccacctccaggggctccgtcagggctgtgggtgcctgcagatggcacgactcaggcctgggcactcacagctgccccaggccctgccgcatgggtcacacactcacctggaagaggcccccaaaatacagggcgccccctgtgaagaccttgcccaaggccacattgagggtgagctcggcattatcatagtggcagcccagctccaggtcctggcccggcctggcctcgccctgtggatgatgatggccttgcccccgtgagctacaacctggccttcagcacccgcccacctccaaccagcaggatgcggctgtggaaggcggtggtggtgactttggccttcatgagtgtggacatctgcgtgaccacggccatctatgtcttcagccacctggaccgcagcctcctggaggacatccgccacttcaacatctttgactcggtgctggatctctgggcagcctgcctgtaccgcagctgcctgctgctgggagccaccattggtgtggccaagaacagtgcgctggggccccggcggctgcgggcctcgtggctggtcatcaccctcgtgtgcctcttcgtgggcatctatgccatggtgaagctgctgctcttctcagaggtgcgcaggcccatccgggacccctggttttgggccctgttcgtgtggacgtacatttcactcggcgcatccttcctgctctggtggctgctgtccaccgtgcggccaggcacccaggccctggagccaggggcggccaccgaggctgagggcttccctgggagcggccggccaccgcccgagcaggcgtctggggccacgctgcagaagctgctctcctacaccaagcccgacgtggccttcctcgtggccgcctccttcttcctcatcgtggcagctctgggagagaccttcctgccctactacacgggccgcgccattgatggcatcgtcatccagaaaagcatggatcagttcagcacggctgtcgtcatcgtgtgcctgctggccattggcagctcatttgccgcaggtattcggggcggcatttttaccctcatatttgccagactgaacattcgccttcgaaactgtctcttccgctcactggtgtcccaggagacaagcttctttgatgagaaccgcacaggggacctcatctcccgcctgacctcggacaccaccatggtcagcgacctggtctcccagaacatcaatgtcttcctgcggaacacagtcaaggtcacgggcgtggtggtcttcatgttcagcctctcatggcagctctccttggtcaccttcatgggcttccccatcatcatgatggtgtccaacatctacggcaagtactacaagaggctctccaaagaggtccagaatgccctggccagagcgagcaacacggcggaggagaccatcagtgccatgaagactgtccggagcttcgccaatgaggaggaggaggcagaggtgtacctgcggaagctgcagcaggtgtacaagctgaacaggaaggaggcagctgcctacatgtactacgtctggggcagcgggctcacactgctggtggtccaggtcagcatcctctactacgggggccaccttgtcatctcaggccagatgaccagcggcaacctcatcgccttcatcatctacgagtttgtcctgggagattgtatggagtccgtgggctccgtctacagtggcctgatgcagggagtgggggctgctgagaaggtgttcgagttcatcgaccggcagccgaccatggtgcacgatggcagcttggcccccgaccacctggagggccgggtggactttgagaatgtgaccttcacctaccgcactcggccccacacccaggtcctgcagaatgtctccttcagcctgtcccccggcaaggtgacggccctggtggggccctcgggcagtgggaagagctcctgtgtcaacatcctggagaacttctaccccctggaggggggccgggtgctgctggacggcaagcccatcagcgcctacgaccacaagtacttgcaccgtgtgatctccctggtgagccaggagcccgtgctgttcgcccgctccatcacggataacatctcctacggcctgcccactgtgcctttcgagatggtggtggaggccgcacagaaggccaatgcccacggcttcatcatggaactccaggacggctacagcacagagacaggggagaagggcgcccagctgtcaggtggccagaagcagcgggtggccatggcccgggctctggtgcggaaccccccagtcctcatcctggatgaagccaccagcgctttggatgccgagagcgagtatctgatccagcaggccatccatggcaacctgcagaagcacacggtactcatcatcgcgcaccggctgagcaccgtggagcacgcgcacctcattgtggtgctggacaagggccgcgtagtgcagcagggcacccaccagcagctgctggcccagggcggcctctacgccaagctggtgcagcggcagatgctggggcttcagcccgccgcagacttcacagctggccacaacgagcctgtagccaacggcagtcacaaggcctgatggggggcccctgcttctcccggtggggcagaggacccggtgcctgcctggcagatgtgcccacggaggcccccagctgccctccgagcccaggcctgcagcactgaaagacgacctgccatgtcccatggatcaccgcttcctgcatcttgcccctggtccctgccccattcccagggcactccttacccctgctgccctgagccaacgccttcacggacctccctagcctcctaagcaaaggtagagctgcctttttaaacctaggtcttaccagggtttttactgtttggtttgaggcaccccagtcaactcctagatttcaaaaacctttttctaattgggagtaatggcgggcactttcaccaagatgttctagaaacttctgagccaggagtgaatggcccttccttagtagcctgggggatgtccagagactaggcctctcccctttacccctccagagaaggggcttccctgtcccggagggagacacggggaacgggattttccgtctctccctcttgccagctctgtgagtctggccagggcgggtagggagcgtggagggcatctgtctgccatcgcccgctgccaatctaagccagtctcactgtgaaccacacgaaacctcaactgggggagtgaggggctggccaggtctggaggggcctcaggggtgcccccagcccggcacccagcgctttcgcccctcgtccacccacccctggctggcagcctccctccccacacccgcccctgtgctctgctgtctggaggccacgtggatgttcatgagatgcattctcttctgtctttggtggatgggatggtggcaaagcccaggatctggctttgccagaggttgcaacatgttgagagaacccggtcaataaagtgtactacctctt

SEQ ID NO: 2953 - DNA, 5088 bp, Homo sapiens
  source 1..5088: mol_type = unassigned DNA
ttctaatgatcccatcaccaaagtagcaaacgtagtacccaggattttttttttcctagttagtcttcatgttaagtacaatcttacctcaaaattgttaatgtctgtggtttaaaaaaaaacatgaatcagaaatggtgtgggtagtttagaaaatgagttaggttcaggtggccggttagctcagttggtcagaaaatgagttaggttcatctgggaagacttcctgggagaaaagaccctgggttctgaggtaaagtggagtagggataagatgtgcaaggcaggaagggagttgattccttaggtaagtgaattattggaggtgaggggtatgtctggctcctgagtcagccacgatgtgcctccttgtcttcccccttgtccccaggagtccagattacatcctaccctgcagtcctggatggcgcctccgacttgcagcttccttcctgctttccgtcttcccgctgctagaccttcttccagttgctttgccaccaggggcaggcccaggacccatagggctagaggtgttggcagggtgcgtggcagctgtggcctggatcagccacagcctggccctgtgggtgttggcacattcccctcatggccactcccggggtcccttggccttggccctggtagccttgctgccagctccagccctagtgctgaccgtgttgtggcattgccagcgaggcacacttctgcccccacttctcccagggcccatggcccgcctatgcttgctcatcctgcagctggctgcactcttggcctatgcactgggatgggcagctcctgggggaccacgagaaccctgggctcaggagcccctcctgcccgaggatcaagaacctgaggtggctgaagatggggagagttggctgtcacgcttttcctatgcctggctggcacccttgctggcccgtggggcctgtggagagctccggcagcctcaggacatttgccgcctcccccacagactgcagccaacctacctggctcgtgtcttccaggcacactggcaggagggggcacggctgtggagggccttgtatggggcctttggacggtgctatctggcacttggactgctgaagctggtggggaccatgttgggattctcagggcccctgttgctctccctactggtgggcttcctggaagaggggcaggagccactaagccacggcctgctctatgctctggggctagccggtggggctgtgctgggtgctgtgctgcagaatcagtatgggtatgaggtatataaggtaacacttcaggcacggggggctgtgctgaacatcctgtactgcaaggctttacagctggggcccagccgccctcctactggggaggccctgaacctactaggcactgactctgaacggctgcttaactttgctgggagcttccatgaagcctggggcctgcccctgcaactggccatcaccctctacctgctgtaccagcaggtaggcgtggccttcgtgggtggtctcatcttggcactgctgctggtacccgtcaacaaagtgattgccacccgcatcatggccagcaaccaggaaatgctacagcacaaggatgcgcgggttaagcttgtgacagagctgctgagtggcattcgggtcatcaagttctgcgggtgggagcaggcactgggagcccgagtagaggcctgccgggctcgagagctggggcgactccgggtcatcaaatacctggatgcggcctgtgtatacctgtgggctgccctaccggttgtcatctccatcgttatcttcatcacctatgtcctcatggggcaccagctcactgccaccaaggtgttcacggccctggcactggtgcgaatgctcattcttcctctcaacaacttcccttgggtgatcaatggtctcctggaggccaaagtgtccttggaccggatccagcttttcctcgaccttccaaaccacaacccccaggcctactacagcccagattgtggtagattaggagcccaaatcaagtggcttctctgttcagatccccctgcagagccatctacagtattggagctgcatggagccttgttctcctgggacccagttggaaccagcctggagaccttcatcagtcatctcgaagtgaaaaagggtatgctggtgggcatcgtggggaaggtcggctgtgggaagagctccctgctggctgccatcgctggagagctccacaggctgcgtgggcatgtggcagtgcgggggctgtccaagggctttggcctggccacccaggaaccctggatccagtttgccaccatccgagacaacatcctctttgggaagacatttgatgcacagctgtacaaggaggtgctagaagcctgcgccctcaatgatgacctcagtatcctgcctgctggagaccagacagaggtgggggagaagggtgtcacccttagcggaggacagcgtgcccggattgcccttgctcgtgctgtctaccaggaaaaggagctctatctcctcgatgaccctctggccgctgtggatgcagatgtggccaaccacctgctgcacaggtgcatcctgggcatgctgagctacaccacacggctgctctgcacccaccgcactgagtacctggagagggctgacgcggtgctgctgatggaggccgggcgcctcatccgggctggacctccctctgagattctgccactggtacaagctgtccccaaagcctgggctgagaatggacaagagtctgactcagccacagcccagtcagtacagaacccagagaaaacaaaggaggggctggaggaggagcagagcacatctggtcgcctgctgcaggaagaaagcaagaaggagggcgccgtggccttgcacgtgtaccaagcttactggaaggccgtgggccagggcttggccttagccatcctcttctctctgcttctcatgcaagccacgcggaacgctgctgactggtggctctcccactggatctctcagctgaaggctgagaatagctcccaggaggcgcaaccctccaccagcccagcttctatggggctcttctctccgcagctgctcctcttttcccctggaaacctctacatcccagtgttcccactgcccaaagctgcccccaatggctcctcagacatccgtttctacctcaccgtgtatgcgaccattgctggtgtaaattccctctgcacccttctccgggcagtgctctttgcagcaggcacccttcaagcagctgccactctgcatcgccgcctgctgcatcgagtccttatggcaccagtgactttcttcaatgccacacccacgggccggatcctaaaccgcttctcctctgatgtggcctgtgcggatgacagcctgcccttcatcctcaacatcctcctggccaacgcggcaggcctgctggggctcctggccgtgctgggctctggcctgccctggctgctgctcctgctgccgcctttgagcatcatgtactatcacgtgcagcgccactacagggcctcctcacgggagctgcggcgcctgggcagcctcaccctgtctccactgtatagccatctggccgataccttggctggcctctctgtgctccgggccacaggggccacctacaggtttgaggaggagaacctgcgactccttgagctaaaccagaggtgccagtttgccaccagtgccacaatgcagtggctggacattcggctacagctcatgggggcggcagtggtcagcgctatcgcaggcatcgctctggtgcagcaccagcagggcctcgctaacccagggctggtgggcttgtcgctgtcttatgccctgtccctgacgggcctgctctcgggcctggtgagcagcttcacacagacagaggccatgctggtgagcgtcgagcggctggaagagtacacctgtgacctgccccaggaaccccagggccagccactgcagctgggcaccggctggctgacccaggggggcgtggagttccaggacgtggtgttggcgtaccggccagggctgccgaatgccctggatggagtgaccttctgcgtgcagcctggagagaagttgggcatcgtgggccgcacaggctccggcaagtcttccctgttgttggtgctcttccggctgctagagcccagttcagggcgagtgctgctggacggcgtggacaccagccagctggagctggcccagctcagatcccagttggctatcatcccccaggagccctttttgttcagtgggactgttcgggaaaacctggacccccagggcctacataaggacagggccttgtggcaggccctgaagcagtgccacctgagtgaggtgattacatccatgggtggtctggatggtgagctgggtgaggggggccggagcttatctcttgggcagaggcagctgttgtgtttggccagggctctcctcacagatgccaagatcctgtgtatcgatgaggccacagcaagtgtggaccagaagacagaccagctgctccagcagaccatctgcaaacgctttgccaacaagacagtgctgaccattgcccataggctcaacacgatcctgaactcagaccgggtgctggtgctacaagcggggagagtggtagagctggactccccggccaccctgcgcaaccagccccactccctgttccagcagctgctgcagagcagccagcagggagtccctgcctcactcggaggtccctgagcccaatcccacaccctgcagagttctcccctctctctgatccaggccgggcctatacagaggtgctggctgcttgtttacattctcctctggggctctacctctccacacttccccagaagggaaaagggcaccctggattactctttggaaatcactccttggtgggcagcatcctgaggcttccccagaaccaggcctctgctctggccctcttgcatctggaacgccaggtgggtttttctggcataggagcccacttgcattttcatagttttatttgataaaattccatcttacattctgtgtattaaaaaaataatatttctggtgt

SEQ ID NO: 2954 - DNA, 5033 bp, Homo sapiens
  source 1..5033: mol_type = unassigned DNA
ggcgaatagcgccggctaggtcttccaacctctaggtggggtgccagccggggcgggcccagcaccccggccgggcagtactttttttttttttgcatacaccagttctcaggatatcggaatccggtgcacagcagcttcttcaggtttgaggttccggatgcctgggggcggagaaacgggaggggaaaaacagatggcaaggtgaggcgtccatggaacgacttctggcccagctgtgcggcagcagcgcagcgtggccgctcccgctgtgggagggggacaccacaggccactgcttcacccagctggtgctcagcgccctgccccacgcgctcctcgccgtgctcagtgcctgttacttgggcaccccgaggagtccagattacatcctaccctgcagtcctggatggcgcctccgacttgcagcttccttcctgctttccgtcttcccgctgctagaccttcttccagttgctttgccaccaggggcaggcccaggacccatagggctagaggtgttggcagggtgcgtggcagctgtggcctggatcagccacagcctggccctgtgggtgttggcacattcccctcatggccactcccggggtcccttggccttggccctggtagccttgctgccagctccagccctagtgctgaccgtgttgtggcattgccagcgaggcacacttctgcccccacttctcccagggcccatggcccgcctatgcttgctcatcctgcagctggctgcactcttggcctatgcactgggatgggcagctcctgggggaccacgagaaccctgggctcaggagcccctcctgcccgaggatcaagaacctgaggtggctgaagatggggagagttggctgtcacgcttttcctatgcctggctggcacccttgctggcccgtggggcctgtggagagctccggcagcctcaggacatttgccgcctcccccacagactgcagccaacctacctggctcgtgtcttccaggcacactggcaggagggggcacggctgtggagggccttgtatggggcctttggacggtgctatctggcacttggactgctgaagctggtggggaccatgttgggattctcagggcccctgttgctctccctactggtgggcttcctggaagaggggcaggagccactaagccacggcctgctctatgctctggggctagccggtggggctgtgctgggtgctgtgctgcagaatcagtatgggtatgaggtatataaggtaacacttcaggcacggggggctgtgctgaacatcctgtactgcaaggctttacagctggggcccagccgccctcctactggggaggccctgaacctactaggcactgactctgaacggctgcttaactttgctgggagcttccatgaagcctggggcctgcccctgcaactggccatcaccctctacctgctgtaccagcaggtaggcgtggccttcgtgggtggtctcatcttggcactgctgctggtacccgtcaacaaagtgattgccacccgcatcatggccagcaaccaggaaatgctacagcacaaggatgcgcgggttaagcttgtgacagagctgctgagtggcattcgggtcatcaagttctgcgggtgggagcaggcactgggagcccgagtagaggcctgccgggctcgagagctggggcgactccgggtcatcaaatacctggatgcggcctgtgtatacctgtgggctgccctaccggttgtcatctccatcgttatcttcatcacctatgtcctcatggggcaccagctcactgccaccaaggtgttcacggccctggcactggtgcgaatgctcattcttcctctcaacaacttcccttgggtgatcaatggtctcctggaggccaaagtgtccttggaccggatccagcttttcctcgaccttccaaaccacaacccccaggcctactacagcccagatccccctgcagagccatctacagtattggagctgcatggagccttgttctcctgggacccagttggaaccagcctggagaccttcatcagtcatctcgaagtgaaaaagggtatgctggtgggcatcgtggggaaggtcggctgtgggaagagctccctgctggctgccatcgctggagagctccacaggctgcgtgggcatgtggcagtgcgggggctgtccaagggctttggcctggccacccaggaaccctggatccagtttgccaccatccgagacaacatcctctttgggaagacatttgatgcacagctgtacaaggaggtgctagaagcctgcgccctcaatgatgacctcagtatcctgcctgctggagaccagacagaggtgggggagaagggtgtcacccttagcggaggacagcgtgcccggattgcccttgctcgtgctgtctaccaggaaaaggagctctatctcctcgatgaccctctggccgctgtggatgcagatgtggccaaccacctgctgcacaggtgcatcctgggcatgctgagctacaccacacggctgctctgcacccaccgcactgagtacctggagagggctgacgcggtgctgctgatggaggccgggcgcctcatccgggctggacctccctctgagattctgccactggtacaagctgtccccaaagcctgggctgagaatggacaagagtctgactcagccacagcccagtcagtacagaacccagagaaaacaaaggaggggctggaggaggagcagagcacatctggtcgcctgctgcaggaagaaagcaagaaggagggcgccgtggccttgcacgtgtaccaagcttactggaaggccgtgggccagggcttggccttagccatcctcttctctctgcttctcatgcaagccacgcggaacgctgctgactggtggctctcccactggatctctcagctgaaggctgagaatagctcccaggaggcgcaaccctccaccagcccagcttctatggggctcttctctccgcagctgctcctcttttcccctggaaacctctacatcccagtgttcccactgcccaaagctgcccccaatggctcctcagacatccgtttctacctcaccgtgtatgcgaccattgctggtgtaaattccctctgcacccttctccgggcagtgctctttgcagcaggcacccttcaagcagctgccactctgcatcgccgcctgctgcatcgagtccttatggcaccagtgactttcttcaatgccacacccacgggccggatcctaaaccgcttctcctctgatgtggcctgtgcggatgacagcctgcccttcatcctcaacatcctcctggccaacgcggcaggcctgctggggctcctggccgtgctgggctctggcctgccctggctgctgctcctgctgccgcctttgagcatcatgtactatcacgtgcagcgccactacagggcctcctcacgggagctgcggcgcctgggcagcctcaccctgtctccactgtatagccatctggccgataccttggctggcctctctgtgctccgggccacaggggccacctacaggtttgaggaggagaacctgcgactccttgagctaaaccagaggtgccagtttgccaccagtgccacaatgcagtggctggacattcggctacagctcatgggggcggcagtggtcagcgctatcgcaggcatcgctctggtgcagcaccagcagggcctcgctaacccagggctggtgggcttgtcgctgtcttatgccctgtccctgacgggcctgctctcgggcctggtgagcagcttcacacagacagaggccatgctggtgagcgtcgagcggctggaagagtacacctgtgacctgccccaggaaccccagggccagccactgcagctgggcaccggctggctgacccaggggggcgtggagttccaggacgtggtgttggcgtaccggccagggctgccgaatgccctggatggagtgaccttctgcgtgcagcctggagagaagttgggcatcgtgggccgcacaggctccggcaagtcttccctgttgttggtgctcttccggctgctagagcccagttcagggcgagtgctgctggacggcgtggacaccagccagctggagctggcccagctcagatcccagttggctatcatcccccaggagccctttttgttcagtgggactgttcgggaaaacctggacccccagggcctacataaggacagggccttgtggcaggccctgaagcagtgccacctgagtgaggtgattacatccatgggtggtctggatggtgagctgggtgaggggggccggagcttatctcttgggcagaggcagctgttgtgtttggccagggctctcctcacagatgccaagatcctgtgtatcgatgaggccacagcaagtgtggaccagaagacagaccagctgctccagcagaccatctgcaaacgctttgccaacaagacagtgctgaccattgcccataggctcaacacgatcctgaactcagaccgggtgctggtgctacaagcggggagagtggtagagctggactccccggccaccctgcgcaaccagccccactccctgttccagcagctgctgcagagcagccagcagggagtccctgcctcactcggaggtccctgagcccaatcccacaccctgcagagttctcccctctctctgatccaggccgggcctatacagaggtgctggctgcttgtttacattctcctctggggctctacctctccacacttccccagaagggaaaagggcaccctggattactctttggaaatcactccttggtgggcagcatcctgaggcttccccagaaccaggcctctgctctggccctcttgcatctggaacgccaggtgggtttttctggcataggagcccacttgcattttcatagttttatttgataaaattccatcttacattctgtgtattaaaaaaataatatttctggtgtgaggc

SEQ ID NO: 2955 - DNA, 4463 bp, Homo sapiens
  source 1..4463: mol_type = unassigned DNA
gtgtatttgaataaaccaggttggcaaatcatactatagctgaaagaattggcaggaactgaaaatgactaggaagaggacatactgggtgcccaactcttctggtggcctcgtgaatcgtggcatcgacataggcgatgacatggtttcaggacttatttataaaacctatactctccaagatggcccctggagtcagcaagagagaaatcctgaggctccagggagggcagctgtcccaccgtgggggaagtatgatgctgccttgagaaccatgattcccttccgtcccaagccgaggtttcctgccccccagcccctggacaatgctggcctgttctcctacctcaccgtgtcatggctcaccccgctcatgatccaaagcttacggagtcgcttagatgagaacaccatccctccactgtcagtccatgatgcctcagacaaaaatgtccaaaggcttcaccgcctttgggaagaagaagtctcaaggcgagggattgaaaaagcttcagtgcttctggtgatgctgaggttccagagaacaaggttgattttcgatgcacttctgggcatctgcttctgcattgccagtgtactcgggccaatattgattataccaaagatcctggaatattcagaagagcagttggggaatgttgtccatggagtgggactctgctttgccctttttctctccgaatgtgtgaagtctctgagtttctcctccagttggatcatcaaccaacgcacagccatcaggttccgagcagctgtttcctcctttgcctttgagaagctcatccaatttaagtctgtaatacacatcacctcaggagaggccatcagcttcttcaccggtgatgtaaactacctgtttgaaggggtgtgctatggacccctagtactgatcacctgcgcatcgctggtcatctgcagcatttcttcctacttcattattggatacactgcatttattgccatcttatgctatctcctggttttcccactggcggtattcatgacaagaatggctgtgaaggctcagcatcacacatctgaggtcagcgaccagcgcatccgtgtgaccagtgaagttctcacttgcattaagctgattaaaatgtacacatgggagaaaccatttgcaaaaatcattgaagacctaagaaggaaggaaaggaaactattggagaagtgcgggcttgtccagagcctgacaagtataaccttgttcatcatccccacagtggccacagcggtctgggttctcatccacacatccttaaagctgaaactcacagcgtcaatggccttcagcatgctggcctccttgaatctccttcggctgtcagtgttctttgtgcctattgcagtcaaaggtctcacgaattccaagtctgcagtgatgaggttcaagaagtttttcctccaggagagccctgttttctatgtccagacattacaagaccccagcaaagctctggtctttgaggaggccaccttgtcatggcaacagacctgtcccgggatcgtcaatggggcactggagctggagaggaacgggcatgcttctgaggggatgaccaggcctagagatgccctcgggccagaggaagaagggaacagcctgggcccagagttgcacaagatcaacctggtggtgtccaaggggatgatgttaggggtctgcggcaacacggggagtggtaagagcagcctgttgtcagccatcctggaggagatgcacttgctcgagggctcggtgggggtgcagggaagcctggcctatgtcccccagcaggcctggatcgtcagcgggaacatcagggagaacatcctcatgggaggcgcatatgacaaggcccgatacctccaggtgctccactgctgctccctgaatcgggacctggaacttctgccctttggagacatgacagagattggagagcggggcctcaacctctctggggggcagaaacagaggatcagcctggcccgcgccgtctattccgaccgtcagatctacctgctggacgaccccctgtctgctgtggacgcccacgtggggaagcacatttttgaggagtgcattaagaagacactcagggggaagacggtcgtcctggtgacccaccagctgcagtacttagaattttgtggccagatcattttgttggaaaatgggaaaatctgtgaaaatggaactcacagtgagttaatgcagaaaaaggggaaatatgcccaacttatccagaagatgcacaaggaagccacttcggacatgttgcaggacacagcaaagatagcagagaagccaaaggtagaaagtcaggctctggccacctccctggaagagtctctcaacggaaatgctgtgccggagcatcagctcacacaggaggaggagatggaagaaggctccttgagttggagggtctaccaccactacatccaggcagctggaggttacatggtctcttgcataattttcttcttcgtggtgctgatcgtcttcttaacgatcttcagcttctggtggctgagctactggttggagcagggctcggggaccaatagcagccgagagagcaatggaaccatggcagacctgggcaacattgcagacaatcctcaactgtccttctaccagctggtgtacgggctcaacgccctgctcctcatctgtgtgggggtctgctcctcagggattttcaccaaggtcacgaggaaggcatccacggccctgcacaacaagctcttcaacaaggttttccgctgccccatgagtttctttgacaccatcccaataggccggcttttgaactgcttcgcaggggacttggaacagctggaccagctcttgcccatcttttcagagcagttcctggtcctgtccttaatggtgatcgccgtcctgttgattgtcagtgtgctgtctccatatatcctgttaatgggagccataatcatggttatttgcttcatttattatatgatgttcaagaaggccatcggtgtgttcaagagactggagaactatagccggtctcctttattctcccacatcctcaattctctgcaaggcctgagctccatccatgtctatggaaaaactgaagacttcatcagccagtttaagaggctgactgatgcgcagaataactacctgctgttgtttctatcttccacacgatggatggcattgaggctggagatcatgaccaaccttgtgaccttggctgttgccctgttcgtggcttttggcatttcctccaccccctactcctttaaagtcatggctgtcaacatcgtgctgcagctggcgtccagcttccaggccactgcccggattggcttggagacagaggcacagttcacggctgtagagaggatactgcagtacatgaagatgtgtgtctcggaagctcctttacacatggaaggcacaagttgtccccaggggtggccacagcatggggaaatcatatttcaggattatcacatgaaatacagagacaacacacccaccgtgcttcacggcatcaacctgaccatccgcggccacgaagtggtgggcatcgtgggaaggacgggctctgggaagtcctccttgggcatggctctcttccgcctggtggagcccatggcaggccggattctcattgacggcgtggacatttgcagcatcggcctggaggacttgcggtccaagctctcagtgatccctcaagatccagtgctgctctcaggaaccatcagattcaacctagatccctttgaccgtcacactgaccagcagatctgggatgccttggagaggacattcctgaccaaggccatcatccttatcgatgaagccacagcctccattgacatggagacagacaccctgatccagcgcacaatccgtgaagccttccagggctgcaccgtgctcgtcattgcccaccgtgtcaccactgtgctgaactgtgaccacatcctggttatgggcaatgggaaggtggtagaatttgatcggccggaggtactgcggaagaagcctgggtcattgttcgcagccctcatggccacagccacttcttcactgagataaggagatgtggagacttcatggaggctggcagctgagctcagaggttcacacaggtgcagcttcgaggcccacagtctgcgaccttcttgtttggagatgagaacttctcctggaagcaggggtaaatgtagggggggtggggattgctggatggaaaccctggaataggctacttgatggctctcaagaccttagaaccccagaaccatctaagacatgggattcagtgatcatgtggttctccttttaacttacatgctgaataattttataataaggtaaaagcttatagttttctgatctgtgttagaagtgttgcaaatgctgtactgactttgtaaaatataaaactaaggaaaactca

SEQ ID NO: 2956 - DNA, 4612 bp, Homo sapiens
  source 1..4612: mol_type = unassigned DNA
gtcacctggatagcgcaaaggaaacaagagaaaggaacagagcccctcttctggcctctgggctaccatacagaaaagcagaattggcaggaactgaaaatgactaggaagaggacatactgggtgcccaactcttctggtggcctcgtgaatcgtggcatcgacataggcgatgacatggtttcaggacttatttataaaacctatactctccaagatggcccctggagtcagcaagagagaaatcctgaggctccagggagggcagctgtcccaccgtgggggaagtatgatgctgccttgagaaccatgattcccttccgtcccaagccgaggtttcctgccccccagcccctggacaatgctggcctgttctcctacctcaccgtgtcatggctcaccccgctcatgatccaaagcttacggagtcgcttagatgagaacaccatccctccactgtcagtccatgatgcctcagacaaaaatgtccaaaggcttcaccgcctttgggaagaagaagtctcaaggcgagggattgaaaaagcttcagtgcttctggtgatgctgaggttccagagaacaaggttgattttcgatgcacttctgggcatctgcttctgcattgccagtgtactcgggccaatattgattataccaaagatcctggaatattcagaagagcagttggggaatgttgtccatggagtgggactctgctttgccctttttctctccgaatgtgtgaagtctctgagtttctcctccagttggatcatcaaccaacgcacagccatcaggttccgagcagctgtttcctcctttgcctttgagaagctcatccaatttaagtctgtaatacacatcacctcaggagaggccatcagcttcttcaccggtgatgtaaactacctgtttgaaggggtgtgctatggacccctagtactgatcacctgcgcatcgctggtcatctgcagcatttcttcctacttcattattggatacactgcatttattgccatcttatgctatctcctggttttcccactggcggtattcatgacaagaatggctgtgaaggctcagcatcacacatctgaggtcagcgaccagcgcatccgtgtgaccagtgaagttctcacttgcattaagctgattaaaatgtacacatgggagaaaccatttgcaaaaatcattgaagacctaagaaggaaggaaaggaaactattggagaagtgcgggcttgtccagagcctgacaagtataaccttgttcatcatccccacagtggccacagcggtctgggttctcatccacacatccttaaagctgaaactcacagcgtcaatggccttcagcatgctggcctccttgaatctccttcggctgtcagtgttctttgtgcctattgcagtcaaaggtctcacgaattccaagtctgcagtgatgaggttcaagaagtttttcctccaggagagccctgttttctatgtccagacattacaagaccccagcaaagctctggtctttgaggaggccaccttgtcatggcaacagacctgtcccgggatcgtcaatggggcactggagctggagaggaacgggcatgcttctgaggggatgaccaggcctagagatgccctcgggccagaggaagaagggaacagcctgggcccagagttgcacaagatcaacctggtggtgtccaaggggatgatgttaggggtctgcggcaacacggggagtggtaagagcagcctgttgtcagccatcctggaggagatgcacttgctcgagggctcggtgggggtgcagggaagcctggcctatgtcccccagcaggcctggatcgtcagcgggaacatcagggagaacatcctcatgggaggcgcatatgacaaggcccgatacctccaggtgctccactgctgctccctgaatcgggacctggaacttctgccctttggagacatgacagagattggagagcggggcctcaacctctctggggggcagaaacagaggatcagcctggcccgcgccgtctattccgaccgtcagatctacctgctggacgaccccctgtctgctgtggacgcccacgtggggaagcacatttttgaggagtgcattaagaagacactcagggggaagacggtcgtcctggtgacccaccagctgcagtacttagaattttgtggccagatcattttgttggaaaatgggaaaatctgtgaaaatggaactcacagtgagttaatgcagaaaaaggggaaatatgcccaacttatccagaagatgcacaaggaagccacttcggacatgttgcaggacacagcaaagatagcagagaagccaaaggtagaaagtcaggctctggccacctccctggaagagtctctcaacggaaatgctgtgccggagcatcagctcacacaggaggaggagatggaagaaggctccttgagttggagggtctaccaccactacatccaggcagctggaggttacatggtctcttgcataattttcttcttcgtggtgctgatcgtcttcttaacgatcttcagcttctggtggctgagctactggttggagcagggctcggggaccaatagcagccgagagagcaatggaaccatggcagacctgggcaacattgcagacaatcctcaactgtccttctaccagctggtgtacgggctcaacgccctgctcctcatctgtgtgggggtctgctcctcagggattttcaccaaggtcacgaggaaggcatccacggccctgcacaacaagctcttcaacaaggttttccgctgccccatgagtttctttgacaccatcccaataggccggcttttgaactgcttcgcaggggacttggaacagctggaccagctcttgcccatcttttcagagcagttcctggtcctgtccttaatggtgatcgccgtcctgttgattgtcagtgtgctgtctccatatatcctgttaatgggagccataatcatggttatttgcttcatttattatatgatgttcaagaaggccatcggtgtgttcaagagactggagaactatagccggtctcctttattctcccacatcctcaattctctgcaaggcctgagctccatccatgtctatggaaaaactgaagacttcatcagccagtttaagaggctgactgatgcgcagaataactacctgctgttgtttctatcttccacacgatggatggcattgaggctggagatcatgaccaaccttgtgaccttggctgttgccctgttcgtggcttttggcatttcctccaccccctactcctttaaagtcatggctgtcaacatcgtgctgcagctggcgtccagcttccaggccactgcccggattggcttggagacagaggcacagttcacggctgtagagaggatactgcagtacatgaagatgtgtgtctcggaagctcctttacacatggaaggcacaagttgtccccaggggtggccacagcatggggaaatcatatttcaggattatcacatgaaatacagagacaacacacccaccgtgcttcacggcatcaacctgaccatccgcggccacgaagtggtgggcatcgtgggaaggacgggctctgggaagtcctccttgggcatggctctcttccgcctggtggagcccatggcaggccggattctcattgacggcgtggacatttgcagcatcggcctggaggacttgcggtccaagctctcagtgatccctcaagatccagtgctgctctcaggaaccatcagattcaacctagatccctttgaccgtcacactgaccagcagatctgggatgccttggagaggacattcctgaccaaggccatctcaaagttccccaaaaagctgcatacagatgtggtggaaaacggtggaaacttctctgtgggggagaggcagctgctctgcattgccagggctgtgcttcgcaactccaagatcatccttatcgatgaagccacagcctccattgacatggagacagacaccctgatccagcgcacaatccgtgaagccttccagggctgcaccgtgctcgtcattgcccaccgtgtcaccactgtgctgaactgtgaccacatcctggttatgggcaatgggaaggtggtagaatttgatcggccggaggtactgcggaagaagcctgggtcattgttcgcagccctcatggccacagccacttcttcactgagataaggagatgtggagacttcatggaggctggcagctgagctcagaggttcacacaggtgcagcttcgaggcccacagtctgcgaccttcttgtttggagatgagaacttctcctggaagcaggggtaaatgtagggggggtggggattgctggatggaaaccctggaataggctacttgatggctctcaagaccttagaaccccagaaccatctaagacatgggattcagtgatcatgtggttctccttttaacttacatgctgaataattttataataaggtaaaagcttatagttttctgatctgtgttagaagtgttgcaaatgctgtactgactttgtaaaatataaaactaaggaaaactca

SEQ ID NO: 2957 - DNA, 4862 bp, Homo sapiens
  source 1..4862: mol_type = unassigned DNA
actgggataaagcaagaagactgattttatgagcaggggtttgatacatcaaaggagattgcccaggatcaagggtgcggtgttgggggtgggttggggagggtggttagagaaggtttcactaagtgatttgggcctgaggcctgagaagatgtttaaaaagagggatcaagcacaggctaaggagaggaaagagcaggcacccaaacctctgcatggccccaatatgctccctgcagggtagtgccccctcttctggctgctcaaggcgagatctaagcttcttctaactcctgctgtcttttcatattctctgattctgggaaacgaagaattggcaggaactgaaaatgactaggaagaggacatactgggtgcccaactcttctggtggcctcgtgaatcgtggcatcgacataggcgatgacatggtttcaggacttatttataaaacctatactctccaagatggcccctggagtcagcaagagagaaatcctgaggctccagggagggcagctgtcccaccgtgggggaagtatgatgctgccttgagaaccatgattcccttccgtcccaagccgaggtttcctgccccccagcccctggacaatgctggcctgttctcctacctcaccgtgtcatggctcaccccgctcatgatccaaagcttacggagtcgcttagatgagaacaccatccctccactgtcagtccatgatgcctcagacaaaaatgtccaaaggcttcaccgcctttgggaagaagaagtctcaaggcgagggattgaaaaagcttcagtgcttctggtgatgctgaggttccagagaacaaggttgattttcgatgcacttctgggcatctgcttctgcattgccagtgtactcgggccaatattgattataccaaagatcctggaatattcagaagagcagttggggaatgttgtccatggagtgggactctgctttgccctttttctctccgaatgtgtgaagtctctgagtttctcctccagttggatcatcaaccaacgcacagccatcaggttccgagcagctgtttcctcctttgcctttgagaagctcatccaatttaagtctgtaatacacatcacctcaggagaggccatcagcttcttcaccggtgatgtaaactacctgtttgaaggggtgtgctatggacccctagtactgatcacctgcgcatcgctggtcatctgcagcatttcttcctacttcattattggatacactgcatttattgccatcttatgctatctcctggttttcccactggcggtattcatgacaagaatggctgtgaaggctcagcatcacacatctgaggtcagcgaccagcgcatccgtgtgaccagtgaagttctcacttgcattaagctgattaaaatgtacacatgggagaaaccatttgcaaaaatcattgaagacctaagaaggaaggaaaggaaactattggagaagtgcgggcttgtccagagcctgacaagtataaccttgttcatcatccccacagtggccacagcggtctgggttctcatccacacatccttaaagctgaaactcacagcgtcaatggccttcagcatgctggcctccttgaatctccttcggctgtcagtgttctttgtgcctattgcagtcaaaggtctcacgaattccaagtctgcagtgatgaggttcaagaagtttttcctccaggagagccctgttttctatgtccagacattacaagaccccagcaaagctctggtctttgaggaggccaccttgtcatggcaacagacctgtcccgggatcgtcaatggggcactggagctggagaggaacgggcatgcttctgaggggatgaccaggcctagagatgccctcgggccagaggaagaagggaacagcctgggcccagagttgcacaagatcaacctggtggtgtccaaggggatgatgttaggggtctgcggcaacacggggagtggtaagagcagcctgttgtcagccatcctggaggagatgcacttgctcgagggctcggtgggggtgcagggaagcctggcctatgtcccccagcaggcctggatcgtcagcgggaacatcagggagaacatcctcatgggaggcgcatatgacaaggcccgatacctccaggtgctccactgctgctccctgaatcgggacctggaacttctgccctttggagacatgacagagattggagagcggggcctcaacctctctggggggcagaaacagaggatcagcctggcccgcgccgtctattccgaccgtcagatctacctgctggacgaccccctgtctgctgtggacgcccacgtggggaagcacatttttgaggagtgcattaagaagacactcagggggaagacggtcgtcctggtgacccaccagctgcagtacttagaattttgtggccagatcattttgttggaaaatgggaaaatctgtgaaaatggaactcacagtgagttaatgcagaaaaaggggaaatatgcccaacttatccagaagatgcacaaggaagccacttcggacatgttgcaggacacagcaaagatagcagagaagccaaaggtagaaagtcaggctctggccacctccctggaagagtctctcaacggaaatgctgtgccggagcatcagctcacacaggaggaggagatggaagaaggctccttgagttggagggtctaccaccactacatccaggcagctggaggttacatggtctcttgcataattttcttcttcgtggtgctgatcgtcttcttaacgatcttcagcttctggtggctgagctactggttggagcagggctcggggaccaatagcagccgagagagcaatggaaccatggcagacctgggcaacattgcagacaatcctcaactgtccttctaccagctggtgtacgggctcaacgccctgctcctcatctgtgtgggggtctgctcctcagggattttcaccaaggtcacgaggaaggcatccacggccctgcacaacaagctcttcaacaaggttttccgctgccccatgagtttctttgacaccatcccaataggccggcttttgaactgcttcgcaggggacttggaacagctggaccagctcttgcccatcttttcagagcagttcctggtcctgtccttaatggtgatcgccgtcctgttgattgtcagtgtgctgtctccatatatcctgttaatgggagccataatcatggttatttgcttcatttattatatgatgttcaagaaggccatcggtgtgttcaagagactggagaactatagccggtctcctttattctcccacatcctcaattctctgcaaggcctgagctccatccatgtctatggaaaaactgaagacttcatcagccagtttaagaggctgactgatgcgcagaataactacctgctgttgtttctatcttccacacgatggatggcattgaggctggagatcatgaccaaccttgtgaccttggctgttgccctgttcgtggcttttggcatttcctccaccccctactcctttaaagtcatggctgtcaacatcgtgctgcagctggcgtccagcttccaggccactgcccggattggcttggagacagaggcacagttcacggctgtagagaggatactgcagtacatgaagatgtgtgtctcggaagctcctttacacatggaaggcacaagttgtccccaggggtggccacagcatggggaaatcatatttcaggattatcacatgaaatacagagacaacacacccaccgtgcttcacggcatcaacctgaccatccgcggccacgaagtggtgggcatcgtgggaaggacgggctctgggaagtcctccttgggcatggctctcttccgcctggtggagcccatggcaggccggattctcattgacggcgtggacatttgcagcatcggcctggaggacttgcggtccaagctctcagtgatccctcaagatccagtgctgctctcaggaaccatcagattcaacctagatccctttgaccgtcacactgaccagcagatctgggatgccttggagaggacattcctgaccaaggccatctcaaagttccccaaaaagctgcatacagatgtggtggaaaacggtggaaacttctctgtgggggagaggcagctgctctgcattgccagggctgtgcttcgcaactccaagatcatccttatcgatgaagccacagcctccattgacatggagacagacaccctgatccagcgcacaatccgtgaagccttccagggctgcaccgtgctcgtcattgcccaccgtgtcaccactgtgctgaactgtgaccacatcctggttatgggcaatgggaaggtggtagaatttgatcggccggaggtactgcggaagaagcctgggtcattgttcgcagccctcatggccacagccacttcttcactgagataaggagatgtggagacttcatggaggctggcagctgagctcagaggttcacacaggtgcagcttcgaggcccacagtctgcgaccttcttgtttggagatgagaacttctcctggaagcaggggtaaatgtagggggggtggggattgctggatggaaaccctggaataggctacttgatggctctcaagaccttagaaccccagaaccatctaagacatgggattcagtgatcatgtggttctccttttaacttacatgctgaataattttataataaggtaaaagcttatagttttctgatctgtgttagaagtgttgcaaatgctgtactgactttgtaaaatataaaactaaggaaaactc

SEQ ID NO: 2958 - DNA, 4576 bp, Homo sapiens
  source 1..4576: mol_type = unassigned DNA
gtgtatttgaataaaccaggttggcaaatcatactatagctgaaagaattggcaggaactgaaaatgactaggaagaggacatactgggtgcccaactcttctggtggcctcgtgaatcgtggcatcgacataggcgatgacatggtttcaggacttatttataaaacctatactctccaagatggcccctggagtcagcaagagagaaatcctgaggctccagggagggcagctgtcccaccgtgggggaagtatgatgctgccttgagaaccatgattcccttccgtcccaagccgaggtttcctgccccccagcccctggacaatgctggcctgttctcctacctcaccgtgtcatggctcaccccgctcatgatccaaagcttacggagtcgcttagatgagaacaccatccctccactgtcagtccatgatgcctcagacaaaaatgtccaaaggcttcaccgcctttgggaagaagaagtctcaaggcgagggattgaaaaagcttcagtgcttctggtgatgctgaggttccagagaacaaggttgattttcgatgcacttctgggcatctgcttctgcattgccagtgtactcgggccaatattgattataccaaagatcctggaatattcagaagagcagttggggaatgttgtccatggagtgggactctgctttgccctttttctctccgaatgtgtgaagtctctgagtttctcctccagttggatcatcaaccaacgcacagccatcaggttccgagcagctgtttcctcctttgcctttgagaagctcatccaatttaagtctgtaatacacatcacctcaggagaggccatcagcttcttcaccggtgatgtaaactacctgtttgaaggggtgtgctatggacccctagtactgatcacctgcgcatcgctggtcatctgcagcatttcttcctacttcattattggatacactgcatttattgccatcttatgctatctcctggttttcccactggcggtattcatgacaagaatggctgtgaaggctcagcatcacacatctgaggtcagcgaccagcgcatccgtgtgaccagtgaagttctcacttgcattaagctgattaaaatgtacacatgggagaaaccatttgcaaaaatcattgaagacctaagaaggaaggaaaggaaactattggagaagtgcgggcttgtccagagcctgacaagtataaccttgttcatcatccccacagtggccacagcggtctgggttctcatccacacatccttaaagctgaaactcacagcgtcaatggccttcagcatgctggcctccttgaatctccttcggctgtcagtgttctttgtgcctattgcagtcaaaggtctcacgaattccaagtctgcagtgatgaggttcaagaagtttttcctccaggagagccctgttttctatgtccagacattacaagaccccagcaaagctctggtctttgaggaggccaccttgtcatggcaacagacctgtcccgggatcgtcaatggggcactggagctggagaggaacgggcatgcttctgaggggatgaccaggcctagagatgccctcgggccagaggaagaagggaacagcctgggcccagagttgcacaagatcaacctggtggtgtccaaggggatgatgttaggggtctgcggcaacacggggagtggtaagagcagcctgttgtcagccatcctggaggagatgcacttgctcgagggctcggtgggggtgcagggaagcctggcctatgtcccccagcaggcctggatcgtcagcgggaacatcagggagaacatcctcatgggaggcgcatatgacaaggcccgatacctccaggtgctccactgctgctccctgaatcgggacctggaacttctgccctttggagacatgacagagattggagagcggggcctcaacctctctggggggcagaaacagaggatcagcctggcccgcgccgtctattccgaccgtcagatctacctgctggacgaccccctgtctgctgtggacgcccacgtggggaagcacatttttgaggagtgcattaagaagacactcagggggaagacggtcgtcctggtgacccaccagctgcagtacttagaattttgtggccagatcattttgttggaaaatgggaaaatctgtgaaaatggaactcacagtgagttaatgcagaaaaaggggaaatatgcccaacttatccagaagatgcacaaggaagccacttcggacatgttgcaggacacagcaaagatagcagagaagccaaaggtagaaagtcaggctctggccacctccctggaagagtctctcaacggaaatgctgtgccggagcatcagctcacacaggaggaggagatggaagaaggctccttgagttggagggtctaccaccactacatccaggcagctggaggttacatggtctcttgcataattttcttcttcgtggtgctgatcgtcttcttaacgatcttcagcttctggtggctgagctactggttggagcagggctcggggaccaatagcagccgagagagcaatggaaccatggcagacctgggcaacattgcagacaatcctcaactgtccttctaccagctggtgtacgggctcaacgccctgctcctcatctgtgtgggggtctgctcctcagggattttcaccaaggtcacgaggaaggcatccacggccctgcacaacaagctcttcaacaaggttttccgctgccccatgagtttctttgacaccatcccaataggccggcttttgaactgcttcgcaggggacttggaacagctggaccagctcttgcccatcttttcagagcagttcctggtcctgtccttaatggtgatcgccgtcctgttgattgtcagtgtgctgtctccatatatcctgttaatgggagccataatcatggttatttgcttcatttattatatgatgttcaagaaggccatcggtgtgttcaagagactggagaactatagccggtctcctttattctcccacatcctcaattctctgcaaggcctgagctccatccatgtctatggaaaaactgaagacttcatcagccagtttaagaggctgactgatgcgcagaataactacctgctgttgtttctatcttccacacgatggatggcattgaggctggagatcatgaccaaccttgtgaccttggctgttgccctgttcgtggcttttggcatttcctccaccccctactcctttaaagtcatggctgtcaacatcgtgctgcagctggcgtccagcttccaggccactgcccggattggcttggagacagaggcacagttcacggctgtagagaggatactgcagtacatgaagatgtgtgtctcggaagctcctttacacatggaaggcacaagttgtccccaggggtggccacagcatggggaaatcatatttcaggattatcacatgaaatacagagacaacacacccaccgtgcttcacggcatcaacctgaccatccgcggccacgaagtggtgggcatcgtgggaaggacgggctctgggaagtcctccttgggcatggctctcttccgcctggtggagcccatggcaggccggattctcattgacggcgtggacatttgcagcatcggcctggaggacttgcggtccaagctctcagtgatccctcaagatccagtgctgctctcaggaaccatcagattcaacctagatccctttgaccgtcacactgaccagcagatctgggatgccttggagaggacattcctgaccaaggccatctcaaagttccccaaaaagctgcatacagatgtggtggaaaacggtggaaacttctctgtgggggagaggcagctgctctgcattgccagggctgtgcttcgcaactccaagatcatccttatcgatgaagccacagcctccattgacatggagacagacaccctgatccagcgcacaatccgtgaagccttccagggctgcaccgtgctcgtcattgcccaccgtgtcaccactgtgctgaactgtgaccacatcctggttatgggcaatgggaaggtggtagaatttgatcggccggaggtactgcggaagaagcctgggtcattgttcgcagccctcatggccacagccacttcttcactgagataaggagatgtggagacttcatggaggctggcagctgagctcagaggttcacacaggtgcagcttcgaggcccacagtctgcgaccttcttgtttggagatgagaacttctcctggaagcaggggtaaatgtagggggggtggggattgctggatggaaaccctggaataggctacttgatggctctcaagaccttagaaccccagaaccatctaagacatgggattcagtgatcatgtggttctccttttaacttacatgctgaataattttataataaggtaaaagcttatagttttctgatctgtgttagaagtgttgcaaatgctgtactgactttgtaaaatataaaactaaggaaaactc

SEQ ID NO: 2959 - DNA, 2942 bp, Homo sapiens
  source 1..2942: mol_type = unassigned DNA
ttaaaaaggctcctgcaggcaacatgcctgcacactaacgtgcagaaagggactgtactactcaaaaccaccaaggaagtggcagagaattggcaggaactgaaaatgactaggaagaggacatactgggtgcccaactcttctggtggcctcgtgaatcgtggcatcgacataggcgatgacatggtttcaggacttatttataaaacctatactctccaagatggcccctggagtcagcaagagagaaatcctgaggctccagggagggcagctgtcccaccgtgggggaagtatgatgctgccttgagaaccatgattcccttccgtcccaagccgaggtttcctgccccccagcccctggacaatgctggcctgttctcctacctcaccgtgtcatggctcaccccgctcatgatccaaagcttacggagtcgcttagatgagaacaccatccctccactgtcagtccatgatgcctcagacaaaaatgtccaaaggcttcaccgcctttgggaagaagaagtctcaaggcgagggattgaaaaagcttcagtgcttctggtgatgctgaggttccagagaacaaggttgattttcgatgcacttctgggcatctgcttctgcattgccagtgtactcgggccaatattgattataccaaagatcctggaatattcagaagagcagttggggaatgttgtccatggagtgggactctgctttgccctttttctctccgaatgtgtgaagtctctgagtttctcctccagttggatcatcaaccaacgcacagccatcaggttccgagcagctgtttcctcctttgcctttgagaagctcatccaatttaagtctgtaatacacatcacctcaggagaggccatcagcttcttcaccggtgatgtaaactacctgtttgaaggggtgtgctatggacccctagtactgatcacctgcgcatcgctggtcatctgcagcatttcttcctacttcattattggatacactgcatttattgccatcttatgctatctcctggttttcccactggcggtattcatgacaagaatggctgtgaaggctcagcatcacacatctgaggtcagcgaccagcgcatccgtgtgaccagtgaagttctcacttgcattaagctgattaaaatgtacacatgggagaaaccatttgcaaaaatcattgaagacctaagaaggaaggaaaggaaactattggagaagtgcgggcttgtccagagcctgacaagtataaccttgttcatcatccccacagtggccacagcggtctgggttctcatccacacatccttaaagctgaaactcacagcgtcaatggccttcagcatgctggcctccttgaatctccttcggctgtcagtgttctttgtgcctattgcagtcaaaggtctcacgaattccaagtctgcagtgatgaggttcaagaagtttttcctccaggagagccctgttttctatgtccagacattacaagaccccagcaaagctctggtctttgaggaggccaccttgtcatggcaacagacctgtcccgggatcgtcaatggggcactggagctggagaggaacgggcatgcttctgaggggatgaccaggcctagagatgccctcgggccagaggaagaagggaacagcctgggcccagagttgcacaagatcaacctggtggtgtccaaggggatgatgttaggggtctgcggcaacacggggagtggtaagagcagcctgttgtcagccatcctggaggagatgcacttgctcgagggctcggtgggggtgcagggaagcctggcctatgtcccccagcaggcctggatcgtcagcgggaacatcagggagaacatcctcatgggaggcgcatatgacaaggcccgatacctccaggtgctccactgctgctccctgaatcgggacctggaacttctgccctttggagacatgacagagattggagagcggggcctcaacctctctggggggcagaaacagaggatcagcctggcccgcgccgtctattccgaccgtcagatctacctgctggacgaccccctgtctgctgtggacgcccacgtggggaagcacatttttgaggagtgcattaagaagacactcagggggaagacggtcgtcctggtgacccaccagctgcagtacttagaattttgtggccagatcattttgttggaaaatgggaaaatctgtgaaaatggaactcacagtgagttaatgcagaaaaaggggaaatatgcccaacttatccagaagatgcacaaggaagccacttcgtgccggagcatcagctcacacaggaggaggagatggaagaaggctccttgagttggagggtctaccaccactacatccaggcagctggaggttacatggtctcttgcataattttcttcttcgtggtgctgatcgtcttcttaacgatcttcagcttctggtggctgagctactggttggagcagggctcggggaccaatagcagccgagagagcaatggaaccatggcagacctgggcaacattgcagacaatcctcaactgtccttctaccagctggtgtacgggctcaacgccctgctcctcatctgtgtgggggtctgctcctcagggattttcaccaaggtcacgaggaaggcatccacggccctgcacaacaagctcttcaacaaggttttccgctgccccatgagtttctttgacaccatcccaataggccggcttttgaactgcttcgcaggggacttggaacagctggaccagctcttgcccatcttttcagagcagttcctggtcctgtccttaatggtgatcgccgtcctgttgattgtcagtgtgctgtctccatatatcctgttaatgggagccataatcatggttatttgcttcatttattatatg

SEQ ID NO: 2960 - DNA, 5168 bp, Homo sapiens
  source 1..5168: mol_type = unassigned DNA
gccttggtcattggaccggctcccaaccaaaaccacaccatagggttttctgctcttggccaacccaacatgagaaaagaggaattaaatggtcctactaataagaaagcctcagcgtagcattaagggacgtagcaggtcttctggccacactcccctacaaatgtggaaagctcattggtgaaaacagttctcaggggtcaaagcaaaggaactgatctgggtaaagtagaggctgcctgatcccaatcagacatcctcacctctcaataacctttgccatttctctgccatagagtgaaagtgtccccaggccaaaagcccagggctccaggctgccatcaggatggtgggtgaaggaccctaccttatctcagatctggaccagcgaggccggcggagatcctttgcagaaagatatgaccccagcctgaagaccatgatcccagtgcgaccctgtgcaaggttagcacccaacccggtggatgatgccgggctactctccttcgccacattttcctggctcacgccggtgatggtgaaaggctaccggcaaaggctgaccgtagacaccctgcccccattgtcgacatatgactcatctgacaccaatgccaaaagatttcgagtcctttgggatgaagaggtagcaagggtgggtcctgagaaggcctctctgagccacgtggtgtggaaattccagaggacacgcgtgttgatggacatcgtggccaacatcctgtgcatcatcatggcagccatagggccggtgattctcattcaccaaatcctccagcagactgagaggacctctgggaaagtctgggttggcattggactgtgcatagccctttttgccaccgagtttaccaaagtcttcttttgggcccttgcctgggccatcaactaccgcacggccatccggttgaaggtggcgctctccaccttggtttttgaaaacctagtgtccttcaagacattgacccacatctctgttggcgaggtgctcaatatactgtcaagtgatagctattctttgtttgaagctgccttgttttgtcctttgccagccaccatcccgatcctaatggtcttttgtgcggcgtacgcctttttcattctggggcccacagctctcatcgggatatcagtgtatgtcatattcatacccgtccagatgtttatggccaagctcaattcagctttccgaaggtcagcaattttggtgacagacaagcgagttcagacaatgaatgagtttctgacctgcatcaggctgatcaaaatgtatgcctgggagaaatcttttaccaacactatccaagatataagaaggagggaaagaaaattactggaaaaagctggatttgtccaaagtggaaactctgccctggcccccatcgtgtccaccatagccatcgtgctgacattatcctgccacatcctcctgagacgcaaactcaccgcacccgtggcatttagtgtgattgccatgtttaatgtaatgaagttttccattgcaatcttgcccttctccatcaaagcaatggctgaagcgaatgtctctctaaggagaatgaagaaaattctcatagataaaagccccccatcttacatcacccaaccagaagacccagatactgtcttgcttttagcaaatgccaccttgacatgggagcatgaagccagcaggaaaagtaccccaaagaaattgcagaaccagaaaaggcatttatgcaagaaacagaggtcagaggcatacagtgagaggagtccaccagccaagggagccactggcccagaggagcaaagtgacagcctcaaatcggttctgcacagcataagctttgtggtgagaaaggggaagatcttgggaatatgtgggaatgtgggaagtggaaagagctccctccttgcagctctcctaggacagatgcagctgcagaaaggggtggtggcagtcaatggaactttggcctacgtttcacagcaggcatggatctttcatggaaatgtgagagaaaacatactctttggagaaaagtatgatcaccaaaggtatcagcacacagtccgcgtctgtggcctccagaaggacctgagcaacctcccctatggagacctgactgagattggggagcggggcctcaacctctctggggggcagaggcagaggattagcctggcccgcgctgtctactccgaccgtcagctctacctgctggacgaccccctgtcggccgtggacgcccacgtggggaagcacgtctttgaggagtgcattaagaagacgctcaggggaaagacagtcgtcctggtgacccaccagctacagttcttagagtcttgtgatgaagttattttattagaagatggagagatttgtgaaaagggaacccacaaggagttaatggaggagagagggcgctatgcaaaactgattcacaacctgcgaggattgcagttcaaggatcctgaacacctttacaatgcagcaatggtggaagccttcaaggagagccctgctgagagagaggaagatgctggtataatcgttttggctccaggaaatgagaaagatgaaggaaaagaatctgaaacaggctcagaatttgtagacacaaaagttcctgagcaccagctcatccagactgaatccccccaggaaggaaccgtgacctggaaaacatatcacacgtacattaaggcttctggagggtacctcctttctctcttcactgtgttcctcttcctcctgatgattggcagcgctgccttcagcaactggtggctgggtctctggttggacaagggctcacggatgacctgtgggccccagggcaacaggaccatgtgtgaggtcggcgcggtgctggcagacatcggtcagcatgtgtaccagtgggtgtacactgcaagcatggtgttcatgctggtgtttggcgtcaccaaaggcttcgtcttcaccaagaccacactgatggcatcctcctctctgcatgacacggtgtttgataagatcttaaagagcccaatgagtttctttgacacgactcccactggcaggctaatgaaccgtttttccaaggatatggacgagctggatgtgaggctgccgtttcacgcagagaactttctgcagcagttttttatggtggtgtttattctcgtgatcttggctgctgtgtttcctgctgtccttttagtcgtggccagccttgctgtaggcttcttcattctgttacgcattttccacagaggagtccaggagctcaagaaggtggagaatgtcagccggtcaccctggttcacccacatcacctcctccatgcagggcctgggcatcattcacgcctatggcaagaaggagagctgcatcacctatcacctcctctactttaactgtgctctcaggtggtttgcgctgagaatggatgtcctcatgaacatccttaccttcactgtggccttgttggtgaccctgagtttctcctccatcagtacttcatccaaaggcctgtcattgtcatacatcatccagctgagcggactgctccaagtgtgtgtgcgaacgggaacagagacgcaagccaaattcacctccgtggagctgctcagggaatacatttcgacctgtgttcctgaatgcactcatcccctcaaagtggggacctgtcccaaggactggcccagccgtggggagatcaccttcagagactatcagatgagatacagagacaacaccccccttgttctcgacagcctgaacttgaacatacaaagtgggcagacagtcgggattgttggaagaacaggttccggaaagtcatcgttaggaatggctttgtttcgtctggtggagccagccagtggcacaatctttattgatgaggtggatatctgcattctcagcttggaagacctcagaaccaagctgactgtgatcccacaggatcctgtcctgtttgtaggtacagtaaggtacaacttggatccctttgagagtcacaccgatgagatgctctggcaggttctggagagaacattcatgagagacacaataatgaaactcccagaaaaattacaggcagaagtcacagaaaatggagaaaacttctcagtaggggaacgtcagctgctttgtgtggcccgagctcttctccgtaattcaaagatcattctccttgatgaagccaccgcctctatggactccaagactgacaccctggttcagaacaccatcaaagatgccttcaagggctgcactgtgctgaccatcgcccaccgcctcaacacagttctcaactgcgatcacgtcctggttatggaaaatgggaaggtgattgagtttgacaagcctgaagtccttgcagagaagccagattctgcatttgcgatgttactagcagcagaagtcagattgtagaggtcctggcggctgattctagaggaggaagaggctctgtgagatgaataggaggagtcttcaggaggaggggctgtcctctccgcaggcagccctggtcttcagcccctcccatccacggagtgagctggggctgaagttgtccccactgccatactcagtccatgtcaccccacttggtgggcttggggttggttctgggtggtgaaccggggcagacccagctaatggattaaaaaactgcccttcacctcccaaatccccaagggttcctcatgtgttttcaccaaaaccaccccagtgcctgagattgaaaatattgtaactttcagttagaaatcagccacaataaacaacatgggaaaatgccttaggatggagtttgcaaggtttccttgcccattatcagaaggaaaaagagcagaattttcttctcgtttaaccccactcacttccatcttgactgggtgacaagtggtaatgacacagatttgtagcgtgaaagactgaatacagtgtttggccaaaaatttttttaaaaatcatattatatgtttcaattgatctgttagaataaccaagaaaacaaaatgctggagtttctctataaatgacacttttatatcttctttattcgtcgttaaaacgcggtaggaaattaccctgaaatgtcgccttgcaattatttcactgaagatattccaatttccatactatttcctccaatagacccttgttgcct

SEQ ID NO: 2961 - DNA, 4053 bp, Homo sapiens
  source 1..4053: mol_type = unassigned DNA
atcaggatggtgggtgaaggaccctaccttatctcagatctggaccagcgaggccggcggagatcctttgcagaaagatatgaccccagcctgaagaccatgatcccagtgcgaccctgtgcaaggttagcacccaacccggtggatgatgccgggctactctccttcgccacattttcctggctcacgccggtgatggtgaaaggctaccggcaaaggctgaccgtagacaccctgcccccattgtcgacatatgactcatctgacaccaatgccaaaagatttcgagtcctttgggatgaagaggtagcaagggtgggtcctgagaaggcctctctgagccacgtggtgtggaaattccagaggacacgcgtgttgatggacatcgtggccaacatcctgtgcatcatcatggcagccatagggccgacagttctcattcaccaaatcctccagcagactgagaggacctctgggaaagtctgggttggcattggactgtgcatagccctttttgccaccgagtttaccaaagtcttcttttgggcccttgcctgggccatcaactaccgcacggccatccggttgaaggtggcgctctccaccttggtttttgaaaacctagtgtccttcaagacattgacccacatctctgttggcgaggtgctcaatatactgtcaagtgatagctattctttgtttgaagctgccttgttttgtcctttgccagccaccatcccgatcctaatggtcttttgtgcggcgtacgcctttttcattctggggcccacagctctcatcgggatatcagtgtatgtcatattcatacccgtccagatgtttatggccaagctcaattcagctttccgaaggtcagcaattttggtgacagacaagcgagttcagacaatgaatgagtttctgacctgcatcaggctgatcaaaatgtatgcctgggagaaatcttttaccaacactatccaagatataagaaggagggaaagaaaattactggaaaaagctggatttgtccaaagtggaaactctgccctggcccccatcgtgtccaccatagccatcgtgctgacattatcctgccacatcctcctgagacgcaaactcaccgcacccgtggcatttagtgtgattgccatgtttaatgtaatgaagttttccattgcaatcttgcccttctccatcaaagcaatggctgaagcgaatgtctctctaaggagaatgaagaaaattctcatagataaaagccccccatcttacatcacccaaccagaagacccagatactgtcttgcttttagcaaatgccaccttgacatgggagcatgaagccagcaggaaaagtaccccaaagaaattgcagaaccagaaaaggcatttatgcaagaaacagaggtcagaggcatacagtgagaggagtccaccagccaagggagccactggcccagaggagcaaagtgacagcctcaaatcggttctgcacagcataagctttgtggtgagaaaggggaagatcttgggaatatgtgggaatgtgggaagtggaaagagctccctccttgcagctctcctaggacagatgcagctgcagaaaggggtggtggcagtcaatggaactttggcctacgtttcacagcaggcatggatctttcatggaaatgtgagagaaaacatactctttggagaaaagtatgatcaccaaagattggggagcggggcctcaacctctctggggggcagaggcagaggattagcctggcccgcgctgtctactccgaccgtcagctctacctgctggacgaccccctgtcggccgtggacgcccacgtggggaagcacgtctttgaggagtgcattaagaagacgctcaggggaaagacagtcgtcctggtgacccaccagctacagttcttagagtcttgtgatgaagttattttattagaagatggagagatttgtgaaaagggaacccacaaggagttaatggaggagagagggcgctatgcaaaactgattcacaacctgcgaggattgcagttcaaggatcctgaacacctttacaatgcagcaatggtggaagccttcaaggagagccctgctgagagagaggaagatgctgttttggctccaggaaatgagaaagatgaaggaaaagaatctgaaacaggctcagaatttgtagacacaaaagttcctgagcaccagctcatccagactgaatccccccaggaaggaaccgtgacctggaaaacatatcacacgtacattaaggcttctggagggtacctcctttctctcttcactgtgttcctcttcctcctgatgattggcagcgctgccttcagcaactggtggctgggtctctggttggacaagggctcacggatgacctgtgggccccagggcaacaggaccatgtgtgaggtcggcgcggtgctggcagacatcggtcagcatgtgtaccagtgggtgtacactgcaagcatggtgttcatgctggtgtttggcgtcaccaaaggcttcgtcttcaccaagaccacactgatggcatcctcctctctgcatgacacggtgtttgataagatcttaaagagcccaatgagtttctttgacacgactcccactggcaggctaatgaaccgtttttccaaggatatggacgagctggatgtgaggctgccgtttcacgcagagaactttctgcagcagttttttatggtggtgtttattctcgtgatcttggctgctgtgtttcctgctgtccttttagtcgtggccagccttgctgtaggcttcttcattctgttacgcattttccacagaggagtccaggagctcaagaaggtggagaatgtcagccggtcaccctggttcacccacatcacctcctccatgcagggcctgggcatcattcacgcctatggcaagaaggagagctgcatcacctagtttaagacgctaaacgacgaaaactccagtcacctcctctactttaactgtgctctcaggtggtttgcgctgagaatggatgtcctcatgaacatccttaccttcactgtggccttgttggtgaccctgagtttctcctccatcagtacttcatccaaaggcctgtcattgtcatacatcatccagctgagcggactgctccaagtgtgtgtgcgaacgggaacagagacgcaagccaaattcacctccgtggagctgctcagggaatacatttcgacctgtgttcctgaatgcactcatcccctcaaagtggggacctgtcccaaggactggcccagccgtggggagatcaccttcagagactatcagatgagatacagagacaacaccccccttgttctcgacagcctgaacttgaacatacaaagtgggcagacagtcgggattgttggaagaacaggttccggaaagtcatcgttaggaatggctttgtttcgtctggtggagccagccagtggcacaatctttattgatgaggtggatatctgcattctcagcttggaagacctcagaaccaagctgactgtgatcccacaggatcctgtcctgtttgtaggtacagtaaggtacaacttggatccctttgagagtcacaccgatgagatgctctggcaggttctggagagaacattcatgagagacacaataatgaaactcccagaaaaattacaggcagaagtcacagaaaatggagaaaacttctcagtaggggaacgtcagctgctttgtgtggcccgagctcttctccgtaattcaaagatcattctccttgatgaagccaccgcctctatggactccaagactgacaccctggttcagaacaccatcaaagatgccttcaagggctgcactgtgctgaccatcgcccaccgcctcaacacagttctcaactgcgatcacgtcctggttatggaaaatgggaaggtgattgagtttgacaagcctgaagtccttgcagagaagccagattctgcatttgcgatgttactagcagcagaagtcagattgtagaggtcctggcggctgattc

SEQ ID NO: 2962 - DNA, 3899 bp, Homo sapiens
  source 1..3899: mol_type = unassigned DNA
atcaggatggtgggtgaaggaccctaccttatctcagatctggaccagcgaggccggcggagatcctttgcagaaagatatgaccccagcctgaagaccatgatcccagtgcgaccctgtgcaaggttagcacccaacccggtggatgatgccgggctactctccttcgccacattttcctggctcacgccggtgatggtgaaaggctaccggcaaaggctgaccgtagacaccctgcccccattgtcgacatatgactcatctgacaccaatgccaaaagatttcgagtcctttgggatgaagaggtagcaagggtgggtcctgagaaggcctctctgagccacgtggtgtggaaattccagaggacacgcgtgttgatggacatcgtggccaacatcctgtgcatcatcatggcagccatagggccgacagttctcattcaccaaatcctccagcagactgagaggacctctgggaaagtctgggttggcattggactgtgcatagccctttttgccaccgagtttaccaaagtcttcttttgggcccttgcctgggccatcaactaccgcacggccatccggttgaaggtggcgctctccaccttggtttttgaaaacctagtgtccttcaagacattgacccacatctctgttggcgaggtgctcaatatactgtcaagtgatagctattctttgtttgaagctgccttgttttgtcctttgccagccaccatcccgatcctaatggtcttttgtgcggcgtacgcctttttcattctggggcccacagctctcatcgggatatcagtgtatgtcatattcatacccgtccagatgtttatggccaagctcaattcagctttccgaaggtcagcaattttggtgacagacaagcgagttcagacaatgaatgagtttctgacctgcatcaggctgatcaaaatgtatgcctgggagaaatcttttaccaacactatccaagatataagaaggagggaaagaaaattactggaaaaagctggatttgtccaaagtggaaactctgccctggcccccatcgtgtccaccatagccatcgtgctgacattatcctgccacatcctcctgagacgcaaactcaccgcacccgtggcatttagtgtgattgccatgtttaatgtaatgaagttttccattgcaatcttgcccttctccatcaaagcaatggctgaagcgaatgtctctctaaggagaatgaagaaaattctcatagataaaagccccccatcttacatcacccaaccagaagacccagatactgtcttgcttttagcaaatgccaccttgacatgggagcatgaagccagcaggaaaagtaccccaaagaaattgcagaaccagaaaaggcatttatgcaagaaacagaggtcagaggcatacagtgagaggagtccaccagccaagggagccactggcccagaggagcaaagtgacagcctcaaatcggttctgcacagcataagctttgtggtgagaaaggggaagatcttgggaatatgtgggaatgtgggaagtggaaagagctccctccttgcagctctcctaggacagatgcagctgcagaaaggggtggtggcagtcaatggaactttggcctacgtttcacagcaggcatggatctttcatggaaatgtgagagaaaacatactctttggagaaaagtatgatcaccaaaggtatcagcacacagtccgcgtctgtggcctccagaaggacctgagcaacctcccctatggagacctgactgagattggggagcggggcctcaacctctctggggggcagaggcagaggattagcctggcccgcgctgtctactccgaccgtcagctctacctgctggacgaccccctgtcggccgtggacgcccacgtggggaagcacgtctttgaggagtgcattaagaagacgctcaggggaaagacagtcgtcctggtgacccaccagctacagttcttagagtcttgtgatgaagttattttattagaagatggagagatttgtgaaaagggaacccacaaggagttaatggaggagagagggcgctatgcaaaactgattcacaacctgcgaggattgcagttcaaggatcctgaacacctttacaatgcagcaatggtggaagccttcaaggagagccctgctgagagagaggaagatgctgttttggctccaggaaatgagaaagatgaaggaaaagaatctgaaacaggctcagaatttgtagacacaaaagttcctgagcaccagctcatccagactgaatccccccaggaaggaaccgtgacctggaaaacatatcacacgtacattaaggcttctggagggtacctcctttctctcttcactgtgttcctcttcctcctgatgattggcagcgctgccttcagcaactggtggctgggtctctggttggacaagggctcacggatgacctgtgggccccagggcaacaggaccatgtgtgaggtcggcgcggtgctggcagacatcggtcagcatgtgtaccagtgggtgtacactgcaagcatggtgttcatgctggtgtttggcgtcaccaaaggcttcgtcttcaccaagaccacactgatggcatcctcctctctgcatgacacggtgtttgataagcattttccacagaggagtccaggagctcaagaaggtggagaatgtcagccggtcaccctggttcacccacatcacctcctccatgcagggcctgggcatcattcacgcctatggcaagaaggagagctgcatcacctagtttaagacgctaaacgacgaaaactccagtcacctcctctactttaactgtgctctcaggtggtttgcgctgagaatggatgtcctcatgaacatccttaccttcactgtggccttgttggtgaccctgagtttctcctccatcagtacttcatccaaaggcctgtcattgtcatacatcatccagctgagcggactgctccaagtgtgtgtgcgaacgggaacagagacgcaagccaaattcacctccgtggagctgctcagggaatacatttcgacctgtgttcctgaatgcactcatcccctcaaagtggggacctgtcccaaggactggcccagccgtggggagatcaccttcagagactatcagatgagatacagagacaacaccccccttgttctcgacagcctgaacttgaacatacaaagtgggcagacagtcgggattgttggaagaacaggttccggaaagtcatcgttaggaatggctttgtttcgtctggtggagccagccagtggcacaatctttattgatgaggtggatatctgcattctcagcttggaagacctcagaaccaagctgactgtgatcccacaggatcctgtcctgtttgtaggtacagtaaggtacaacttggatccctttgagagtcacaccgatgagatgctctggcaggttctggagagaacattcatgagagacacaataatgaaactcccagaaaaattacaggcagaagtcacagaaaatggagaaaacttctcagtaggggaacgtcagctgctttgtgtggcccgagctcttctccgtaattcaaagatcattctccttgatgaagccaccgcctctatggactccaagactgacaccctggttcagaacaccatcaaagatgccttcaagggctgcactgtgctgaccatcgcccaccgcctcaacacagttctcaactgcgatcacgtcctggttatggaaaatgggaaggtgattgagtttgacaagcctgaagtccttgcagagaagccagattctgcatttgcgatgttactagcagcagaagtcagattgtagaggtcctggcggctgattc

SEQ ID NO: 2963 - DNA, 3889 bp, Homo sapiens
  source 1..3889: mol_type = unassigned DNA
atcaggatggtgggtgaaggaccctaccttatctcagatctggaccagcgaggccggcggagatcctttgcagaaagatatgaccccagcctgaagaccatgatcccagtgcgaccctgtgcaaggttagcacccaacccggtggatgatgccgggctactctccttcgccacattttcctggctcacgccggtgatggtgaaaggctaccggcaaaggctgaccgtagacaccctgcccccattgtcgacatatgactcatctgacaccaatgccaaaagatttcgagtcctttgggatgaagaggtagcaagggtgggtcctgagaaggcctctctgagccacgtggtgtggaaattccagaggacacgcgtgttgatggacatcgtggccaacatcctgtgcatcatcatggcagccatagggccgacagttctcattcaccaaatcctccagcagactgagaggacctctgggaaagtctgggttggcattggactgtgcatagccctttttgccaccgagtttaccaaagtcttcttttgggcccttgcctgggccatcaactaccgcacggccatccggttgaaggtggcgctctccaccttggtttttgaaaacctagtgtccttcaagacattgacccacatctctgttggcgagatgtttatggccaagctcaattcagctttccgaaggtcagcaattttggtgacagacaagcgagttcagacaatgaatgagtttctgacctgcatcaggctgatcaaaatgtatgcctgggagaaatcttttaccaacactatccaagatataagaaggagggaaagaaaattactggaaaaagctggatttgtccaaagtggaaactctgccctggcccccatcgtgtccaccatagccatcgtgctgacattatcctgccacatcctcctgagacgcaaactcaccgcacccgtggcatttagtgtgattgccatgtttaatgtaatgaagttttccattgcaatcttgcccttctccatcaaagcaatggctgaagcgaatgtctctctaaggagaatgaagaaaattctcatagataaaagccccccatcttacatcacccaaccagaagacccagatactgtcttgcttttagcaaatgccaccttgacatgggagcatgaagccagcaggaaaagtaccccaaagaaattgcagaaccagaaaaggcatttatgcaagaaacagaggtcagaggcatacagtgagaggagtccaccagccaagggagccactggcccagaggagcaaagtgacagcctcaaatcggttctgcacagcataagctttgtggtgagaaaggggaagatcttgggaatatgtgggaatgtgggaagtggaaagagctccctccttgcagctctcctaggacagatgcagctgcagaaaggggtggtggcagtcaatggaactttggcctacgtttcacagcaggcatggatctttcatggaaatgtgagagaaaacatactctttggagaaaagtatgatcaccaaaggtatcagcacacagtccgcgtctgtggcctccagaaggacctgagcaacctcccctatggagacctgactgagattggggagcggggcctcaacctctctggggggcagaggcagaggattagcctggcccgcgctgtctactccgaccgtcagctctacctgctggacgaccccctgtcggccgtggacgcccacgtggggaagcacgtctttgaggagtgcattaagaagacgctcaggggaaagacagtcgtcctggtgacccaccagctacagttcttagagtcttgtgatgaagttattttattagaagatggagagatttgtgaaaagggaacccacaaggagttaatggaggagagagggcgctatgcaaaactgattcacaacctgcgaggattgcagttcaaggatcctgaacacctttacaatgcagcaatggtggaagccttcaaggagagccctgctgagagagaggaagatgctggtataatcgttcctgagcaccagctcatccagactgaatccccccaggaaggaaccgtgacctggaaaacatatcacacgtacattaaggcttctggagggtacctcctttctctcttcactgtgttcctcttcctcctgatgattggcagcgctgccttcagcaactggtggctgggtctctggttggacaagggctcacggatgacctgtgggccccagggcaacaggaccatgtgtgaggtcggcgcggtgctggcagacatcggtcagcatgtgtaccagtgggtgtacactgcaagcatggtgttcatgctggtgtttggcgtcaccaaaggcttcgtcttcaccaagaccacactgatggcatcctcctctctgcatgacacggtgtttgataagatcttaaagagcccaatgagtttctttgacacgactcccactggcaggctaatgaaccgtttttccaaggatatggacgagctggatgtgaggctgccgtttcacgcagagaactttctgcagcagttttttatggtggtgtttattctcgtgatcttggctgctgtgtttcctgctgtccttttagtcgtggccagccttgctgtaggcttcttcattctgttacgcattttccacagaggagtccaggagctcaagaaggtggagaatgtcagccggtcaccctggttcacccacatcacctcctccatgcagggcctgggcatcattcacgcctatggcaagaaggagagctgcatcacctagtttaagacgctaaacgacgaaaactccagtcacctcctctactttaactgtgctctcaggtggtttgcgctgagaatggatgtcctcatgaacatccttaccttcactgtggccttgttggtgaccctgagtttctcctccatcagtacttcatccaaaggcctgtcattgtcatacatcatccagctgagcggactgctccaagtgtgtgtgcgaacgggaacagagacgcaagccaaattcacctccgtggagctgctcagggaatacatttcgacctgtgttcctgaatgcactcatcccctcaaagtggggacctgtcccaaggactggcccagccgtggggagatcaccttcagagactatcagatgagatacagagacaacaccccccttgttctcgacagcctgaacttgaacatacaaagtgggcagacagtcgggattgttggaagaacaggttccggaaagtcatcgttaggaatggctttgtttcgtctggtggagccagccagtggcacaatctttattgatgaggtggatatctgcattctcagcttggaagacctcagaaccaagctgactgtgatcccacaggatcctgtcctgtttgtaggtacagtaaggtacaacttggatccctttgagagtcacaccgatgagatgctctggcaggttctggagagaacattcatgagagacacaataatgaaactcccagaaaaattacaggcagaagtcacagaaaatggagaaaacttctcagtaggggaacgtcagctgctttgtgtggcccgagctcttctccgtaattcaaagatcattctccttgatgaagccaccgcctctatggactccaagactgacaccctggttcagaacaccatcaaagatgccttcaagggctgcactgtgctgaccatcgcccaccgcctcaacacagttctcaactgcgatcacgtcctggttatggaaaatgggaaggtgattgagtttgacaagcctgaagtccttgcagagaagccagattctgcatttgcgatgttactagcagcagaagtcagattgtagaggtcctggcggctgattc

SEQ ID NO: 2964 - DNA, 544 bp, Homo sapiens
  source 1..544: mol_type = unassigned DNA
agttggagaggaggacttcaggcgggtgggacaagagaaactgaatctgaggtccttggggagaagcaggccctggagtcctgggcagcagatgccaggctctgagccccatgactgctgaccctcctcccctccctctcatcctcagcccaggtaaagcttcatttccagcccagagtgaaagtgtccccaggccaaaagcccagggctccaggctgccatcaggatggtgggtgaaggaccctaccttatctcagatctggaccagcgaggccggcggagatcctttgcagaaagatatgaccccagcctgaagaccatgatcccagtgcgaccctgtgcaaggttagcacccaacccggtggatgatgccgggctactctccttcgccacattttcctggctcacgccggtgatggtgaaaggctaccggcaaaggctgaccgtagacaccctgcccccattgtcgacatatgactcatctgacaccaatgccaaaagatttcgagtcctttgggatgaagaggtagcaagggtgggtcct

SEQ ID NO: 2965 - DNA, 1224 bp, Homo sapiens
  source 1..1224: mol_type = unassigned DNA
agttggagaggaggacttcaggcgggtgggacaagagaaactgaatctgaggtccttggggagaagcaggccctggagtcctgggcagcagatgccaggctctgagccccatgactgctgaccctcctcccctccctctcatcctcagcccagagtgaaagtgtccccaggccaaaagcccagggctccaggctgccatcaggatggtgggtgaaggaccctaccttatctcagatctggaccagcgaggccggcggagatcctttgcagaaagatatgaccccagcctgaagaccatgatcccagtgcgaccctgtgcaaggttagcacccaacccggtggatgatgccgggctactctccttcgccacattttcctggctcacgccggtgatggtgaaaggctaccggcaaaggctgaccgtagacaccctgcccccattgtcgacatatgactcatctgacaccaatgccaaaagatttcgagtcctttgggatgaagaggtagcaagggtgggtcctgagaaggcctctctgagccacgtggtgtggaaattccagaggacacgcgtgttgatggacatcgtggccaacatcctgtgcatcatcatggcagccatagggccgacagttctcattcaccaaatcctccagcagactgagaggacctctgggaaagtctgggttggcattggactgtgcatagccctttttgccaccgagtttaccaaagtcttcttttgggcccttgcctgggccatcaactaccgcacggccatccggttgaaggtggcgctctccaccttggtttttgaaaacctagtgtccttcaagacattgacccacatctctgttggcgaggtgctcaatatactgtcaagtgatagctattctttgtttgaagctgccttgttttgtcctttgccagccaccatcccgatcctaatggtcttttgtgcggcgtacgcctttttcattctggggcccacagctctcatcgggatatcagtatgtttatggccaagctcaattcagctttccgaaggtcagcaattttggtgacagacaagcgagttcagacaatgaatgagtttctgacctgcatcaggctgatcaaaatgtatgcctgggagaaatcttttaccaacactatccaagatataagaaggagggaaagaaaattactggaaaaagctggatttgtccaaagtggaaactctgccct

SEQ ID NO: 2966 - DNA, 1714 bp, Homo sapiens
  source 1..1714: mol_type = unassigned DNA
tttctttgatgaaacaagtaaagaagaaacaacacaatcatattaatagaagagtcttcgttccagacgcagtccaggaatcatgctggagaagttctgcaactctactttttggaattcctcattcctggacagtccggaggcagacctgccactttgttttgagcaaactgttctggtgtggattcccttgggctacctatggctcctggccccctggcagcttctccacgtgtataaatccaggaccaagagatcctctaccaccaaactctatcttgctaagcaggtattcgttggttttcttcttattctagcagccatagagctggcccttgtactcacagaagactctggacaagccacagtccctgctgttcgatataccaatccaagcctctacctaggcacatggctcctggttttgctgatccaatacagcagacaatggtgtgtacagaaaaactcctggttcctgtccctattctggattctctcgatactctgtggcactttccaatttcagactctgatccggacactcttacagggtgacaattctaatctagcctactcctgcctgttcttcatctcctacggattccagatcctgatcctgatcttttcagcattttcagaaaataatgagtcatcaaataatccatcatccatagcttcattcctgagtagcattacctacagctggtatgacagcatcattctgaaaggctacaagcgtcctctgacactcgaggatgtctgggaagttgatgaagagatgaaaaccaagacattagtgagcaagtttgaaacgcacatgaagagagagctgcagaaagccaggcgggcactccagagacggcaggagaagagctcccagcagaactctggagccaggctgcctggcttgaacaagaatcagagtcaaagccaagatgcccttgtcctggtaactttcccttgagtgtctgtgtgagcgcgctgcatgtttcaggcaagggtacatcagcatcatggcgattctgtccttacatttttatagcacttcatacttctcagtgcacttcatattattaatggtattcacaatactgatactaccttagtgatggatacatggcgtgtaatgtactgttctctttcctttggggtacttttgaaattttccagaatgaaacgtggttttgaaaaaaataataccttagcatttctagattttgcaccttggtacaaattagcataagcaggcaatttgttgattcattcacttgaaaatatttattgagcacaactgtgtgtcagtgaccattctgggcactaaaagattgctcatcttttgtgagctagaaaatatgtagtaagcccatacataggttactctttgaaagtaataatagctattaagaaaataaaacaatagtgtatttggagtgaagtgcgacttgagacagggtaacaggggaagcttctcagaggagatgacatctgaacagacactcaaatgatgagatcaggccctctgagggacagtcagagggaagtgtgttccagtcagaaggagcaggcatgcgaggctgagaggggaacacatttggcttgctcagggaatggcaagaagatccaggacagggtgcgcatggggtgagatgggctcaaggaagtggacagggattaagctatgtggacccctgtgggccacaataaggaatctgga

SEQ ID NO: 2967 - DNA, 5312 bp, Homo sapiens
  source 1..5312: mol_type = unassigned DNA
acatcagaatggtagataattcctgttccactttctttgatgaaacaagtaaagaagaaacaacacaatcatattaatagaagagtcttcgttccagacgcagtccaggaatcatgctggagaagttctgcaactctactttttggaattcctcattcctggacagtccggaggcagacctgccactttgttttgagcaaactgttctggtgtggattcccttgggctacctatggctcctggccccctggcagcttctccacgtgtataaatccaggaccaagagatcctctaccaccaaactctatcttgctaagcaggtattcgttggttttcttcttattctagcagccatagagctggcccttgtactcacagaagactctggacaagccacagtccctgctgttcgatataccaatccaagcctctacctaggcacatggctcctggttttgctgatccaatacagcagacaatggtgtgtacagaaaaactcctggttcctgtccctattctggattctctcgatactctgtggcactttccaatttcagactctgatccggacactcttacagggtgacaattctaatctagcctactcctgcctgttcttcatctcctacggattccagatcctgatcctgatcttttcagcattttcagaaaataatgagtcatcaaataatccatcatccatagcttcattcctgagtagcattacctacagctggtatgacagcatcattctgaaaggctacaagcgtcctctgacactcgaggatgtctgggaagttgatgaagagatgaaaaccaagacattagtgagcaagtttgaaacgcacatgaagagagagctgcagaaagccaggcgggcactccagagacggcaggagaagagctcccagcagaactctggagccaggctgcctggcttgaacaagaatcagagtcaaagccaagatgcccttgtcctggaagatgttgaaaagaaaaaaaagaagtctgggaccaaaaaagatgttccaaaatcctggttgatgaaggctctgttcaaaactttctacatggtgctcctgaaatcattcctactgaagctagtgaatgacatcttcacgtttgtgagtcctcagctgctgaaattgctgatctcctttgcaagtgaccgtgacacatatttgtggattggatatctctgtgcaatcctcttattcactgcggctctcattcagtctttctgccttcagtgttatttccaactgtgcttcaagctgggtgtaaaagtacggacagctatcatggcttctgtatataagaaggcattgaccctatccaacttggccaggaaggagtacaccgttggagaaacagtgaacctgatgtctgtggatgcccagaagctcatggatgtgaccaacttcatgcacatgctgtggtcaagtgttctacagattgtcttatctatcttcttcctatggagagagttgggaccctcagtcttagcaggtgttggggtgatggtgcttgtaatcccaattaatgcgatactgtccaccaagagtaagaccattcaggtcaaaaatatgaagaataaagacaaacgtttaaagatcatgaatgagattcttagtggaatcaagatcctgaaatattttgcctgggaaccttcattcagagaccaagtacaaaacctccggaagaaagagctcaagaacctgctggcctttagtcaactacagtgtgtagtaatattcgtcttccagttaactccagtcctggtatctgtggtcacattttctgtttatgtcctggtggatagcaacaatattttggatgcacaaaaggccttcacctccattaccctcttcaatatcctgcgctttcccctgagcatgcttcccatgatgatctcctccatgctccaggccagtgtttccacagagcggctagagaagtacttgggaggggatgacttggacacatctgccattcgacatgactgcaattttgacaaagccatgcagttttctgaggcctcctttacctgggaacatgattcggaagccacagtccgagatgtgaacctggacattatggcaggccaacttgtggctgtgataggccctgtcggctctgggaaatcctccttgatatcagccatgctgggagaaatggaaaatgtccacgggcacatcaccatcaagggcaccactgcctatgtcccacagcagtcctggattcagaatggcaccataaaggacaacatcctttttggaacagagtttaatgaaaagaggtaccagcaagtactggaggcctgtgctctcctcccagacttggaaatgctgcctggaggagatttggctgagattggagagaagggtataaatcttagtgggggtcagaagcagcggatcagcctggccagagctacctaccaaaatttagacatctatcttctagatgaccccctgtctgcagtggatgctcatgtaggaaaacatatttttaataaggtcttgggccccaatggcctgttgaaaggcaagactcgactcttggttacacatagcatgcactttcttcctcaagtggatgagattgtagttctggggaatggaacaattgtagagaaaggatcctacagtgctctcctggccaaaaaaggagagtttgctaagaatctgaagacatttctaagacatacaggccctgaagaggaagccacagtccatgatggcagtgaagaagaagacgatgactatgggctgatatccagtgtggaagagatccccgaagatgcagcctccataaccatgagaagagagaacagctttcgtcgaacacttagccgcagttctaggtccaatggcaggcatctgaagtccctgagaaactccttgaaaactcggaatgtgaatagcctgaaggaagacgaagaactagtgaaaggacaaaaactaattaagaaggaattcatagaaactggaaaggtgaagttctccatctacctggagtacctacaagcaataggattgttttcgatattcttcatcatccttgcgtttgtgatgaattctgtggcttttattggatccaacctctggctcagtgcttggaccagtgactctaaaatcttcaatagcaccgactatccagcatctcagagggacatgagagttggagtctacggagctctgggattagcccaaggtatatttgtgttcatagcacatttctggagtgcctttggtttcgtccatgcatcaaatatcttgcacaagcaactgctgaacaatatccttcgagcacctatgagattttttgacacaacacccacaggccggattgtgaacaggtttgccggcgatatttccacagtggatgacaccctgcctcagtccttgcgcagctggattacatgcttcctggggataatcagcacccttgtcatgatctgcatggccactcctgtcttcaccatcatcgtcattcctcttggcattatttatgtatctgttcagatgttttatgtgtctacctcccgccagctgaggcgtctggactctgtcaccaggtccccaatctactctcacttcagcgagaccgtatcaggtttgccagttatccgtgcctttgagcaccagcagcgatttctgaaacacaatgaggtgaggattgacaccaaccagaaatgtgtcttttcctggatcacctccaacaggtggcttgcaattcgcctggagctggttgggaacctgactgtcttcttttcagccttgatgatggttatttatagagataccctaagtggggacactgttggctttgttctgtccaatgcactcaatatcacacaaaccctgaactggctggtgaggatgacatcagaaatagagaccaacattgtggctgttgagcgaataactgagtacacaaaagtggaaaatgaggcaccctgggtgactgataagaggcctccgccagattggcccagcaaaggcaagatccagtttaacaactaccaagtgcggtaccgacctgagctggatctggtcctcagagggatcacttgtgacatcggtagcatggagaagattggtgtggtgggcaggacaggagctggaaagtcatccctcacaaactgcctcttcagaatcttagaggctgccggtggtcagattatcattgatggagtagatattgcttccattgggctccacgacctccgagagaagctgaccatcatcccccaggaccccatcctgttctctggaagcctgaggatgaatctcgaccctttcaacaactactcagatgaggagatttggaaggccttggagctggctcacctcaagtcttttgtggccagcctgcaacttgggttatcccacgaagtgacagaggctggtggcaacctgagcataggccagaggcagctgctgtgcctgggcagggctctgcttcggaaatccaagatcctggtcctggatgaggccactgctgcggtggatctagagacagacaacctcattcagacgaccatccaaaacgagttcgcccactgcacagtgatcaccatcgcccacaggctgcacaccatcatggacagtgacaaggtaatggtcctagacaacgggaagattatagagtgcggcagccctgaagaactgctacaaatccctggacccttttactttatggctaaggaagctggcattgagaatgtgaacagcacaaaattctagcagaaggccccatgggttagaaaaggactataagaataatttcttatttaattttattttttataaaatacagaatacatacaaaagtgtgtataaaatgtacgttttaaaaaaggataagtgaacacccatgaacctactacccaggttaagaaaataaatgtcaccaggtacttgagaaacccctcgattgtctacctcgatcgtacttccttgctacccacccctcccagggacaaccactgtcctgaatttcacgataattattcctttgcctttcatttctgttttatcacctttgtatgtatctttaaacaacatatacccttttttacttatgtaaatggactgactcatactgcatacatcttctatgacttgattcttttgttcaatattatatctgagattcatccatggtgatgcaaataggtgcattattttttttcactgctctgtagtctggcattgtatgaatacagcacaatgtatcagttttaatattggggatcattagcattattctcaggtttttaaaaattataagcagtactactatgg

SEQ ID NO: 2968 - DNA, 5166 bp, Homo sapiens
  source 1..5166: mol_type = unassigned DNA
gcggaggcggctccggcgcccgctctgcccgccgctgggtccgaccgcgctcgccttccttgcagccgcgcctcggccccatggacgccctgtgcggttccggggagctcggctccaagttctgggactccaacctgtctgtgcacacagaaaacccggacctcactccctgcttccagaactccctgctggcctgggtgccctgcatctacctgtgggtcgccctgccctgctacttgctctacctgcggcaccattgtcgtggctacatcatcctctcccacctgtccaagctcaagatggtcctgggtgtcctgctgtggtgcgtctcctgggcggaccttttttactccttccatggcctggtccatggccgggcccctgcccctgttttctttgtcacccccttggtggtgggggtcaccatgctgctggccaccctgctgatacagtatgagcggctgcagggcgtacagtcttcgggggtcctcattatcttctggttcctgtgtgtggtctgcgccatcgtcccattccgctccaagatccttttagccaaggcagagggtgagatctcagaccccttccgcttcaccaccttctacatccactttgccctggtactctctgccctcatcttggcctgcttcagggagaaacctccatttttctccgcaaagaatgtcgaccctaacccctaccctgagaccagcgctggctttctctcccgcctgtttttctggtggttcacaaagatggccatctatggctaccggcatcccctggaggagaaggacctctggtccctaaaggaagaggacagatcccagatggtggtgcagcagctgctggaggcatggaggaagcaggaaaagcagacggcacgacacaaggcttcagcagcacctgggaaaaatgcctccggcgaggacgaggtgctgctgggtgcccggcccaggccccggaagccctccttcctgaaggccctgctggccaccttcggctccagcttcctcatcagtgcctgcttcaagcttatccaggacctgctctccttcatcaatccacagctgctcagcatcctgatcaggtttatctccaaccccatggccccctcctggtggggcttcctggtggctgggctgatgttcctgtgctccatgatgcagtcgctgatcttacaacactattaccactacatctttgtgactggggtgaagtttcgtactgggatcatgggtgtcatctacaggaaggctctggttatcaccaactcagtcaaacgtgcgtccactgtgggggaaattgtcaacctcatgtcagtggatgcccagcgcttcatggaccttgcccccttcctcaatctgctgtggtcagcacccctgcagatcatcctggcgatctacttcctctggcagaacctaggtccctctgtcctggctggagtcgctttcatggtcttgctgattccactcaacggagctgtggccgtgaagatgcgcgccttccaggtaaagcaaatgaaattgaaggactcgcgcatcaagctgatgagtgagatcctgaacggcatcaaggtgctgaagctgtacgcctgggagcccagcttcctgaagcaggtggagggcatcaggcagggtgagctccagctgctgcgcacggcggcctacctccacaccacaaccaccttcacctggatgtgcagccccttcctggtgaccctgatcaccctctgggtgtacgtgtacgtggacccaaacaatgtgctggacgccgagaaggcctttgtgtctgtgtccttgtttaatatcttaagacttcccctcaacatgctgccccagttaatcagcaacctgactcaggccagtgtgtctctgaaacggatccagcaattcctgagccaagaggaacttgacccccagagtgtggaaagaaagaccatctccccaggctatgccatcaccatacacagtggcaccttcacctgggcccaggacctgccccccactctgcacagcctagacatccaggtcccgaaaggggcactggtggccgtggtggggcctgtgggctgtgggaagtcctccctggtgtctgccctgctgggagagatggagaagctagaaggcaaagtgcacatgaagggctccgtggcctatgtgccccagcaggcatggatccagaactgcactcttcaggaaaacgtgcttttcggcaaagccctgaaccccaagcgctaccagcagactctggaggcctgtgccttgctagctgacctggagatgctgcctggtggggatcagacagagattggagagaagggcattaacctgtctgggggccagcggcagcgggtcagtctggctcgagctgtttacagtgatgccgatattttcttgctggatgacccactgtccgcggtggactctcatgtggccaagcacatctttgaccacgtcatcgggccagaaggcgtgctggcaggcaagacgcgagtgctggtgacgcacggcattagcttcctgccccagacagacttcatcattgtgctagctgatggacaggtgtctgagatgggcccgtacccagccctgctgcagcgcaacggctcctttgccaactttctctgcaactatgcccccgatgaggaccaagggcacctggaggacagctggaccgcgttggaaggtgcagaggataaggaggcactgctgattgaagacacactcagcaaccacacggatctgacagacaatgatccagtcacctatgtggtccagaagcagtttatgagacagctgagtgccctgtcctcagatggggagggacagggtcggcctgtaccccggaggcacctgggtccatcagagaaggtgcaggtgacagaggcgaaggcagatggggcactgacccaggaggagaaagcagccattggcactgtggagctcagtgtgttctgggattatgccaaggccgtggggctctgtaccacgctggccatctgtctcctgtatgtgggtcaaagtgcggctgccattggagccaatgtgtggctcagtgcctggacaaatgatgccatggcagacagtagacagaacaacacttccctgaggctgggcgtctatgctgctttaggaattctgcaagggttcttggtgatgctggcagccatggccatggcagcgggtggcatccaggctgcccgtgtgttgcaccaggcactgctgcacaacaagatacgctcgccacagtccttctttgacaccacaccatcaggccgcatcctgaactgcttctccaaggacatctatgtcgttgatgaggttctggcccctgtcatcctcatgctgctcaattccttcttcaacgccatctccactcttgtggtcatcatggccagcacgccgctcttcactgtggtcatcctgcccctggctgtgctctacaccttagtgcagcgcttctatgcagccacatcacggcaactgaagcggctggaatcagtcagccgctcacctatctactcccacttttcggagacagtgactggtgccagtgtcatccgggcctacaaccgcagccgggattttgagatcatcagtgatactaaggtggatgccaaccagagaagctgctacccctacatcatctccaaccggtggctgagcatcggagtggagttcgtggggaactgcgtggtgctctttgctgcactatttgccgtcatcgggaggagcagcctgaacccggggctggtgggcctttctgtgtcctactccttgcaggtgacatttgctctgaactggatgatacgaatgatgtcagatttggaatctaacatcgtggctgtggagagggtcaaggagtactccaagacagagacagaggcgccctgggtggtggaaggcagccgccctcccgaaggttggcccccacgtggggaggtggagttccggaattattctgtgcgctaccggccgggcctagacctggtgctgagagacctgagtctgcatgtgcacggtggcgagaaggtggggatcgtgggccgcactggggctggcaagtcttccatgaccctttgcctgttccgcatcctggaggcggcaaagggtgaaatccgcattgatggcctcaatgtggcagacatcggcctccatgacctgcgctctcagctgaccatcatcccgcaggaccccatcctgttctcggggaccctgcgcatgaacctggaccccttcggcagctactcagaggaggacatttggtgggctttggagctgtcccacctgcacacgtttgtgagctcccagccggcaggcctggacttccagtgctcagagggcggggagaatctcagcgtgggccagaggcagctcgtgtgcctggcccgagccctgctccgcaagagccgcatcctggttttagacgaggccacagctgccatcgacctggagactgacaacctcatccaggctaccatccgcacccagtttgatacctgcactgtcctgaccatcgcacaccggcttaacactatcatggactacaccagggtcctggtcctggacaaaggagtagtagctgaatttgattctccagccaacctcattgcagctagaggcatcttctacgggatggccagagatgctggacttgcctaaaatatattcctgagatttcctcctggcctttcctggttttcatcaggaaggaaatgacaccaaatatgtccgcagaatggacttgatagcaaacactgggggcaccttaagattttgcacctgtaaagtgccttacagggtaactgtgctgaatgctttagatgaggaaatgatccccaagtggtgaatgacacgcctaaggtcacagctagtttgagccagttagactagtccccggtctcccgattcccaactgagtgttatttgcacactgcactgttttcaaataacgattttatgaaatgacctctgtcctccctctgatttttcatattttctaaagtttcgtttctgttttttaataaaaagctttttcctcctggaacagaagacagctgctgggtcaggccacccctaggaactcagtcctgtactctggggtgctgcctgaatccattaaaaatgggagtactgatgaaataaaactacatggtcaacagta

SEQ ID NO: 2969 - DNA, 1881 bp, Homo sapiens
  source 1..1881: mol_type = unassigned DNA
gcggaggcggctccggcgcccgctctgcccgccgctgggtccgaccgcgctcgccttccttgcagccgcgcctcggccccatggacgccctgtgcggttccggggagctcggctccaagttctgggactccaacctgtctgtgcacacagaaaacccggacctcactccctgcttccagaactccctgctggcctgggtgccctgcatctacctgtgggtcgccctgccctgctacttgctctacctgcggcaccattgtcgtggctacatcatcctctcccacctgtccaagctcaagatggtcctgggtgtcctgctgtggtgcgtctcctgggcggaccttttttactccttccatggcctggtccatggccgggcccctgcccctgttttctttgtcacccccttggtggtgggggtcaccatgctgctggccaccctgctgatacagtatgagcggctgcagggcgtacagtcttcgggggtcctcattatcttctggttcctgtgtgtggtctgcgccatcgtcccattccgctccaagatccttttagccaaggcagagggtgagatctcagaccccttccgcttcaccaccttctacatccactttgccctggtactctctgccctcatcttggcctgcttcagggagaaacctccatttttctccgcaaagaatgtcgaccctaacccctaccctgagaccagcgctggctttctctcccgcctgtttttctggtggttcacaaagatggccatctatggctaccggcatcccctggaggagaaggacctctggtccctaaaggaagaggacagatcccagatggtggtgcagcagctgctggaggcatggaggaagcaggaaaagcagacggcacgacacaaggcttcagcagcacctgggaaaaatgcctccggcgaggacgaggtgctgctgggtgcccggcccaggccccggaagccctccttcctgaaggccctgctggccaccttcggctccagcttcctcatcagtgcctgcttcaagcttatccaggacctgctctccttcatcaatccacagctgctcagcatcctgatcaggtttatctccaaccccatggccccctcctggtggggcttcctggtggctgggctgatgttcctgtgctccatgatgcagtcgctgatcttacaacactattaccactacatctttgtgactggggtgaagtttcgtactgggatcatgggtgtcatctacaggaaggctctggttatcaccaactcagtcaaacgtgcgtccactgtgggggaaattgtcaacctcatgtcagtggatgcccagcgcttcatggaccttgcccccttcctcaatctgctgtggtcagcacccctgcagatcatcctggcgatctacttcctctggcagaacctaggtccctctgtcctggctggagtcgctttcatggtcttgctgattccactcaacggagctgtggccgtgaagatgcgcgccttccaggtaaagcaaatgaaattgaaggactcgcgcatcaagctgatgagtgagatcctgaacggcatcaaggtgctgaagctgtacgcctgggagcccagcttcctgaagcaggtggagggcatcaggcagggtgagctccagctgctgcgcacggcggcctacctccacaccacaaccaccttcacctggatgtgcagccccttcctggtgaggcttggcacagggctgggtccctgcctccagggctctgggtgcccaggcatggccagggctcattggactctaccctgacaccacctccacgctgctcaggtgaccctgatcaccctctgggtgtacgtgtacgtggacccaaacaatgtgctggacgccg

SEQ ID NO: 2970 - DNA, 5271 bp, Homo sapiens
  source 1..5271: mol_type = unassigned DNA
ccgcgctcgccttccttgcagccgcgcctcggccccatggacgccctgtgcggttccggggagctcggctccaagttctgggactccaacctgtctgtgcacacagaaaacccggacctcactccctgcttccagaactccctgctggcctgggtgccctgcatctacctgtgggtcgccctgccctgctacttgctctacctgcggcaccattgtcgtggctacatcatcctctcccacctgtccaagctcaagatggtcctgggtgtcctgctgtggtgcgtctcctgggcggaccttttttactccttccatggcctggtccatggccgggcccctgcccctgttttctttgtcacccccttggtggtgggggtcaccatgctgctggccaccctgctgatacagtatgagcggctgcagggcgtacagtcttcgggggtcctcattatcttctggttcctgtgtgtggtctgcgccatcgtcccattccgctccaagatccttttagccaaggcagagggtgagatctcagaccccttccgcttcaccaccttctacatccactttgccctggtactctctgccctcatcttggcctgcttcagggagaaacctccatttttctccgcaaagaatgtcgaccctaacccctaccctgagaccagcgctggctttctctcccgcctgtttttctggtggttcacaaagatggccatctatggctaccggcatcccctggaggagaaggacctctggtccctaaaggaagaggacagatcccagatggtggtgcagcagctgctggaggcatggaggaagcaggaaaagcagacggcacgacacaaggcttcagcagcacctgggaaaaatgcctccggcgaggacgaggtgctgctgggtgcccggcccaggccccggaagccctccttcctgaaggccctgctggccaccttcggctccagcttcctcatcagtgcctgcttcaagcttatccaggacctgctctccttcatcaatccacagctgctcagcatcctgatcaggtttatctccaaccccatggccccctcctggtggggcttcctggtggctgggctgatgttcctgtgctccatgatgcagtcgctgatcttacaacactattaccactacatctttgtgactggggtgaagtttcgtactgggatcatgggtgtcatctacaggaaggctctggttatcaccaactcagtcaaacgtgcgtccactgtgggggaaattgtcaacctcatgtcagtggatgcccagcgcttcatggaccttgcccccttcctcaatctgctgtggtcagcacccctgcagatcatcctggcgatctacttcctctggcagaacctaggtccctctgtcctggctggagtcgctttcatggtcttgctgattccactcaacggagctgtggccgtgaagatgcgcgccttccaggtaaagcaaatgaaattgaaggactcgcgcatcaagctgatgagtgagatcctgaacggcatcaaggtgctgaagctgtacgcctgggagcccagcttcctgaagcaggtggagggcatcaggcagggtgagctccagctgctgcgcacggcggcctacctccacaccacaaccaccttcacctggatgtgcagccccttcctggtgaccctgatcaccctctgggtgtacgtgtacgtggacccaaacaatgtgctggacgccgagaaggcctttgtgtctgtgtccttgtttaatatcttaagacttcccctcaacatgctgccccagttaatcagcaacctgactcaggccagtgtgtctctgaaacggatccagcaattcctgagccaagaggaacttgacccccagagtgtggaaagaaagaccatctccccaggctatgccatcaccatacacagtggcaccttcacctgggcccaggacctgccccccactctgcacagcctagacatccaggtcccgaaaggggcactggtggccgtggtggggcctgtgggctgtgggaagtcctccctggtgtctgccctgctgggagagatggagaagctagaaggcaaagtgcacatgaagggctccgtggcctatgtgccccagcaggcatggatccagaactgcactcttcaggaaaacgtgcttttcggcaaagccctgaaccccaagcgctaccagcagactctggaggcctgtgccttgctagctgacctggagatgctgcctggtggggatcagacagagattggagagaagggcattaacctgtctgggggccagcggcagcgggtcagtctggctcgagctgtttacagtgatgccgatattttcttgctggatgacccactgtccgcggtggactctcatgtggccaagcacatctttgaccacgtcatcgggccagaaggcgtgctggcaggcaagacgcgagtgctggtgacgcacggcattagcttcctgccccagacagacttcatcattgtgctagctgatggacaggtgtctgagatgggcccgtacccagccctgctgcagcgcaacggctcctttgccaactttctctgcaactatgcccccgatgaggaccaagggcacctggaggacagctggaccgcgttggaaggtgcagaggataaggaggcactgctgattgaagacacactcagcaaccacacggatctgacagacaatgatccagtcacctatgtggtccagaagcagtttatgagacagctgagtgccctgtcctcagatggggagggacagggtcggcctgtaccccggaggcacctgggtccatcagagaaggtgcaggtgacagaggcgaaggcagatggggcactgacccaggaggagaaagcagccattggcactgtggagctcagtgtgttctgggattatgccaaggccgtggggctctgtaccacgctggccatctgtctcctgtatgtgggtcaaagtgcggctgccattggagccaatgtgtggctcagtgcctggacaaatgatgccatggcagacagtagacagaacaacacttccctgaggctgggcgtctatgctgctttaggaattctgcaagggttcttggtgatgctggcagccatggccatggcagcgggtggcatccaggctgcccgtgtgttgcaccaggcactgctgcacaacaagatacgctcgccacagtccttctttgacaccacaccatcaggccgcatcctgaactgcttctccaaggacatctatgtcgttgatgaggttctggcccctgtcatcctcatgctgctcaattccttcttcaacgccatctccactcttgtggtcatcatggccagcacgccgctcttcactgtggtcatcctgcccctggctgtgctctacaccttagtgcagcgcttctatgcagccacatcacggcaactgaagcggctggaatcagtcagccgctcacctatctactcccacttttcggagacagtgactggtgccagtgtcatccgggcctacaaccgcagccgggattttgagatcatcagtgatactaaggtggatgccaaccagagaagctgctacccctacatcatctccaaccggtcagaagccgcctccctcgctccctgctcctccaggaattcccagcaggctctctggtgttcagggtccttgtccctcctttcccctaagcagaaaactggccctgccctgcccctgccccatttcctcctcatctgatcccccataggtggctgagcatcggagtggagttcgtggggaactgcgtggtgctctttgctgcactatttgccgtcatcgggaggagcagcctgaacccggggctggtgggcctttctgtgtcctactccttgcaggtgacatttgctctgaactggatgatacgaatgatgtcagatttggaatctaacatcgtggctgtggagagggtcaaggagtactccaagacagagacagaggcgccctgggtggtggaaggcagccgccctcccgaaggttggcccccacgtggggaggtggagttccggaattattctgtgcgctaccggccgggcctagacctggtgctgagagacctgagtctgcatgtgcacggtggcgagaaggtggggatcgtgggccgcactggggctggcaagtcttccatgaccctttgcctgttccgcatcctggaggcggcaaagggtgaaatccgcattgatggcctcaatgtggcagacatcggcctccatgacctgcgctctcagctgaccatcatcccgcaggaccccatcctgttctcggggaccctgcgcatgaacctggaccccttcggcagctactcagaggaggacatttggtgggctttggagctgtcccacctgcacacgtttgtgagctcccagccggcaggcctggacttccagtgctcagagggcggggagaatctcagcgtgggccagaggcagctcgtgtgcctggcccgagccctgctccgcaagagccgcatcctggttttagacgaggccacagctgccatcgacctggagactgacaacctcatccaggctaccatccgcacccagtttgatacctgcactgtcctgaccatcgcacaccggcttaacactatcatggactacaccagggtcctggtcctggacaaaggagtagtagctgaatttgattctccagccaacctcattgcagctagaggcatcttctacgggatggccagagatgctggacttgcctaaaatatattcctgagatttcctcctggcctttcctggttttcatcaggaaggaaatgacaccaaatatgtccgcagaatggacttgatagcaaacactgggggcaccttaagattttgcacctgtaaagtgccttacagggtaactgtgctgaatgctttagatgaggaaatgatccccaagtggtgaatgacacgcctaaggtcacagctagtttgagccagttagactagtccccggtctcccgattcccaactgagtgttatttgcacactgcactgttttcaaataacgattttatgaaatgacctctgtcctccctctgatttttcatattttctaaagtttcgtttctgttttttaataaaaagctttttcctcctggaacagaagacagctgctgggtcaggccacccctaggaactcagtcctgtactctggggtgctgcctgaatccattaaaaatgggagtactgatgaaataaaactacatggtcaacagta

SEQ ID NO: 2971 - DNA, 5837 bp, Homo sapiens
  source 1..5837: mol_type = unassigned DNA
ggacaggcgtggcggccggagccccagcatccctgcttgaggtccaggagcggagcccgcggccaccgccgcctgatcagcgcgaccccggcccgcgcccgccccgcccggcaagatgctgcccgtgtaccaggaggtgaagcccaacccgctgcaggacgcgaacctctgctcacgcgtgttcttctggtggctcaatcccttgtttaaaattggccataaacggagattagaggaagatgatatgtattcagtgctgccagaagaccgctcacagcaccttggagaggagttgcaagggttctgggataaagaagttttaagagctgagaatgacgcacagaagccttctttaacaagagcaatcataaagtgttactggaaatcttatttagttttgggaatttttacgttaattgaggaaagtgccaaagtaatccagcccatatttttgggaaaaattattaattattttgaaaattatgatcccatggattctgtggctttgaacacagcgtacgcctatgccacggtgctgactttttgcacgctcattttggctatactgcatcacttatatttttatcacgttcagtgtgctgggatgaggttacgagtagccatgtgccatatgatttatcggaaggcacttcgtcttagtaacatggccatggggaagacaaccacaggccagatagtcaatctgctgtccaatgatgtgaacaagtttgatcaggtgacagtgttcttacacttcctgtgggcaggaccactgcaggcgattgcagtgactgccctactctggatggagataggaatatcgtgccttgctgggatggcagttctaatcattctcctgcccttgcaaagctgttttgggaagttgttctcatcactgaggagtaaaactgcaactttcacggatgccaggatcaggaccatgaatgaagttataactggtataaggataataaaaatgtacgcctgggaaaagtcattttcaaatcttattaccaatttgagaaagaaggagatttccaagattctgagaagttcctgcctcagagggatgaatttggcttcatttttcagtgcaagcaaaatcatcgtgtttgtgaccttcaccacctacgtgctcctcggcagtgtgatcacagccagccgcgtgttcgtggcagtgacgctgtatggggctgtgcggctgacggttaccctcttcttcccctcagccattgagagggtgtcagaggcaatcgtcagcatccgaagaatccagacctttttgctacttgatgagatatcacagcgcaaccgtcagctgccgtcagatggtaaaaagatggtgcatgtgcaggattttactgctttttgggataaggcatcagagaccccaactctacaaggcctttcctttactgtcagacctggcgaattgttagctgtggtcggccccgtgggagcagggaagtcatcactgttaagtgccgtgctcggggaattggccccaagtcacgggctggtcagcgtgcatggaagaattgcctatgtgtctcagcagccctgggtgttctcgggaactctgaggagtaatattttatttgggaagaaatacgaaaaggaacgatatgaaaaagtcataaaggcttgtgctctgaaaaaggatttacagctgttggaggatggtgatctgactgtgataggagatcggggaaccacgctgagtggagggcagaaagcacgggtaaaccttgcaagagcagtgtatcaagatgctgacatctatctcctggacgatcctctcagtgcagtagatgcggaagttagcagacacttgttcgaactgtgtatttgtcaaattttgcatgagaagatcacaattttagtgactcatcagttgcagtacctcaaagctgcaagtcagattctgatattgaaagatggtaaaatggtgcagaaggggacttacactgagttcctaaaatctggtatagattttggctcccttttaaagaaggataatgaggaaagtgaacaacctccagttccaggaactcccacactaaggaatcgtaccttctcagagtcttcggtttggtctcaacaatcttctagaccctccttgaaagatggtgctctggagagccaagatacagagaatgtcccagttacactatcagaggagaaccgttctgaaggaaaagttggttttcaggcctataagaattacttcagagctggtgctcactggattgtcttcattttccttattctcctaaacactgcagctcaggttgcctatgtgcttcaagattggtggctttcatactgggcaaacaaacaaagtatgctaaatgtcactgtaaatggaggaggaaatgtaaccgagaagctagatcttaactggtacttaggaatttattcaggtttaactgtagctaccgttctttttggcatagcaagatctctattggtattctacgtccttgttaactcttcacaaactttgcacaacaaaatgtttgagtcaattctgaaagctccggtattattctttgatagaaatccaataggaagaattttaaatcgtttctccaaagacattggacacttggatgatttgctgccgctgacgtttttagatttcatccagacattgctacaagtggttggtgtggtctctgtggctgtggccgtgattccttggatcgcaatacccttggttccccttggaatcattttcatttttcttcggcgatattttttggaaacgtcaagagatgtgaagcgcctggaatctacaactcggagtccagtgttttcccacttatcatcttctctccaggggctctggaccatccgggcatacaaagcagaagagaggtgtcaggaactgtttgatgcacaccaggatttacattcagaggcttggttcttgtttttgacaacgtcccgctggtttgccgtccgtctggatgccatctgtgccatgtttgtcatcatcgttgcctttgggtccctgattctggcaaaaactctggatgccgggcaggttggtttggcactgtcctatgccctcacgctcatggggatgtttcagtggtgtgttcgacaaagtgctgaagttgagaatatgatgatctcagtagaaagggtcattgaatacacagaccttgaaaaagaagcaccttgggaatatcagaaacgcccaccaccagcctggccccatgaaggagtgataatctttgacaatgtgaacttcatgtacagtccaggtgggcctctggtactgaagcatctgacagcactcattaaatcacaagaaaaggttggcattgtgggaagaaccggagctggaaaaagttccctcatctcagccctttttagattgtcagaacccgaaggtaaaatttggattgataagatcttgacaactgaaattggacttcacgatttaaggaagaagatgtcaatcatacctcaggaacctgttttgttcactggaacaatgaggaaaaacctggatccctttaatgagcacacggatgaggaactgtggaatgccttacaagaggtacaacttaaagaaaccattgaagatcttcctggtaaaatggatactgaattagcagaatcaggatccaattttagtgttggacaaagacaactggtgtgccttgccagggcaattctcaggaaaaatcagatattgattattgatgaagcgacggcaaatgtggatccaagaactgatgagttaatacaaaaaaaaatccgggagaaatttgcccactgcaccgtgctaaccattgcacacagattgaacaccattattgacagcgacaagataatggttttagattcaggaagactgaaagaatatgatgagccgtatgttttgctgcaaaataaagagagcctattttacaagatggtgcaacaactgggcaaggcagaagccgctgccctcactgaaacagcaaaacaggtatacttcaaaagaaattatccacatattggtcacactgaccacatggttacaaacacttccaatggacagccctcgaccttaactattttcgagacagcactgtgaatccaaccaaaatgtcaagtccgttccgaaggcattttccactagtttttggactatgtaaaccacattgtacttttttttactttggcaacaaatatttatacatacaagatgctagttcatttgaatatttctcccaacttatccaaggatctccagctctaacaaaatggtttatttttatttaaatgtcaatagttgttttttaaaatccaaatcagaggtgcaggccaccagttaaatgccgtctatcaggttttgtgccttaagagactacagagtcaaagctcatttttaaaggagtaggacaaagttgtcacaggtttttgttgttgtttttattgcccccaaaattacatgttaatttccatttatatcagggattctatttacttgaagactgtgaagttgccattttgtctcattgttttctttgacataactaggatccattatttcccctgaaggcttcttgttagaaaatagtacagttacaaccaataggaacaacaaaaagaaaaagtttgtgacattgtagtagggagtgtgtaccccttactccccatcaaaaaaaaaaatggatacatggttaaaggatagaagggcaatattttatcatatgttctaaaagagaaggaagagaaaatactactttctcaaaatggaagcccttaaaggtgctttgatactgaaggacacaaatgtgaccgtccatcctcctttagagttgcatgacttggacacggtaactgttgcagttttagactcagcattgtgacacttcccaagaaggccaaacctctaaccgacattcctgaaatacgtggcattattcttttttggatttctcatttatggaaggctaaccctctgttgactgtaagccttttggtttgggctgtattgaaatcctttctaaattgcatgaataggctctgctaacgtgatgagacaaactgaaaattattgcaagcattgactataattatgcagtacgttctcaggatgcatccaggggttcattttcatgagcctgtccaggttagtttactcctgaccactaatagcattgtcatttgggctttctgttgaatgaatcaacaaaccacaatacttcctgggaccttttgtactttatttgaactatgagtctttaatttttcctgatgatggtggctgtaatatgttgagttcagtttactaaaggttttactattatggtttgaagtggagtctcatgacctctcagaataaggtgtcacctccctgaaattgcatatatgtatatagacatgcacacgtgtgcatttgtttgtatacatatatttgtccttcgtatagcaagttttttgctcatcagcagagagcaacagatgttttattgagtgaagccttaaaaagcacacaccacacacagctaactgccaaaatacattgaccgtagtagctgttcaactcctagtacttagaaatacacgtatggttaatgttcagtccaacaaaccacacacagtaaatgtttattaatagtcatggttcgtattttaggtgactgaaattgcatcagtgatcataatgaggtttgttaaaacgatagctatattcaaaatgtctatatgtttatttggacttttgaggttaaagacagtcatataaacgtcctgtttctgttttaatgttatcatagaattttttaatgaaactaaattcaattgaaataaatgatagttttcatctccattca

SEQ ID NO: 2972 - DNA, 5702 bp, Homo sapiens
  source 1..5702: mol_type = unassigned DNA
gagcggacaggcgtggcggccggagccccagcatccctgcttgaggtccaggagcggagcccgcggccaccgccgcctgatcagcgcgaccccggcccgcgcccgccccgcccggcaagatgctgcccgtgtaccaggaggtgaagcccaacccgctgcaggacgcgaacctctgctcacgcgtgttcttctggtggctcaatcccttgtttaaaattggccataaacggagattagaggaagatgatatgtattcagtgctgccagaagaccgctcacagcaccttggagaggagttgcaagggttctgggataaagaagttttaagagctgagaatgacgcacagaagccttctttaacaagagcaatcataaagtgttactggaaatcttatttagttttgggaatttttacgttaattgaggaaagtgccaaagtaatccagcccatatttttgggaaaaattattaattattttgaaaattatgatcccatggattctgtggctttgaacacagcgtacgcctatgccacggtgctgactttttgcacgctcattttggctatactgcatcacttatatttttatcacgttcagtgtgctgggatgaggttacgagtagccatgtgccatatgatttatcggaaggcacttcgtcttagtaacatggccatggggaagacaaccacaggccagatagtcaatctgctgtccaatgatgtgaacaagtttgatcaggtgacagtgttcttacacttcctgtgggcaggaccactgcaggcgattgcagtgactgccctactctggatggagataggaatatcgtgccttgctgggatggcagttctaatcattctcctgcccttgcaaagctgttttgggaagttgttctcatcactgaggagtaaaactgcaactttcacggatgccaggatcaggaccatgaatgaagttataactggtataaggataataaaaatgtacgcctgggaaaagtcattttcaaatcttattaccaatttgagaaagaaggagatttccaagattctgagaagttcctgcctcagagggatgaatttggcttcatttttcagtgcaagcaaaatcatcgtgtttgtgaccttcaccacctacgtgctcctcggcagtgtgatcacagccagccgcgtgttcgtggcagtgacgctgtatggggctgtgcggctgacggttaccctcttcttcccctcagccattgagagggtgtcagaggcaatcgtcagcatccgaagaatccagacctttttgctacttgatgagatatcacagcgcaaccgtcagctgccgtcagatggtaaaaagatggtgcatgtgcaggattttactgctttttgggataaggcatcagagaccccaactctacaaggcctttcctttactgtcagacctggcgaattgttagctgtggtcggccccgtgggagcagggaagtcatcactgttaagtgccgtgctcggggaattggccccaagtcacgggctggtcagcgtgcatggaagaattgcctatgtgtctcagcagccctgggtgttctcgggaactctgaggagtaatattttatttgggaagaaatacgaaaaggaacgatatgaaaaagtcataaaggcttgtgctctgaaaaaggatttacagctgttggaggatggtgatctgactgtgataggagatcggggaaccacgctgagtggagggcagaaagcacgggtaaaccttgcaagagcagtgtatcaagatgctgacatctatctcctggacgatcctctcagtgcagtagatgcggaagttagcagacacttgttcgaactgtgtatttgtcaaattttgcatgagaagatcacaattttagtgactcatcagttgcagtacctcaaagctgcaagtcagattctgatattgaaagatggtaaaatggtgcagaaggggacttacactgagttcctaaaatctggtatagattttggctcccttttaaagaaggataatgaggaaagtgaacaacctccagttccaggaactcccacactaaggaatcgtaccttctcagagtcttcggtttggtctcaacaatcttctagaccctccttgaaagatggtgctctggagagccaagatgttgcctatgtgcttcaagattggtggctttcatactgggcaaacaaacaaagtatgctaaatgtcactgtaaatggaggaggaaatgtaaccgagaagctagatcttaactggtacttaggaatttattcaggtttaactgtagctaccgttctttttggcatagcaagatctctattggtattctacgtccttgttaactcttcacaaactttgcacaacaaaatgtttgagtcaattctgaaagctccggtattattctttgatagaaatccaataggaagaattttaaatcgtttctccaaagacattggacacttggatgatttgctgccgctgacgtttttagatttcatccagacattgctacaagtggttggtgtggtctctgtggctgtggccgtgattccttggatcgcaatacccttggttccccttggaatcattttcatttttcttcggcgatattttttggaaacgtcaagagatgtgaagcgcctggaatctacaactcggagtccagtgttttcccacttatcatcttctctccaggggctctggaccatccgggcatacaaagcagaagagaggtgtcaggaactgtttgatgcacaccaggatttacattcagaggcttggttcttgtttttgacaacgtcccgctggtttgccgtccgtctggatgccatctgtgccatgtttgtcatcatcgttgcctttgggtccctgattctggcaaaaactctggatgccgggcaggttggtttggcactgtcctatgccctcacgctcatggggatgtttcagtggtgtgttcgacaaagtgctgaagttgagaatatgatgatctcagtagaaagggtcattgaatacacagaccttgaaaaagaagcaccttgggaatatcagaaacgcccaccaccagcctggccccatgaaggagtgataatctttgacaatgtgaacttcatgtacagtccaggtgggcctctggtactgaagcatctgacagcactcattaaatcacaagaaaaggttggcattgtgggaagaaccggagctggaaaaagttccctcatctcagccctttttagattgtcagaacccgaaggtaaaatttggattgataagatcttgacaactgaaattggacttcacgatttaaggaagaagatgtcaatcatacctcaggaacctgttttgttcactggaacaatgaggaaaaacctggatccctttaatgagcacacggatgaggaactgtggaatgccttacaagaggtacaacttaaagaaaccattgaagatcttcctggtaaaatggatactgaattagcagaatcaggatccaattttagtgttggacaaagacaactggtgtgccttgccagggcaattctcaggaaaaatcagatattgattattgatgaagcgacggcaaatgtggatccaagaactgatgagttaatacaaaaaaaaatccgggagaaatttgcccactgcaccgtgctaaccattgcacacagattgaacaccattattgacagcgacaagataatggttttagattcaggaagactgaaagaatatgatgagccgtatgttttgctgcaaaataaagagagcctattttacaagatggtgcaacaactgggcaaggcagaagccgctgccctcactgaaacagcaaaacaggtatacttcaaaagaaattatccacatattggtcacactgaccacatggttacaaacacttccaatggacagccctcgaccttaactattttcgagacagcactgtgaatccaaccaaaatgtcaagtccgttccgaaggcattttccactagtttttggactatgtaaaccacattgtacttttttttactttggcaacaaatatttatacatacaagatgctagttcatttgaatatttctcccaacttatccaaggatctccagctctaacaaaatggtttatttttatttaaatgtcaatagttgttttttaaaatccaaatcagaggtgcaggccaccagttaaatgccgtctatcaggttttgtgccttaagagactacagagtcaaagctcatttttaaaggagtaggacaaagttgtcacaggtttttgttgttgtttttattgcccccaaaattacatgttaatttccatttatatcagggattctatttacttgaagactgtgaagttgccattttgtctcattgttttctttgacataactaggatccattatttcccctgaaggcttcttgttagaaaatagtacagttacaaccaataggaacaacaaaaagaaaaagtttgtgacattgtagtagggagtgtgtaccccttactccccatcaaaaaaaaaaatggatacatggttaaaggatagaagggcaatattttatcatatgttctaaaagagaaggaagagaaaatactactttctcaaaatggaagcccttaaaggtgctttgatactgaaggacacaaatgtgaccgtccatcctcctttagagttgcatgacttggacacggtaactgttgcagttttagactcagcattgtgacacttcccaagaaggccaaacctctaaccgacattcctgaaatacgtggcattattcttttttggatttctcatttatggaaggctaaccctctgttgactgtaagccttttggtttgggctgtattgaaatcctttctaaattgcatgaataggctctgctaacgtgatgagacaaactgaaaattattgcaagcattgactataattatgcagtacgttctcaggatgcatccaggggttcattttcatgagcctgtccaggttagtttactcctgaccactaatagcattgtcatttgggctttctgttgaatgaatcaacaaaccacaatacttcctgggaccttttgtactttatttgaactatgagtctttaatttttcctgatgatggtggctgtaatatgttgagttcagtttactaaaggttttactattatggtttgaagtggagtctcatgacctctcagaataaggtgtcacctccctgaaattgcatatatgtatatagacatgcacacgtgtgcatttgtttgtatacatatatttgtccttcgtatagcaagttttttgctcatcagcagagagcaacagatgttttattgagtgaagccttaaaaagcacacaccacacacagctaactgccaaaatacattgaccgtagtagctgttcaactcctagtacttagaaatacacgtatggttaatgttcagtccaacaaaccacacacagtaaatgtttattaatagtcatggttcgtattttaggtgactgaaattgcatcagtgatcataatgaggtttgttaaaacgatagctatattcaaaatgtctatatgtttatttggacttttgaggttaaagacagtcatataaacgtcctgtttctgttttaatgttatcatagaattttttaatgaaactaaattcaattgaaataaatgatagttttcatctccattcaga

SEQ ID NO: 2973 - DNA, 3063 bp, Homo sapiens
  source 1..3063: mol_type = unassigned DNA
gagcggacaggcgtggcggccggagccccagcatccctgcttgaggtccaggagcggagcccgcggccaccgccgcctgatcagcgcgaccccggcccgcgcccgccccgcccggcaagatgctgcccgtgtaccaggaggtgaagcccaacccgctgcaggacgcgaacctctgctcacgcgtgttcttctggtggctcaatcccttgtttaaaattggccataaacggagattagaggaagatgatatgtattcagtgctgccagaagaccgctcacagcaccttggagaggagttgcaagggttctgggataaagaagttttaagagctgagaatgacgcacagaagccttctttaacaagagcaatcataaagtgttactggaaatcttatttagttttgggaatttttacgttaattgaggaaagtgccaaagtaatccagcccatatttttgggaaaaattattaattattttgaaaattatgatcccatggattctgtggctttgaacacagcgtacgcctatgccacggtgctgactttttgcacgctcattttggctatactgcatcacttatatttttatcacgttcagtgtgctgggatgaggttacgagtagccatgtgccatatgatttatcggaaggcacttcgtcttagtaacatggccatggggaagacaaccacaggccagatagtcaatctgctgtccaatgatgtgaacaagtttgatcaggtgacagtgttcttacacttcctgtgggcaggaccactgcaggcgattgcagtgactgccctactctggatggagataggaatatcgtgccttgctgggatggcagttctaatcattctcctgcccttgcaaagctgttttgggaagttgttctcatcactgaggagtaaaactgcaactttcacggatgccaggatcaggaccatgaatgaagttataactggtataaggataataaaaatgtacgcctgggaaaagtcattttcaaatcttattaccaatttgagaaagaaggagatttccaagattctgagaagttcctgcctcagagggatgaatttggcttcatttttcagtgcaagcaaaatcatcgtgtttgtgaccttcaccacctacgtgctcctcggcagtgtgatcacagccagccgcgtgttcgtggcagtgacgctgtatggggctgtgcggctgacggttaccctcttcttcccctcagccattgagagggtgtcagaggcaatcgtcagcatccgaagaatccagacctttttgctacttgatgagatatcacagcgcaaccgtcagctgccgtcagatggtaaaaagatggtgcatgtgcaggattttactgctttttgggataaggcatcagagaccccaactctacaaggcctttcctttactgtcagacctggcgaattgttagctgtggtcggccccgtgggagcagggaagtcatcactgttaagtgccgtgctcggggaattggccccaagtcacgggctggtcagcgtgcatggaagaattgcctatgtgtctcagcagccctgggtgttctcgggaactctgaggagtaatattttatttgggaagaaatacgaaaaggaacgatatgaaaaagtcataaaggcttgtgctctgaaaaaggatttacagctgttggaggatggtgatctgactgtgataggagatcggggaaccacgctgagtggagggcagaaagcacgggtaaaccttgcaagagcagtgtatcaagatgctgacatctatctcctggacgatcctctcagtgcagtagatgcggaagttagcagacacttgttcgaactgtgtatttgtcaaattttgcatgagaagatcacaattttagtgactcatcagttgcagtacctcaaagctgcaagtcagattctgatattgaaagatggtaaaatggtgcagaaggggacttacactgagttcctaaaatctggtatagattttggctcccttttaaagaaggataatgaggaaagtgaacaacctccagttccaggaactcccacactaaggaatcgtaccttctcagagtcttcggtttggtctcaacaatcttctagaccctccttgaaagatggtgctctggagagccaagatacagagaatgtcccagttacactatcagaggagaaccgttctgaaggaaaagttggttttcaggcctataagaattacttcagagctggtgctcactggattgtcttcattttccttattctcctaaacactgcagctcaggttgcctatgtgcttcaagattggtggctttcatactgggcaaacaaacaaagtatgctaaatgtcactgtaaatggaggaggaaatgtaaccgagaagctagatcttaactggtacttaggaatttattcaggtttaactgtagctaccgttctttttggcatagcaagatctctattggtattctacgtccttgttaactcttcacaaactttgcacaacaaaatgtttgagtcaattctgaaagctccggtattattctttgatagaaatccaataggaagaattttaaatcgtttctccaaagacattggacacttggatgatttgctgccgctgacgtttttagatttcatccagagatgggatctcgctgtgttgtcctggctggtctcaaactcctaggctcaagcaatcctcctccctcctcaagcaaacctcagtgctgggattataggcatgagccactgtacctggctaaatgttgtttttttgatattcaatttttgtttatagaattttcatttgttttgctcttatacttttcatctttttatgtttattgaccaattaaatatcatttgggtaagcacctatttaagtgtcttaacaatttttctattgagtactctgggtttttgttttgtttttcttactgatttgtagaattctttatgtattctgaattgcagataccttccttctgtactaatgcttatctttttagccctgtaatattgtgttttcataaacatacttatcaatcttt

SEQ ID NO: 2974 - DNA, 2840 bp, Homo sapiens
  source 1..2840: mol_type = unassigned DNA
gagcggacaggcgtggcggccggagccccagcatccctgcttgaggtccaggagcggagcccgcggccaccgccgcctgatcagcgcgaccccggcccgcgcccgccccgcccggcaagatgctgcccgtgtaccaggaggtgaagcccaacccgctgcaggacgcgaacctctgctcacgcgtgttcttctggtggctcaatcccttgtttaaaattggccataaacggagattagaggaagatgatatgtattcagtgctgccagaagaccgctcacagcaccttggagaggagttgcaagggttctgggataaagaagttttaagagctgagaatgacgcacagaagccttctttaacaagagcaatcataaagtgttactggaaatcttatttagttttgggaatttttacgttaattgaggcacttcgtcttagtaacatggccatggggaagacaaccacaggccagatagtcaatctgctgtccaatgatgtgaacaagtttgatcaggtgacagtgttcttacacttcctgtgggcaggaccactgcaggcgattgcagtgactgccctactctggatggagataggaatatcgtgccttgctgggatggcagttctaatcattctcctgcccttgcaaagctgttttgggaagttgttctcatcactgaggagtaaaactgcaactttcacggatgccaggatcaggaccatgaatgaagttataactggtataaggataataaaaatgtacgcctgggaaaagtcattttcaaatcttattaccaatttgagaaagaaggagatttccaagattctgagaagttcctgcctcagagggatgaatttggcttcatttttcagtgcaagcaaaatcatcgtgtttgtgaccttcaccacctacgtgctcctcggcagtgtgatcacagccagccgcgtgttcgtggcagtgacgctgtatggggctgtgcggctgacggttaccctcttcttcccctcagccattgagagggtgtcagaggcaatcgtcagcatccgaagaatccagacctttttgctacttgatgagatatcacagcgcaaccgtcagctgccgtcagatggtaaaaagatggtgcatgtgcaggattttactgctttttgggataaggcatcagagaccccaactctacaaggcctttcctttactgtcagacctggcgaattgttagctgtggtcggccccgtgggagcagggaagtcatcactgttaagtgccgtgctcggggaattggccccaagtcacgggctggtcagcgtgcatggaagaattgcctatgtgtctcagcagccctgggtgttctcgggaactctgaggagtaatattttatttgggaagaaatacgaaaaggaacgatatgaaaaagtcataaaggcttgtgctctgaaaaaggatttacagctgttggaggatggtgatctgactgtgataggagatcggggaaccacgctgagtggagggcagaaagcacgggtaaaccttgcaagagcagtgtatcaagatgctgacatctatctcctggacgatcctctcagtgcagtagatgcggaagttagcagacacttgttcgaactgtgtatttgtcaaattttgcatgagaagatcacaattttagtgactcatcagttgcagtacctcaaagctgcaagtcagattctgatattgaaagatggtaaaatggtgcagaaggggacttacactgagttcctaaaatctggtatagattttggctcccttttaaagaaggataatgaggaaagtgaacaacctccagttccaggaactcccacactaaggaatcgtaccttctcagagtcttcggtttggtctcaacaatcttctagaccctccttgaaagatggtgctctggagagccaagatacagagaatgtcccagttacactatcagaggagaaccgttctgaaggaaaagttggttttcaggcctataagaattacttcagagctggtgctcactggattgtcttcattttccttattctcctaaacactgcagctcaggttgcctatgtgcttcaagattggtggctttcatactgggcaaacaaacaaagtatgctaaatgtcactgtaaatggaggaggaaatgtaaccgagaagctagatcttaactggtacttaggaatttattcaggtttaactgtagctaccgttctttttggcatagcaagatctctattggtattctacgtccttgttaactcttcacaaactttgcacaacaaaatgtttgagtcaattctgaaagctccggtattattctttgatagaaatccaataggaagaattttaaatcgtttctccaaagacattggacacttggatgatttgctgccgctgacgtttttagatttcatccagagatgggatctcgctgtgttgtcctggctggtctcaaactcctaggctcaagcaatcctcctccctcctcaagcaaacctcagtgctgggattataggcatgagccactgtacctggctaaatgttgtttttttgatattcaatttttgtttatagaattttcatttgttttgctcttatacttttcatctttttatgtttattgaccaattaaatatcatttgggtaagcacctatttaagtgtcttaacaatttttctattgagtactctgggtttttgttttgtttttcttactgatttgtagaattctttatgtattctgaattgcagataccttccttctgtactaatgcttatctttttagccctgtaatattgtgttttcataaacatacttatcaatcttttc

SEQ ID NO: 2975 - DNA, 2256 bp, Homo sapiens
  source 1..2256: mol_type = unassigned DNA
gcgcccgccccgcccggcaagatgctgcccgtgtaccaggaggtgaagcccaacccgctgcaggacgcgaacctctgctcacgcgtgttcttctgatggagtctcgctgtgtcacccaggctggagtgcagtggcgcagtctcagctcactgcagcctccacctcctgtgttcaagcagtcctcctgcctcagccaccagactagcaggtctcccccgcctctttcttggaaggacacttgccattggatttaggacccacttggataatccaggatgatgtcttcactccaacatcctcagtttaattccatgtgcaaatacccttttcccaaataacattcaattctttaccaggaaaggtggctcaatcccttgtttaaaattggccataaacggagattagaggaagatgatatgtattcagtgctgccagaagaccgctcacagcaccttggagaggagttgcaagggttctgggataaagaagttttaagagctgagaatgacgcacagaagccttctttaacaagagcaatcataaagtgttactggaaatcttatttagttttgggaatttttacgttaattgaggaaagtgccaaagtaatccagcccatatttttgggaaaaattattaattattttgaaaattatgatcccatggattctgtggctttgaacacagcgtacgcctatgccacggtgctgactttttgcacgctcattttggctatactgcatcacttatatttttatcacgttcagtgtgctgggatgaggttacgagtagccatgtgccatatgatttatcggaaggcacttcgtcttagtaacatggccatggggaagacaaccacaggccagatagtcaatctgctgtccaatgatgtgaacaagtttgatcaggtgacagtgttcttacacttcctgtgggcaggaccactgcaggcgattgcagtgactgccctactctggatggagataggaatatcgtgccttgctgggatggcagttctaatcattctcctgcccttgcaaagctgttttgggaagttgttctcatcactgaggagtaaaactgcaactttcacggatgccaggatcaggaccatgaatgaagttataactggtataaggataataaaaatgtacgcctgggaaaagtcattttcaaatcttattaccaatttgagaaagaaggagatttccaagattctgagaagttcctgcctcagagggatgaatttggcttcatttttcagtgcaagcaaaatcatcgtgtttgtgaccttcaccacctacgtgctcctcggcagtgtgatcacagccagccgcgtgttcgtggcagtgacgctgtatggggctgtgcggctgacggttaccctcttcttcccctcagccattgagagggtgtcagaggcaatcgtcagcatccgaagaatccagacctttttgctacttgatgagatatcacagcgcaaccgtcagctgccgtcagatggtaaaaagatggtgcatgtgcaggattttactgctttttgggataaggcatcagagaccccaactctacaaggcctttcctttactgtcagacctggcgaattgttagctgtggtcggccccgtgggagcagggaagtcatcactgttaagtgccgtgctcggggaattggccccaagtcacgggctggtcagcgtgcatggaagaattgcctatgtgtctcagcagccctgggtgttctcgggaactctgaggagtaatattttatttgggaagaaatacgaaaaggaacgatatgaaaaagtcataaaggcttgtgctctgaaaaaggatttacagctgttggaggatggtgatctgactgtgataggagatcggggaaccacgctgagtggagggcagaaagcacgggtaaaccttgcaagagcagtgtatcaagatgctgacatctatctcctggacgatcctctcagtgcagtagatgcggaagttagcagacacttgttcgaactgtgtatttgtcaaattttgcatgagaagatcacaattttagtgactcatcagttgcagtacctcaaagctgcaagtcagattctgatattgaaagatggtaaaatggtgcagaaggggacttacactgagttcctaaaatctggtatagattttggctcccttttaaagaaggataatgaggaaagtgaacaacctccagttccaggaactcccacactaaggaatcgtaccttctcagagt

SEQ ID NO: 2976 - DNA, 4283 bp, Homo sapiens
  source 1..4283: mol_type = unassigned DNA
cactcagagaagatgaaggatatcgacataggaaaagagtatatcatccccagtcctgggtatagaagtgtgagggagagaaccagcacttctgggacgcacagagaccgtgaagattccaagttcaggagaactcgaccgttggaatgccaagatgccttggaaacagcagcccgagccgagggcctctctcttgatgcctccatgcattctcagctcagaatcctggatgaggagcatcccaagggaaagtaccatcatggcttgagtgctctgaagcccatccggactacttccaaacaccagcacccagtggacaatgctgggcttttttcctgtatgactttttcgtggctttcttctctggcccgtgtggcccacaagaagggggagctctcaatggaagacgtgtggtctctgtccaagcacgagtcttctgacgtgaactgcagaagactagagagactgtggcaagaagagctgaatgaagttgggccagacgctgcttccctgcgaagggttgtgtggatcttctgccgcaccaggctcatcctgtccatcgtgtgcctgatgatcacgcagctggctggcttcagtggaccagccttcatggtgaaacacctcttggagtatacccaggcaacagagtctaacctgcagtacagcttgttgttagtgctgggcctcctcctgacggaaatcgtgcggtcttggtcgcttgcactgacttgggcattgaattaccgaaccggtgtccgcttgcggggggccatcctaaccatggcatttaagaagatccttaagttaaagaacattaaagagaaatccctgggtgagctcatcaacatttgctccaacgatgggcagagaatgtttgaggcagcagccgttggcagcctgctggctggaggacccgttgttgccatcttaggcatgatttataatgtaattattctgggaccaacaggcttcctgggatcagctgtttttatcctcttttacccagcaatgatgtttgcatcacggctcacagcatatttcaggagaaaatgcgtggccgccacggatgaacgtgtccagaagatgaatgaagttcttacttacattaaatttatcaaaatgtatgcctgggtcaaagcattttctcagagtgttcaaaaaatccgcgaggaggagcgtcggatattggaaaaagctgggtacttccagagcatcactgtgggtgtggctcccattgtggtggtgattgccagcgtggtgaccttctctgttcatatgaccctgggcttcgatctgacagcagcacaggctttcacagtggtgacagtcttcaattccatgacttttgctttgaaagtaacaccgttttcagtaaagtccctctcagaagcctcagtggctgttgacagatttaagagtttgtttctaatggaagaggttcacatgataaagaacaaaccagccagtcctcacatcaagatagagatgaaaaatgccaccttggcatgggactcctcccactccagtatccagaactcgcccaagctgacccccaaaatgaaaaaagacaagagggcttccaggggcaagaaagagaaggtgaggcagctgcagcgcactgagcatcaggcggtgctggcagagcagaaaggccacctcctcctggacagtgacgagcggcccagtcccgaagaggaagaaggcaagcacatccacctgggccacctgcgcttacagaggacactgcacagcatcgatctggagatccaagagggtaaactggttggaatctgtggcagtgtgggaagtggaaaaacctctctcatttcagccattttaggccagatgacgcttctagagggcagcattgcaatcagtggaaccttcgcttatgtggcccagcaggcctggatcctcaatgctactctgagagacaacatcctgtttgggaaggaatatgatgaagaaagatacaactctgtgctgaacagctgctgcctgaggcctgacctggccattcttcccagcagcgacctgacggagattggagagcgaggagccaacctgagcggtgggcagcgccagaggatcagccttgcccgggccttgtatagtgacaggagcatctacatcctggacgaccccctcagtgccttagatgcccatgtgggcaaccacatcttcaatagtgctatccggaaacatctcaagtccaagacagttctgtttgttacccaccagttacagtacctggttgactgtgatgaagtgatcttcatgaaagagggctgtattacggaaagaggcacccatgaggaactgatgaatttaaatggtgactatgctaccatttttaataacctgttgctgggagagacaccgccagttgagatcaattcaaaaaaggaaaccagtggttcacagaagaagtcacaagacaagggtcctaaaacaggatcagtaaagaaggaaaaagcagtaaagccagaggaagggcagcttgtgcagctggaagagaaagggcagggttcagtgccctggtcagtatatggtgtctacatccaggctgctgggggccccttggcattcctggttattatggcccttttcatgctgaatgtaggcagcaccgccttcagcacctggtggttgagttactggatcaagcaaggaagcgggaacaccactgtgactcgagggaacgagacctcggtgagtgacagcatgaaggacaatcctcatatgcagtactatgccagcatctacgccctctccatggcagtcatgctgatcctgaaagccattcgaggagttgtctttgtcaagggcacgctgcgagcttcctcccggctgcatgacgagcttttccgaaggatccttcgaagccctatgaagttttttgacacgacccccacagggaggattctcaacaggttttccaaagacatggatgaagttgacgtgcggctgccgttccaggccgagatgttcatccagaacgttatcctggtgttcttctgtgtgggaatgatcgcaggagtcttcccgtggttccttgtggcagtggggccccttgtcatcctcttttcagtcctgcacattgtctccagataccaggagctgctggatgacaaccaagctcctttttttttgtttacgtgtgcgatgcggtggctggctgtgcggctggacctcatcagcatcgccctcatcaccaccacggggctgatgatcgttcttatgcacgggcagattcccccagcctatgcgggtctcgccatctcttatgctgtccagttaacggggctgttccagtttacggtcagactggcatctgagacagaagctcgattcacctcggtggagaggatcaatcactacattaagactctgtccttggaagcacctgccagaattaagaacaaggctccctcccctgactggccccaggagggagaggtgacctttgagaacgcagagatgaggtaccgagaaaacctccctctcgtcctaaagaaagtatccttcacgatcaaacctaaagagaagattggcattgtggggcggacaggatcagggaagtcctcgctggggatggccctcttccgtctggtggagttatctggaggctgcatcaagattgatggagtgagaatcagtgatattggccttgccgacctccgaagcaaactctctatcattcctcaagagccggtgctgttcagtggcactgtcagatcaaatttggaccccttcaaccagtacactgaagaccagatttgggatgccctggagaggacacacatgaaagaatgtattgctcagctacctctgaaacttgaatctgaagtgatggagaatggggataacttctcagtgggggaacggcagctcttgtgcatagctagagccctgctccgccactgtaagattctgattttagatgaagccacagctgccatggacacagagacagacttattgattcaagagaccatccgagaagcatttgcagactgtaccatgctgaccattgcccatcgcctgcacacggttctaggctccgataggattatggtgctggcccagggacaggtggtggagtttgacaccccatcggtccttctgtccaacgacagttcccgattctatgccatgtttgctgctgcagagaacaaggtcgctgtcaagggctgactcctccctgttgacgaagtctcttttctttagagcattgccattccctgcctggggcgggcccctcatcgcgtcctcctaccgaa

SEQ ID NO: 2977 - DNA, 5921 bp, Homo sapiens
  source 1..5921: mol_type = unassigned DNA
gccgcgtccgcagccctgggcactcggaaggaggactacagttcccttcagccttgggaatgctttgtgcagcgcgcttgcgcggtgtggcggccgatgccgctataaaggcttgttttgctgcagggctcatgctcgggagcgtggttgagcggctggcgcggttgtcctggagcaggggcgcaggaattctgatgtgaaactaacagtctgtgagccctggaacctccactcagagaagatgaaggatatcgacataggaaaagagtatatcatccccagtcctgggtatagaagtgtgagggagagaaccagcacttctgggacgcacagagaccgtgaagattccaagttcaggagaactcgaccgttggaatgccaagatgccttggaaacagcagcccgagccgagggcctctctcttgatgcctccatgcattctcagctcagaatcctggatgaggagcatcccaagggaaagtaccatcatggcttgagtgctctgaagcccatccggactacttccaaacaccagcacccagtggacaatgctgggcttttttcctgtatgactttttcgtggctttcttctctggcccgtgtggcccacaagaagggggagctctcaatggaagacgtgtggtctctgtccaagcacgagtcttctgacgtgaactgcagaagactagagagactgtggcaagaagagctgaatgaagttgggccagacgctgcttccctgcgaagggttgtgtggatcttctgccgcaccaggctcatcctgtccatcgtgtgcctgatgatcacgcagctggctggcttcagtggaccagccttcatggtgaaacacctcttggagtatacccaggcaacagagtctaacctgcagtacagcttgttgttagtgctgggcctcctcctgacggaaatcgtgcggtcttggtcgcttgcactgacttgggcattgaattaccgaaccggtgtccgcttgcggggggccatcctaaccatggcatttaagaagatccttaagttaaagaacattaaagagaaatccctgggtgagctcatcaacatttgctccaacgatgggcagagaatgtttgaggcagcagccgttggcagcctgctggctggaggacccgttgttgccatcttaggcatgatttataatgtaattattctgggaccaacaggcttcctgggatcagctgtttttatcctcttttacccagcaatgatgtttgcatcacggctcacagcatatttcaggagaaaatgcgtggccgccacggatgaacgtgtccagaagatgaatgaagttcttacttacattaaatttatcaaaatgtatgcctgggtcaaagcattttctcagagtgttcaaaaaatccgcgaggaggagcgtcggatattggaaaaagctgggtacttccagagcatcactgtgggtgtggctcccattgtggtggtgattgccagcgtggtgaccttctctgttcatatgaccctgggcttcgatctgacagcagcacaggctttcacagtggtgacagtcttcaattccatgacttttgctttgaaagtaacaccgttttcagtaaagtccctctcagaagcctcagtggctgttgacagatttaagagtttgtttctaatggaagaggttcacatgataaagaacaaaccagccagtcctcacatcaagatagagatgaaaaatgccaccttggcatgggactcctcccactccagtatccagaactcgcccaagctgacccccaaaatgaaaaaagacaagagggcttccaggggcaagaaagagaaggtgaggcagctgcagcgcactgagcatcaggcggtgctggcagagcagaaaggccacctcctcctggacagtgacgagcggcccagtcccgaagaggaagaaggcaagcacatccacctgggccacctgcgcttacagaggacactgcacagcatcgatctggagatccaagagggtaaactggttggaatctgtggcagtgtgggaagtggaaaaacctctctcatttcagccattttaggccagatgacgcttctagagggcagcattgcaatcagtggaaccttcgcttatgtggcccagcaggcctggatcctcaatgctactctgagagacaacatcctgtttgggaaggaatatgatgaagaaagatacaactctgtgctgaacagctgctgcctgaggcctgacctggccattcttcccagcagcgacctgacggagattggagagcgaggagccaacctgagcggtgggcagcgccagaggatcagccttgcccgggccttgtatagtgacaggagcatctacatcctggacgaccccctcagtgccttagatgcccatgtgggcaaccacatcttcaatagtgctatccggaaacatctcaagtccaagacagttctgtttgttacccaccagttacagtacctggttgactgtgatgaagtgatcttcatgaaagagggctgtattacggaaagaggcacccatgaggaactgatgaatttaaatggtgactatgctaccatttttaataacctgttgctgggagagacaccgccagttgagatcaattcaaaaaaggaaaccagtggttcacagaagaagtcacaagacaagggtcctaaaacaggatcagtaaagaaggaaaaagcagtaaagccagaggaagggcagcttgtgcagctggaagagaaagggcagggttcagtgccctggtcagtatatggtgtctacatccaggctgctgggggccccttggcattcctggttattatggcccttttcatgctgaatgtaggcagcaccgccttcagcacctggtggttgagttactggatcaagcaaggaagcgggaacaccactgtgactcgagggaacgagacctcggtgagtgacagcatgaaggacaatcctcatatgcagtactatgccagcatctacgccctctccatggcagtcatgctgatcctgaaagccattcgaggagttgtctttgtcaagggcacgctgcgagcttcctcccggctgcatgacgagcttttccgaaggatccttcgaagccctatgaagttttttgacacgacccccacagggaggattctcaacaggttttccaaagacatggatgaagttgacgtgcggctgccgttccaggccgagatgttcatccagaacgttatcctggtgttcttctgtgtgggaatgatcgcaggagtcttcccgtggttccttgtggcagtggggccccttgtcatcctcttttcagtcctgcacattgtctccagggtcctgattcgggagctgaagcgtctggacaatatcacgcagtcacctttcctctcccacatcacgtccagcatacagggccttgccaccatccacgcctacaataaagggcaggagtttctgcacagataccaggagctgctggatgacaaccaagctcctttttttttgtttacgtgtgcgatgcggtggctggctgtgcggctggacctcatcagcatcgccctcatcaccaccacggggctgatgatcgttcttatgcacgggcagattcccccagcctatgcgggtctcgccatctcttatgctgtccagttaacggggctgttccagtttacggtcagactggcatctgagacagaagctcgattcacctcggtggagaggatcaatcactacattaagactctgtccttggaagcacctgccagaattaagaacaaggctccctcccctgactggccccaggagggagaggtgacctttgagaacgcagagatgaggtaccgagaaaacctccctctcgtcctaaagaaagtatccttcacgatcaaacctaaagagaagattggcattgtggggcggacaggatcagggaagtcctcgctggggatggccctcttccgtctggtggagttatctggaggctgcatcaagattgatggagtgagaatcagtgatattggccttgccgacctccgaagcaaactctctatcattcctcaagagccggtgctgttcagtggcactgtcagatcaaatttggaccccttcaaccagtacactgaagaccagatttgggatgccctggagaggacacacatgaaagaatgtattgctcagctacctctgaaacttgaatctgaagtgatggagaatggggataacttctcagtgggggaacggcagctcttgtgcatagctagagccctgctccgccactgtaagattctgattttagatgaagccacagctgccatggacacagagacagacttattgattcaagagaccatccgagaagcatttgcagactgtaccatgctgaccattgcccatcgcctgcacacggttctaggctccgataggattatggtgctggcccagggacaggtggtggagtttgacaccccatcggtccttctgtccaacgacagttcccgattctatgccatgtttgctgctgcagagaacaaggtcgctgtcaagggctgactcctccctgttgacgaagtctcttttctttagagcattgccattccctgcctggggcgggcccctcatcgcgtcctcctaccgaaaccttgcctttctcgattttatctttcgcacagcagttccggattggcttgtgtgtttcacttttagggagagtcatattttgattattgtatttattccatattcatgtaaacaaaatttagtttttgttcttaattgcactctaaaaggttcagggaaccgttattataattgtatcagaggcctataatgaagctttatacgtgtagctatatctatatataattctgtacatagcctatatttacagtgaaaatgtaagctgtttattttatattaaaataagcactgtgctaataacagtgcatattcctttctatcatttttgtacagtttgctgtactagagatctggttttgctattagactgtaggaagagtagcatttcattcttctctagctggtggtttcacggtgccaggttttctgggtgtccaaaggaagacgtgtggcaatagtgggccctccgacagccccctctgccgcctccccacggccgctccaggggtggctggagacgggtgggcggctggagaccatgcagagcgccgtgagttctcagggctcctgccttctgtcctggtgtcacttactgtttctgtcaggagagcagcggggcgaagcccaggccccttttcactccctccatcaagaatggggatcacagagacattcctccgagccggggagtttctttcctgccttcttctttttgctgttgtttctaaacaagaatcagtctatccacagagagtcccactgcctcaggttcctatggctggccactgcacagagctctccagctccaagacctgttggttccaagccctggagccaactgctgctttttgaggtggcactttttcatttgcctattcccacacctccacagttcagtggcagggctcaggatttcgtgggtctgttttcctttctcaccgcagtcgtcgcacagtctctctctctctctcccctcaaagtctgcaactttaagcagctcttgctaatcagtgtctcacactggcgtagaagtttttgtactgtaaagagacctacctcaggttgctggttgctgtgtggtttggtgtgttcccgcaaaccccctttgtgctgtggggctggtagctcaggtgggcgtggtcactgctgtcatcaattgaatggtcagcgttgcatgtcgtgaccaactagacattctgtcgccttagcatgtttgctgaacaccttgtggaagcaaaaatctgaaaatgtgaataaaattattttggattttgtaaaa

SEQ ID NO: 2978 - DNA, 1923 bp, Homo sapiens
  source 1..1923: mol_type = unassigned DNA
ggctcatgctcgggagcgtggttgagcggctggcgcggttgtcctggagcaggggcgcaggaattctgatgtgaaactaacagtctgtgagccctggaacctccactcagagaagatgaaggatatcgacataggaaaagagtatatcatccccagtcctgggtatagaagtgtgagggagagaaccagcacttctgggacgcacagagaccgtgaagattccaagttcaggagaactcgaccgttggaatgccaagatgccttggaaacagcagcccgagccgagggcctctctcttgatgcctccatgcattctcagctcagaatcctggatgaggagcatcccaagggaaagtaccatcatggcttgagtgctctgaagcccatccggactacttccaaacaccagcacccagtggacaatgctgggcttttttcctgtatgactttttcgtggctttcttctctggcccgtgtggcccacaagaagggggagctctcaatggaagacgtgtggtctctgtccaagcacgagtcttctgacgtgaactgcagaagactagagagactgtggcaagaagagctgaatgaagttgggccagacgctgcttccctgcgaagggttgtgtggatcttctgccgcaccaggctcatcctgtccatcgtgtgcctgatgatcacgcagctggctggcttcagtggaccaaattttcaggatggctgtattctgcggtcagaatgagagagtcaagctgggcagaatctctcgccaagagttcagccttcctttggagactgctccatcagtgccgaggtgtgtgggaacaggcttcactgcaccgccatcttactgagttgcttcacgtgaggaaaagggggctttggccctgtgactcagttccacattttggattgcatactggaaaagaagccaatcttcttgctagtaaaccagcaacccggctgtatacagtggtgacccaagcaatggatataaacctaaaaatctgagggaggggagaggtggaatacagtagttcttggaatctgaagtctcctatttgatcaggttatttcctgggacttggcaaaaatctgattggtggggatctcctaggacctagtggacatctggtattaatttaatctcaggaaaaacaagaaattaacccagagagagtctgggttttggaattcagcgtagctacctccagaccgtggtgtctggcctccatttttgtctgtcattcagctctgacttacagctgcagtcacctttgctataaggcacctgggtagaagggtggatgggcttcacatcaatttttttcttcctttagggtgggggattggtttggctttcttttgttgtggttttttgttttatttttgtcaagattgatttttagatgcaaggacttgaaaagacccagaaggatgccaccagtttttccttgaggcctaggattttttattctgtcccgagcagaggtaattcctcacaacttagtgcaccagtagcaccagccattttgagcagagtacctctttggggagcttttcgttttgttttgtttttaattctctttccttagcagcaaggtcttttttcctagagaatctactccgttgcagaatcattgcaacctcaggagccctcactgattgagtgctgtcagcctgatatactactttggactctggaaacagatatgggttctattctctatttctactgtgtgtcgttaaacaaccgtcggagaccagatgacctgttagatggctagtcctgtataactcgactctgtatgtttcaatgtatgttactgcaatgcttcacctgctgtacagtgtttgtgagatgctctttgaagatggtacttttatattttttcattttcaataaaagtacattccttccca

SEQ ID NO: 2979 - DNA, 5836 bp, Homo sapiens
  source 1..5836: mol_type = unassigned DNA
cttgcgcggtgtggcggccgatgccgctataaaggcttgttttgctgcagggctcatgctcgggagcgtggttgagcggctggcgcggttgtcctggagcaggggcgcaggaattctgatgtgaaactaacagtctgtgagccctggaacctccactcagagaagatgaaggatatcgacataggaaaagagtatatcatccccagtcctgggtatagaagtgtgagggagagaaccagcacttctgggacgcacagagaccgtgaagattccaagttcaggagaactcgaccgttggaatgccaagatgccttggaaacagcagcccgagccgagggcctctctcttgatgcctccatgcattctcagctcagaatcctggatgaggagcatcccaagggaaagtaccatcatggcttgagtgctctgaagcccatccggactacttccaaacaccagcacccagtggacaatgctgggcttttttcctgtatgactttttcgtggctttcttctctggcccgtgtggcccacaagaagggggagctctcaatggaagacgtgtggtctctgtccaagcacgagtcttctgacgtgaactgcagaagactagagagactgtggcaagaagagctgaatgaagttgggccagacgctgcttccctgcgaagggttgtgtggatcttctgccgcaccaggctcatcctgtccatcgtgtgcctgatgatcacgcagctggctggcttcagtggaccagccttcatggtgaaacacctcttggagtatacccaggcaacagagtctaacctgcagtacagcttgttgttagtgctgggcctcctcctgacggaaatcgtgcggtcttggtcgcttgcactgacttgggcattgaattaccgaaccggtgtccgcttgcggggggccatcctaaccatggcatttaagaagatccttaagttaaagaacattaaagagaaatccctgggtgagctcatcaacatttgctccaacgatgggcagagaatgtttgaggcagcagccgttggcagcctgctggctggaggacccgttgttgccatcttaggcatgatttataatgtaattattctgggaccaacaggcttcctgggatcagctgtttttatcctcttttacccagcaatgatgtttgcatcacggctcacagcatatttcaggagaaaatgcgtggccgccacggatgaacgtgtccagaagatgaatgaagttcttacttacattaaatttatcaaaatgtatgcctgggtcaaagcattttctcagagtgttcaaaaaatccgcgaggaggagcgtcggatattggaaaaagctgggtacttccagagcatcactgtgggtgtggctcccattgtggtggtgattgccagcgtggtgaccttctctgttcatatgaccctgggcttcgatctgacagcagcacaggctttcacagtggtgacagtcttcaattccatgacttttgctttgaaagtaacaccgttttcagtaaagtccctctcagaagcctcagtggctgttgacagatttaagagtttgtttctaatggaagaggttcacatgataaagaacaaaccagccagtcctcacatcaagatagagatgaaaaatgccaccttggcatgggactcctcccactccagtatccagaactcgcccaagctgacccccaaaatgaaaaaagacaagagggcttccaggggcaagaaagagaaggtgaggcagctgcagcgcactgagcatcaggcggtgctggcagagcagaaaggccacctcctcctggacagtgacgagcggcccagtcccgaagaggaagaaggcaagcacatccacctgggccacctgcgcttacagaggacactgcacagcatcgatctggagatccaagagggtaaactggttggaatctgtggcagtgtgggaagtggaaaaacctctctcatttcagccattttaggccagatgacgcttctagagggcagcattgcaatcagtggaaccttcgcttatgtggcccagcaggcctggatcctcaatgctactctgagagacaacatcctgtttgggaaggaatatgatgaagaaagatacaactctgtgctgaacagctgctgcctgaggcctgacctggccattcttcccagcagcgacctgacggagattggagagcgaggagccaacctgagcggtgggcagcgccagaggatcagccttgcccgggccttgtatagtgacaggagcatctacatcctggacgaccccctcagtgccttagatgcccatgtgggcaaccacatcttcaatagtgctatccggaaacatctcaagtccaagacagttctgtttgttacccaccagttacagtacctggttgactgtgatgaagtgatcttcatgaaagagggctgtattacggaaagaggcacccatgaggaactgatgaatttaaatggtgactatgctaccatttttaataacctgttgctgggagagacaccgccagttgagatcaattcaaaaaaggaaaccagtggttcacagaagaagtcacaagacaagggtcctaaaacaggatcagtaaagaaggaaaaagcagtaaagccagaggaagggcagcttgtgcagctggaagagaaagggcagggttcagtgccctggtcagtatatggtcatccaggctgctgggggccccttggcattcctggttattatggcccttttcatgctgaatgtaggcagcaccgccttcagcacctggtggttgagttactggatcaagcaaggaagcgggaacaccactgtgactcgagggaacgagacctcggtgagtgacagcatgaaggacaatcctcatatgcagtactatgccagcatctacgccctctccatggcagtcatgctgatcctgaaagccattcgaggagttgtctttgtcaagggcacgctgcgagcttcctcccggctgcatgacgagcttttccgaaggatccttcgaagccctatgaagttttttgacacgacccccacagggaggattctcaacaggttttccaaagacatggatgaagttgacgtgcggctgccgttccaggccgagatgttcatccagaacgttatcctggtgttcttctgtgtgggaatgatcgcaggagtcttcccgtggttccttgtggcagtggggccccttgtcatcctcttttcagtcctgcacattgtctccagggtcctgattcgggagctgaagcgtctggacaatatcacgcagtcacctttcctctcccacatcacgtccagcatacagggccttgccaccatccacgcctacaataaagggcaggagtttctgcacagataccaggagctgctggatgacaaccaagctcctttttttttgtttacgtgtgcgatgcggtggctggctgtgcggctggacctcatcagcatcgccctcatcaccaccacggggctgatgatcgttcttatgcacgggcagattcccccagcctatgcgggtctcgccatctcttatgctgtccagttaacggggctgttccagtttacggtcagactggcatctgagacagaagctcgattcacctcggtggagaggatcaatcactacattaagactctgtccttggaagcacctgccagaattaagaacaaggctccctcccctgactggccccaggagggagaggtgacctttgagaacgcagagatgaggtaccgagaaaacctccctctcgtcctaaagaaagtatccttcacgatcaaacctaaagagaagattggcattgtggggcggacaggatcagggaagtcctcgctggggatggccctcttccgtctggtggagttatctggaggctgcatcaagattgatggagtgagaatcagtgatattggccttgccgacctccgaagcaaactctctatcattcctcaagagccggtgctgttcagtggcactgtcagatcaaatttggaccccttcaaccagtacactgaagaccagatttgggatgccctggagaggacacacatgaaagaatgtattgctcagctacctctgaaacttgaatctgaagtgatggagaatggggataacttctcagtgggggaacggcagctcttgtgcatagctagagccctgctccgccactgtaagattctgattttagatgaagccacagctgccatggacacagagacagacttattgattcaagagaccatccgagaagcatttgcagactgtaccatgctgaccattgcccatcgcctgcacacggttctaggctccgataggattatggtgctggcccagggacaggtggtggagtttgacaccccatcggtccttctgtccaacgacagttcccgattctatgccatgtttgctgctgcagagaacaaggtcgctgtcaagggctgactcctccctgttgacgaagtctcttttctttagagcattgccattccctgcctggggcgggcccctcatcgcgtcctcctaccgaaaccttgcctttctcgattttatctttcgcacagcagttccggattggcttgtgtgtttcacttttagggagagtcatattttgattattgtatttattccatattcatgtaaacaaaatttagtttttgttcttaattgcactctaaaaggttcagggaaccgttattataattgtatcagaggcctataatgaagctttatacgtgtagctatatctatatataattctgtacatagcctatatttacagtgaaaatgtaagctgtttattttatattaaaataagcactgtgctaataacagtgcatattcctttctatcatttttgtacagtttgctgtactagagatctggttttgctattagactgtaggaagagtagcatttcattcttctctagctggtggtttcacggtgccaggttttctgggtgtccaaaggaagacgtgtggcaatagtgggccctccgacagccccctctgccgcctccccacggccgctccaggggtggctggagacgggtgggcggctggagaccatgcagagcgccgtgagttctcagggctcctgccttctgtcctggtgtcacttactgtttctgtcaggagagcagcggggcgaagcccaggccccttttcactccctccatcaagaatggggatcacagagacattcctccgagccggggagtttctttcctgccttcttctttttgctgttgtttctaaacaagaatcagtctatccacagagagtcccactgcctcaggttcctatggctggccactgcacagagctctccagctccaagacctgttggttccaagccctggagccaactgctgctttttgaggtggcactttttcatttgcctattcccacacctccacagttcagtggcagggctcaggatttcgtgggtctgttttcctttctcaccgcagtcgtcgcacagtctctctctctctctcccctcaaagtctgcaactttaagcagctcttgctaatcagtgtctcacactggcgtagaagtttttgtactgtaaagagacctacctcaggttgctggttgctgtgtggtttggtgtgttcccgcaaaccccctttgtgctgtggggctggtagctcaggtgggcgtggtcactgctgtcatcaattgaatggtcagcgttgcatgtcgtgaccaactagacattctgtcgccttagcatgtttgctgaacaccttgtggaagcaaaaatctgaaaatgtgaataaaattattttggattttgt

SEQ ID NO: 2980 - DNA, 1848 bp, Homo sapiens
  source 1..1848: mol_type = unassigned DNA
ggctcatgctcgggagcgtggttgagcggctggcgcggttgtcctggagcaggggcgcaggaattctgatgtgaaactaacagtctgtgagccctggaacctccactcagagaagatgaaggatatcgacataggaaaagagtatatcatccccagtcctgggtatagaagtgtgagggagagaaccagcacttctgggacgcacagagaccgtgaagattccaagttcaggagaactcgaccgttggaatgccaagatgccttggaaacagcagcccgagccgagggcctctctcttgatgcctccatgcattctcagctcagaatcctggatgaggagcatcccaagggaaagtaccatcatggcttgagtgctctgaagcccatccggactacttccaaacaccagcacccagtggacaatgctgggcttttttcctgtatgactttttcgtggctttcttctctggcccgtgtggcccacaagaagggggagctctcaatggaagacgtgtggtctctgtccaagcacgagtcttctgacgtgaactgcagaagactagagagactgtggcaagaagagctgaatgaagttgggccagacgctgcttccctgcgaagggttgtgtggatcttctgccgcaccaggctcatcctgtccatcgtgtgcctgatgatcacgcagctggctggcttcagtggaccaccttcctttggagactgctccatcagtgccgaggtgtgtgggaacaggcttcactgcaccgccatcttactgagttgcttcacgtgaggaaaagggggctttggccctgtgactcagttccacattttggattgcatactggaaaagaagccaatcttcttgctagtaaaccagcaacccggctgtatacagtggtgacccaagcaatggatataaacctaaaaatctgagggaggggagaggtggaatacagtagttcttggaatctgaagtctcctatttgatcaggttatttcctgggacttggcaaaaatctgattggtggggatctcctaggacctagtggacatctggtattaatttaatctcaggaaaaacaagaaattaacccagagagagtctgggttttggaattcagcgtagctacctccagaccgtggtgtctggcctccatttttgtctgtcattcagctctgacttacagctgcagtcacctttgctataaggcacctgggtagaagggtggatgggcttcacatcaatttttttcttcctttagggtgggggattggtttggctttcttttgttgtggttttttgttttatttttgtcaagattgatttttagatgcaaggacttgaaaagacccagaaggatgccaccagtttttccttgaggcctaggattttttattctgtcccgagcagaggtaattcctcacaacttagtgcaccagtagcaccagccattttgagcagagtacctctttggggagcttttcgttttgttttgtttttaattctctttccttagcagcaaggtcttttttcctagagaatctactccgttgcagaatcattgcaacctcaggagccctcactgattgagtgctgtcagcctgatatactactttggactctggaaacagatatgggttctattctctatttctactgtgtgtcgttaaacaaccgtcggagaccagatgacctgttagatggctagtcctgtataactcgactctgtatgtttcaatgtatgttactgcaatgcttcacctgctgtacagtgtttgtgagatgctctttgaagatggtacttttatattttttcattttcaataaaagtacattccttccca

SEQ ID NO: 2981 - DNA, 4697 bp, Homo sapiens
  source 1..4697: mol_type = unassigned DNA
cggctggcgcggttgtcctggagcaggggcgcaggaattctgatgtgaaactaacagtctgtgagccctggaacctccactcagagaagatgaaggatatcgacataggaaaagagtatatcatccccagtcctgggtatagaagtgtgagggagagaaccagcacttctgggacgcacagagaccgtgaagattccaagttcaggagaactcgaccgttggaatgccaagatgccttggaaacagcagcccgagccgagggcctctctcttgatgcctccatgcattctcagctcagaatcctggatgaggagcatcccaagggaaagtaccatcatggcttgagtgctctgaagcccatccggactacttccaaacaccagcacccagtggacaatgctgggcttttttcctgtatgactttttcgtggctttcttctctggcccgtgtggcccacaagaagggggagctctcaatggaagacgtgtggtctctgtccaagcacgagtcttctgacgtgaactgcagaagactagagagactgtggcaagaagagctgaatgaagttgggccagacgctgcttccctgcgaagggttgtgtggatcttctgccgcaccaggctcatcctgtccatcgtgtgcctgatgatcacgcagctggctggcttcagtggaccagtaagttctaaccatcctttccgacagtctccaggggcccggccacggccagctctaacactcttattctgttgcagaggttgtgctcagctttgggctaggtagcagtcttagagatgccttcaggtctgttgaaaggggtcgatggattttggcaacagctggaaggatgaaagggcagtgttgccagagaagaaatggaactggcttgatttctgggtgggggtgaaatggaactgactccagttctgcacaggactgtgcttctcggttgtgtgttaacatgaactgacagtcggtgcaggcagatgtgtcttgcagtgctatgagtgggtgagagcacgttgtgtggcccgggctggtgagccagcaccgggaacataccaagtgcctggaggcagttatcacatgtttggcaggtctgtggcaaataagccctgagaaaactagaggactgtcgaggattttagagtctgacctggagtccgtttaagtttggcttatagtgtgactgtgtggcaagtgttggggtggcagccgtggttttccccagtctgtactgatgcagagtagacaagagagcctttgacgttcactctgtttcctgggcacctgtttcttacacctgctgtgctgccttacacttgagaccttgattaaatctattctctacacatttgccttgaggcatcggagcagtagtactgcttgtactgtgcgttttccatatgtgggtaagctggaggttcatggttttggtaagtatgtgcctaagatgcatggcaattaggtaaaactaatttgcagttttgtttttgtttttatttttttaacgtttgatgcctcttgttaaagttttgatctcttttctgaagcagagaacactacttttctggtattgggtttctatattattaataattgaccaactaacatactttatataaaagttttaagtaagaaggaccatgtaactgaaatgttgtgttatgtaatttaccaaaatggcaaacattttcatagagccagcttcccccaagaagagcttctgtcattgtttcactacagggctggtggctgctctgatctcatagaattcattcctctgggtagcaccatatgcaggctttgcgaataaagtgatcatgggctttcttgattccatttggccaatgcaagaacttcattggctcccctctaaaaaaaattccatggattgctgggatttttattttttattttttgaaaaaaatggtacctatccgtattcagcttggtggcttcacagtccctcccctgaacatccgtatattccttattctctcatttatggtgcagaacactggggtactaacctctaggaaactgttctagctgccagggaaagctaagagccctcctttaacaggaaagcagcagcatgctttttcttctctctgccgtttcagggaagagcaccttaaggccagtgttatttcatgggattctgccctagagctgagaaagtaatggactcatccataatctcttttatagatttgaaagtgtaaacaatacacacttccttttttggaactccaattctaatatgtttctttttcattggaaattgaaaaaccaggctggttttgagattagtactagcagtgagtaaacctcctgtctgtggacttaaatccttttgaggaacatttcgttttagatttttacaagttttctaatctggcacgactttcaaactagcttaatctgttcttacagaaacctgtgtaaggacagactgcccacatacgggctccccaaataaaatggcatttttatttcttgtccctgctcgggtttcaccgaaccttggtagccataatcagaacaaatgaaacacagtcaagttgttgtgttctgtttgtttttacctgccagccagctgatgctgacatttatacaccaagatgatccaaggttttggtgacgccggtggggactgccgctatatgtgcagggtgcccgggggtcatagtaatgttaatggagtaccagaatctctaacagtgtggtcctgtgtagccacattgctacacttacagagatgctttggggcctttttggattaagacagttctaaaagaccaggcctcacctatgatctgtgtataaagaattagcatcgcactgtagatctgcaagagaaggccgcctcctgcagtgctctctcttggtgaatgctaactctgctcgagggccttttggggaaaggacagtgtaaaacccttagagaggtaagtttcccacccttccaacctctctccacctgcagcttgcttggtgctgtcaggatctggatttggggggagtctctctgtagtggaaccagtgacagaagctgttctttagaattttcaggatggctgtattctgcggtcagaatgagagagtcaagctgggcagaatctctcgccaagagttcaggtaaggtaatgtttattcactgggaatgctttccacagccagacagctatgctaacagtctcaagttttcttccagtttgtttagatttaaatgatacatttgtaactttttaaaaactaaattttggttggatttttcatgaaaacctcttttttctttatcccctaaaaaatggtttgaaatgtcattgttatttaaaaacccgatgtgttggaacttctttaatctgctgtttcctctttttccccccctttgaaagtttcgcatagtgtaaacattcactatgtcttttaccttccctgctcctcccatctgggaggcgctgatgctattacccagtgctgaaaaatggcactctaaaggtatgggaaggaaggagcccaaggcaaccacctgctgtcctttcagccttcctttggagactgctccatcagtgccgaggtgtgtgggaacaggcttcactgcaccgccatcttactgagttgcttcacgtgaggaaaagggggctttggccctgtgactcagttccacattttggattgcatactggaaaagaagccaatcttcttgctagtaaaccagcaacccggctgtatacagtggtgacccaagcaatggatataaacctaaaaatctgagggaggggagaggtggaatacagtagttcttggaatctgaagtctcctatttgatcaggttatttcctgggacttggcaaaaatctgattggtggggatctcctaggacctagtggacatctggtattaatttaatctcaggaaaaacaagaaattaacccagagagagtctgggttttggaattcagcgtagctacctccagaccgtggtgtctggcctccatttttgtctgtcattcagctctgacttacagctgcagtcacctttgctataaggcacctgggtagaagggtggatgggcttcacatcaatttttttcttcctttagggtgggggattggtttggctttcttttgttgtggttttttgttttatttttgtcaagattgatttttagatgcaaggacttgaaaagacccagaaggatgccaccagtttttccttgaggcctaggattttttattctgtcccgagcagaggtaattcctcacaacttagtgcaccagtagcaccagccattttgagcagagtacctctttggggagcttttcgttttgttttgtttttaattctctttccttagcagcaaggtcttttttcctagagaatctactccgttgcagaatcattgcaacctcaggagccctcactgattgagtgctgtcagcctgatatactactttggactctggaaacagatatgggttctattctctatttctactgtgtgtcgttaaacaaccgtcggagaccagatgacctgttagatggctagtcctgtataactcgactctgtatgtttcaatgtatgttactgcaatgcttcacctgctgtacagtgtttgtgagatgctctttgaagatggtacttttatattttttcattttcaataaaagtacattccttccca

SEQ ID NO: 2982 - DNA, 591 bp, Homo sapiens
  source 1..591: mol_type = unassigned DNA
cgggtctgagagaaacgcccacctgggaggctgtgcagcgggtggctcggggcaccctgctcaacccgcagcggagccgccagcgaccttcgaagaattctgatgtgaaactaacagtctgtgagccctggaacctccactcagagaagatgaaggatatcgacataggaaaagagtatatcatccccagtcctgggtatagaagtgtgagggagagaaccagcacttctgggacgcacagagaccgtgaagattccaagttcaggagaactcgaccgttggaatgccaagatgccttggaaacagcagcccgagccgagggcctctctcttgatgcctccatgcattctcagctcagaatcctggatgaggagcatcccaagggaaagtaccatcatggcttgagtgctctgaagcccatccggactacttccaaacaccagcacccagtggacaatgctgggcttttttcctgtatgactttttcgtggctttcttctctggcccgtgtggcccacaagaagggggagctctcaatggaagacgtgtggtctctgtccaagcacgagtcttctgacgtgaactgcagaa

SEQ ID NO: 2983 - DNA, 2000 bp, Homo sapiens
  source 1..2000: mol_type = unassigned DNA
ggctcatgctcgggagcgtggttgagcggctggcgcggttgtcctggagcaggggcgcaggaattctgatgtgaaactaacagtctgtgagccctggaacctccactcagagaagatgaaggatatcgacataggaaaagagtatatcatccccagtcctgggtatagaagtgtgagggagagaaccagcacttctgggacgcacagagaccgtgaagattccaagttcaggagaactcgaccgttggaatgccaagatgccttggaaacagcagcccgagccgagggcctctctcttgatgcctccatgcattctcagctcagaatcctggatgaggagcatcccaagggaaagtaccatcatggcttgagtgctctgaagcccatccggactacttccaaacaccagcacccagtggacaatgctgggcttttttcctgtatgactttttcgtggctttcttctctggcccgtgtggcccacaagaagggggagctctcaatggaagacgtgtggtctctgtccaagcacgagtcttctgacgtgaactgcagaagactagagagactgtggcaagaagagctgaatgaagttgggccagacgctgcttccctgcgaagggttgtgtggatcttctgccgcaccaggctcatcctgtccatcgtgtgcctgatgatcacgcagctggctggcttcagtggaccacttgcttggtgctgtcaggatctggatttggggggagtctctctgtagtggaaccagtgacagaagctgttctttagaattttcaggatggctgtattctgcggtcagaatgagagagtcaagctgggcagaatctctcgccaagagttcagccttcctttggagactgctccatcagtgccgaggtgtgtgggaacaggcttcactgcaccgccatcttactgagttgcttcacgtgaggaaaagggggctttggccctgtgactcagttccacattttggattgcatactggaaaagaagccaatcttcttgctagtaaaccagcaacccggctgtatacagtggtgacccaagcaatggatataaacctaaaaatctgagggaggggagaggtggaatacagtagttcttggaatctgaagtctcctatttgatcaggttatttcctgggacttggcaaaaatctgattggtggggatctcctaggacctagtggacatctggtattaatttaatctcaggaaaaacaagaaattaacccagagagagtctgggttttggaattcagcgtagctacctccagaccgtggtgtctggcctccatttttgtctgtcattcagctctgacttacagctgcagtcacctttgctataaggcacctgggtagaagggtggatgggcttcacatcaatttttttcttcctttagggtgggggattggtttggctttcttttgttgtggttttttgttttatttttgtcaagattgatttttagatgcaaggacttgaaaagacccagaaggatgccaccagtttttccttgaggcctaggattttttattctgtcccgagcagaggtaattcctcacaacttagtgcaccagtagcaccagccattttgagcagagtacctctttggggagcttttcgttttgttttgtttttaattctctttccttagcagcaaggtcttttttcctagagaatctactccgttgcagaatcattgcaacctcaggagccctcactgattgagtgctgtcagcctgatatactactttggactctggaaacagatatgggttctattctctatttctactgtgtgtcgttaaacaaccgtcggagaccagatgacctgttagatggctagtcctgtataactcgactctgtatgtttcaatgtatgttactgcaatgcttcacctgctgtacagtgtttgtgagatgctctttgaagatggtacttttatattttttcattttcaataaaagtacattccttccca

SEQ ID NO: 2984 - DNA, 5110 bp, Homo sapiens
  source 1..5110: mol_type = unassigned DNA
cgctgggacccacgacgacagaaggcgccgatggccgcgcctgctgagccctgcgcggggcagggggtctggaaccagacagagcctgaacctgccgccaccagcctgctgagcctgtgcttcctgagaacagcaggggtctgggtaccccccatgtacctctgggtccttggtcccatctacctcctcttcatccaccaccatggccggggctacctccggatgtccccactcttcaaagccaagatggtgcttggattcgccctcatagtcctgtgtacctccagcgtggctgtcgctctttggaaaatccaacagggaacgcctgaggccccagaattcctcattcatcctactgtgtggctcaccacgatgagcttcgcagtgttcctgattcacaccgagaggaaaaagggagtccagtcatctggagtgctgtttggttactggcttctctgctttgtcttgccagctaccaacgctgcccagcaggcctccggagcgggcttccagagcgaccctgtccgccacctgtccacctacctatgcctgtctctggtggtggcacagtttgtgctgtcctgcctggcggatcaaccccccttcttccctgaagacccccagcagtctaacccctgtccagagactggggcagccttcccctccaaagccacgttctggtgggtttctggcctggtctggaggggatacaggaggccactgagaccaaaagacctctggtcgcttgggagagaaaactcctcagaagaacttgtttcccggcttgaaaaggagtggatgaggaaccgcagtgcagcccggaggcacaacaaggcaatagcatttaaaaggaaaggcggcagtggcatgaaggctccagagaccgagcccttcctacggcaagaagggagccagtggcgcccactgctgaaggccatctggcaggtgttccattctaccttcctcctggggaccctcagcctcatcatcagtgatgtcttcaggttcactgtccccaagctgctcagccttttcctggagtttattggtgatcccaagcctccagcctggaagggctacctcctcgccgtgctgatgttcctctcagcctgcctgcaaacgctgtttgagcagcagaacatgtacaggctcaaggtgctgcagatgaggttgcggtcggccatcactggcctggtgtacagaaaggtcctggctctgtccagcggctccagaaaggccagtgcggtgggtgatgtggtcaatctggtgtccgtggacgtgcagcggctgaccgagagcgtcctctacctcaacgggctgtggctgcctctcgtctggatcgtggtctgcttcgtctatctctggcagctcctggggccctccgccctcactgccatcgctgtcttcctgagcctcctccctctgaatttcttcatctccaagaaaaggaaccaccatcaggaggagcaaatgaggcagaaggactcacgggcacggctcaccagctctatcctcaggaactcgaagaccatcaagttccatggctgggagggagcctttctggacagagtcctgggcatccgaggccaggagctgggcgccttgcggacctccggcctcctcttctctgtgtcgctggtgtccttccaagtgtctacatttctggtcgcactggtggtgtttgctgtccacactctggtggccgagaatgctatgaatgcagagaaagcctttgtgactctcacagttctcaacatcctcaacaaggcccaggctttcctgcccttctccatccactccctcgtccaggcccgggtgtcctttgaccgtctggtcaccttcctctgcctggaagaagttgaccctggtgtcgtagactcaagttcctctggaagcgctgccgggaaggattgcatcaccatacacagtgccaccttcgcctggtcccaggaaagccctccctgcctccacagaataaacctcacggtgccccagggctgtctgctggctgttgtcggtccagtgggggcagggaagtcctccctgctgtccgccctccttggggagctgtcaaaggtggaggggttcgtgagcatcgagggtgctgtggcctacgtgccccaggaggcctgggtgcagaacacctctgtggtagagaatgtgtgcttcgggcaggagctggacccaccctggctggagagagtactagaagcctgtgccctgcagccagatgtggacagcttccctgagggaatccacacttcaattggggagcagggcatgaatctctccggaggccagaagcagcggctgagcctggcccgggctgtatacagaaaggcagctgtgtacctgctggatgaccccctggcggccctggatgcccacgttggccagcatgtcttcaaccaggtcattgggcctggtggactactccagggaacaacacggattctcgtgacgcacgcactccacatcctgccccaggctgattggatcatagtgctggcaaatggggccatcgcagagatgggttcctaccaggagcttctgcagaggaagggggccctcatgtgtcttctggatcaagccagacagccaggagatagaggagaaggagaaacagaacctgggaccagcaccaaggaccccagaggcacctctgcaggcaggaggcccgagcttagacgcgagaggtccatcaagtcagtccctgagaaggaccgtaccacttcagaagcccagacagaggttcctctggatgaccctgacagggcaggatggccagcaggaaaggacagcatccaatacggcagggtgaaggccacagtgcacctggcctacctgcgtgccgtgggcacccccctctgcctctacgcactcttcctcttcctctgccagcaagtggcctccttctgccggggctactggctgagcctgtgggcggacgaccctgcagtaggtgggcagcagacgcaggcagccctgcgtggcgggatcttcgggctcctcggctgtctccaagccattgggctgtttgcctccatggctgcggtgctcctaggtggggcccgggcatccaggttgctcttccagaggctcctgtgggatgtggtgcgatctcccatcagcttctttgagcggacacccattggtcacctgctaaaccgcttctccaaggagacagacacggttgacgtggacattccagacaaactccggtccctgctgatgtacgcctttggactcctggaggtcagcctggtggtggcagtggctaccccactggccactgtggccatcctgccactgtttctcctctacgctgggtttcagagcctgtatgtggttagctcatgccagctgagacgcttggagtcagccagctactcgtctgtctgctcccacatggctgagacgttccagggcagcacagtggtccgggcattccgaacccaggccccctttgtggctcagaacaatgctcgcgtagatgaaagccagaggatcagtttcccgcgactggtggctgacaggtggcttgcggccaatgtggagctcctggggaatggcctggtgtttgcagctgccacgtgtgctgtgctgagcaaagcccacctcagtgctggcctcgtgggcttctctgtctctgctgccctccaggtgacccagacactgcagtgggttgttcgcaactggacagacctagagaacagcatcgtgtcagtggagcggatgcaggactatgcctggacgcccaaggaggctccctggaggctgcccacatgtgcagctcagcccccctggcctcagggcgggcagatcgagttccgggactttgggctaagataccgacctgagctcccgctggctgtgcagggcgtgtccttcaagatccacgcaggagagaaggtgggcatcgttggcaggaccggggcagggaagtcctccctggccagtgggctgctgcggctccaggaggcagctgagggtgggatctggatcgacggggtccccattgcccacgtggggctgcacacactgcgctccaggatcagcatcatcccccaggaccccatcctgttccctggctctctgcggatgaacctcgacctgctgcaggagcactcggacgaggctatctgggcagccctggagacggtgcagctcaaagccttggtggccagcctgcccggccagctgcagtacaagtgtgctgaccgaggcgaggacctgagcgtgggccagaaacagctcctgtgtctggcacgtgcccttctccggaagacccagatcctcatcctggacgaggctactgctgccgtggaccctggcacggagctgcagatgcaggccatgctcgggagctggtttgcacagtgcactgtgctgctcattgcccaccgcctgcgctccgtgatggactgtgcccgggttctggtcatggacaaggggcaggtggcagagagcggcagcccggcccagctgctggcccagaagggcctgttttacagactggcccaggagtcaggcctggtctgagccaggaccctcaaccgtaccccagttggaccagcccgcacagcctgcagtgctggagatggaagtgacccgtggtcatcgatagctccacacgatattgagtctagacctgtgtttgctctctgggaggaaaatggcagagaaagtggccaattatcacagagcatcagagccggaaggacctagcaatacacaggtctgcccgggcagggcccatctcgccctgtccaccctgcagccaatgtcaacagcgactctcagccccgctgtactctggactcacctgggggcctcaagcacatgcccaggctcccggctagacccttaaatcagaatctctgaggctgggaactgccatgctgtgtgtactttttacaaattaacacttttattttgggataatcccagactcacatgcagttaaagaaacaataatatagagagattcgtgtacttggtaccccatttcacccaatggtaacatcttgcaaaactctaggataaagcatcacagccagggtgttgacattgacacaacaatcttgctcgatttcccgttttacctgta

SEQ ID NO: 2985 - DNA, 1762 bp, Homo sapiens
  source 1..1762: mol_type = unassigned DNA
ccctccccagccattgggctgtttgcctccatggctgcggtgctcctaggtggggcccgggcatccaggttgctcttccagaggctcctgtgggatgtggtgcgatctcccatcagcttctttgagcggacacccattggtcacctgctaaaccgcttctccaaggagacagacacggttgacgtggacattccagacaaactccggtccctgctgatgtacgcctttggactcctggaggtcagcctggtggtggcagtggctaccccactgccactgtggccatcctgccactgtttctcctctacgctgggtttcaggtggcttgcggccaatgtggagctcctggggaatggcctggtgtttgcagctgccacgtgtgctgtgctgagcaaagcccacctcagtgctggcctcgtgggcttctctgtctctgctgccctccaggtgacccagacactgcagtgggttgttcgcaactggacagacctagagaacagcatcgtgtcagtggagcggatgcaggactatgcctggacgcccaaggaggctccctggaggctgcccacatgtgcagctcagcccccctggcctcagggcgggcagatcgagttccgggactttgggctaagataccgacctgagctcccgctggctgtgcagggcgtgtccttcaagatccacgcaggagagaaggtgggcatcgttggcaggaccggggcagggaagtcctccctggccagtgggctgctgcggctccaggaggcagctgagggtgggatctggatcgacggggtccccattgcccacgtggggctgcacacactgcgctccaggatcagcatcatcccccaggaccccatcctgttccctggctctctgcggatgaacctcgacctgctgcaggagcactcggacgaggctatctgggcagccctggagacggtgcagctcaaagccttggtggccagcctgcccggccagctgcagtacaagtgtgctgaccgaggcgaggacctgagcgtgggccagaaacagctcctgtgtctggcacgtgcccttctccggaagacccagatcctcatcctggacgaggctactgctgccgtggaccctggcacggagctgcagatgcaggccatgctcgggagctggtttgcacagtgcactgtgctgctcattgcccaccgcctgcgctccgtgatggactgtgcccgggttctggtcatggacaaggggcaggtggcagagagcggcagcccggcccagctgctggcccagaagggcctgttttacagactggcccaggagtcaggcctggtctgagccaggaccctcaaccgtaccccagttggaccagcccgcacagcctgcagtgctggagatggaagtgacccgtggtcatcgatagctccacacgatattgagtctagacctgtgtttgctctctgggaggaaaatggcagagaaagtggccaattatcacagagcatcagagccggaaggacctagcaatacacaggtctgcccgggcagggcccatctcgccctgtccaccctgcagccaatgtcaacagcgactctcagccccgctgtactctggactcacctgggggcctcaagcacatgcccaggctcccggctagacccttaaatcagaatctctgaggctgggaactgccatgctgtgtgtactttttacaaattaacacttttattttgggataatcccagactcacatgcagttaaagaaacaataat

SEQ ID NO: 2986 - DNA, 4137 bp, Homo sapiens
  source 1..4137: mol_type = unassigned DNA
atggccgcgcctgctgagccctgcgcggggcagggggtctggaaccagacagagcctgaacctgccgccaccagcctgctgagcctgtgcttcctgagaacagcaggggtctgggtaccccccatgtacctctgggtccttggtcccatctacctcctcttcatccaccaccatggccggggctacctccggatgtccccactcttcaaagccaagatggtgcttggattcgccctcatagtcctgtgtacctccagcgtggctgtcgctctttggaaaatccaacagggaacgcctgaggccccagaattcctcattcatcctactgtgtggctcaccacgatgagcttcgcagtgttcctgattcacaccgagaggaaaaagggagtccagtcatctggagtgctgtttggttactggcttctctgctttgtcttgccagctaccaacgctgcccagcaggcctccggagcgggcttccagagcgaccctgtccgccacctgtccacctacctatgcctgtctctggtggtggcacagtttgtgctgtcctgcctggcggatcaaccccccttcttccctgaagacccccagcagtctaacccctgtccagagactggggcagccttcccctccaaagccacgttctggtgggtttctggcctggtctggaggggatacaggaggccactgagaccaaaagacctctggtcgcttgggagagaaaactcctcagaagaacttgtttcccggcttgaaaaggagtggatgaggaaccgcagtgcagcccggaggcacaacaaggcaatagcatttaaaaggaaaggcggcagtggcatgaaggctccagagaccgagcccttcctacggcaagaagggagccagtggcgcccactgctgaaggccatctggcaggtgttccattctaccttcctcctggggaccctcagcctcatcatcagtgatgtcttcaggttcactgtccccaagctgctcagccttttcctggagtttattggtgatcccaagcctccagcctggaagggctacctcctcgccgtgctgatgttcctctcagcctgcctgcaaacgctgtttgagcagcagaacatgtacaggctcaaggtgctgcagatgaggttgcggtcggccatcactggcctggtgtacagaaaggtcctggctctgtccagcggctccagaaaggccagtgcggtgggtgatgtggtcaatctggtgtccgtggacgtgcagcggctgaccgagagcgtcctctacctcaacgggctgtggctgcctctcgtctggatcgtggtctgcttcgtctatctctggcagctcctggggccctccgccctcactgccatcgctgtcttcctgagcctcctccctctgaatttcttcatctccaagaaaaggaaccaccatcaggaggagcaaatgaggcagaaggactcacgggcacggctcaccagctctatcctcaggaactcgaagaccatcaagttccatggctgggagggagcctttctggacagagtcctgggcatccgaggccaggagctgggcgccttgcggacctccggcctcctcttctctgtgtcgctggtgtccttccaagtgtctacatttctggtcgcactggtggtgtttgctgtccacactctggtggccgagaatgctatgaatgcagagaaagcctttgtgactctcacagttctcaacatcctcaacaaggcccaggctttcctgcccttctccatccactccctcgtccaggcccgggtgtcctttgaccgtctggtcaccttcctctgcctggaagaagttgaccctggtgtcgtagactcaagttcctctggaagcgctgccgggaaggattgcatcaccatacacagtgccaccttcgcctggtcccaggaaagccctccctgcctccacagaataaacctcacggtgccccagggctgtctgctggctgttgtcggtccagtgggggcagggaagtcctccctgctgtccgccctccttggggagctgtcaaaggtggaggggttcgtgagcatcgagggtgctgtggcctacgtgccccaggaggcctgggtgcagaacacctctgtggtagagaatgtgtgcttcgggcaggagctggacccaccctggctggagagagtactagaagcctgtgccctgcagccagatgtggacagcttccctgagggaatccacacttcaattggggagcagggcatgaatctctccggaggccagaagcagcggctgagcctggcccgggctgtatacagaaaggcagctgtgtacctgctggatgaccccctggcggccctggatgcccacgttggccagcatgtcttcaaccaggtcattgggcctggtggactactccagggaacaaaacagaacctgggaccagcaccaaggaccccagaggcacctctgcaggcaggaggcccgagcttagacgcgagaggtccatcaagtcagtccctgagaaggaccgtaccacttcagaagcccagacagaggttcctctggatgaccctgacagggcaggatggccagcaggaaaggacagcatccaatacggcagggtgaaggccacagtgcacctggcctacctgcgtgccgtgggcacccccctctgcctctacgcactcttcctcttcctctgccagcaagtggcctccttctgccggggctactggctgagcctgtgggcggacgaccctgcagtaggtgggcagcagacgcaggcagccctgcgtggcgggatcttcgggctcctcggctgtctccaagccattgggctgtttgcctccatggctgcggtgctcctaggtggggcccgggcatccaggttgctcttccagaggctcctgtgggatgtggtgcgatctcccatcagcttctttgagcggacacccattggtcacctgctaaaccgcttctccaaggagacagacacggttgacgtggacattccagacaaactccggtccctgctgatgtacgcctttggactcctggaggtcagcctggtggtggcagtggctaccccactggccactgtggccatcctgccactgtttctcctctacgctgggtttcaggtggcttgcggccaatgtggagctcctggggaatggcctggtgtttgcagctgccacgtgtgctgtgctgagcaaagcccacctcagtgctggcctcgtgggcttctctgtctctgctgccctccaggtgacccagacactgcagtgggttgttcgcaactggacagacctagagaacagcatcgtgtcagtggagcggatgcaggactatgcctggacgcccaaggaggctccctggaggctgcccacatgtgcagctcagcccccctggcctcagggcgggcagatcgagttccgggactttgggctaagataccgacctgagctcccgctggctgtgcagggcgtgtccttcaagatccacgcaggagagaaggtgggcatcgttggcaggaccggggcagggaagtcctccctggccagtgggctgctgcggctccaggaggcagctgagggtgggatctggatcgacggggtccccattgcccacgtggggctgcacacactgcgctccaggatcagcatcatcccccaggaccccatcctgttccctggctctctgcggatgaacctcgacctgctgcaggagcactcggacgaggctatctgggcagccctggagacggtgcagctcaaagccttggtggccagcctgcccggccagctgcagtacaagtgtgctgaccgaggcgaggacctgagcgtgggccagaaacagctcctgtgtctggcacgtgcccttctccggaagacccagatcctcatcctggacgaggctactgctgccgtggaccctggcacggagctgcagatgcaggccatgctcgggagctggtttgcacagtgcactgtgctgctcattgcccaccgcctgcgctccgtgatggactgtgcccgggttctggtcatggacaaggggcaggtggcagagagcggcagcccggcccagctgctggcccagaagggcctgttttacagactggcccaggagtcaggcctggtctga

SEQ ID NO: 2987 - DNA, 2272 bp, Homo sapiens
  source 1..2272: mol_type = unassigned DNA
agtctgcccagagacttagcgacagacagacgctgggacccacgacgacagaaggcgccgatggccgcgcctgctgagccctgcgcggggcagggggtctggaaccagacagagcctgaacctgccgccaccagcctgctgagcctgtgcttcctgagaacagcaggggtctgggtaccccccatgtacctctgggtccttggtcccatctacctcctcttcatccaccaccatggccggggctacctccggatgtccccactcttcaaagccaagatggtagctgccatccctgggagcctggaaccaggcaatgtgcttggattcgccctcatagtcctgtgtacctccagcgtggctgtcgctctttggaaaatccaacagggaacgcctgaggccccagaattcctcattcatcctactgtgtggctcaccacgatgagcttcgcagtgttcctgattcacaccgagaggaaaaagggagtccagtcatctggagtgctgtttggttactggcttctctgctttgtcttgccagctaccaacgctgcccagcaggcctccggagcgggcttccagagcgaccctgtccgccacctgtccacctacctatgcctgtctctggtggtggcacagtttgtgctgtcctgcctggcggatcaaccccccttcttccctgaagacccccagcagtctaacccctgtccagagactggggcagccttcccctccaaagccacgttctggtgggtttctggcctggtctggaggggatacaggaggccactgagaccaaaagacctctggtcgcttgggagagaaaactcctcagaagaacttgtttcccggcttgaaaaggagtggatgaggaaccgcagtgcagcccggaggcacaacaaggcaatagcatttaaaaggaaaggcggcagtggcatgaaggctccagagaccgagcccttcctacggcaagaagggagccagtggcgcccactgctgaaggccatctggcaggtgttccattctaccttcctcctggggaccctcagcctcatcatcagtgatgtcttcaggttcactgtccccaagctgctcagccttttcctggagtttattggtgatcccaagcctccagcctggaagggctacctcctcgccgtgctgatgttcctctcagcctgcctgcaaacgctgtttgagcagcagaacatgtacaggctcaaggtgctgcagatgaggttgcggtcggccatcactggcctggtgtacagaaaggtcctggctctgtccagcggctccagaaaggccagtgcggtgggtgatgtggtcaatctggtgtccgtggacgtgcagcggctgaccgagagcgtcctctacctcaacgggctgtggctgcctctcgtctggatcgtggtctgcttcgtctatctctggcagctcctggggccctccgccctcactgccatcgctgtcttcctgagcctcctccctctgaatttcttcatctccaagaaaaggaaccaccatcaggaggagcaaatgaggcagaaggactcacgggcacggctcaccagctctatcctcaggaactcgaagaccatcaagttccatggctgggagggagcctttctggacagagtcctgggcatccgaggccaggagctgggcgccttgcggacctccggcctcctcttctctgtgtcgctggtgtccttccaagtgtctacatttctggtcgcactggtggtgtttgctgtccacactctggtggccgagaatgctatgaatgcagagaaagcctttgtgactctcacagttctcaacatcctcaacaaggcccaggctttcctgcccttctccatccactccctcgtccaggcccgggtgtcctttgaccgtctggtcaccttcctctgcctggaagaagttgaccctggtgtcgtagactcaagttcctctggaagcgctgccgggaaggattgcatcaccatacacagtgccaccttcgcctggtcccaggaaagccctccctgcctccacagagtcttgctctatcacgcgggctggagtgcaatggcatgatctcggctcactgcaacctccaccttccggattcaagcaattctcctgcctcagcctcccgagtagctgggattacaggcgcatgctaccacacccagctaatttttgtatttttagtagagatgggttttaccatgttcgtcaggctggtctccaactcctgacctcaagtgatccacctgcctcagttccc

SEQ ID NO: 2988 - DNA, 8293 bp, Homo sapiens
  source 1..8293: mol_type = unassigned DNA
atgagcctttcattttgtggtaacaacatttcttcatataatatcaacgatggtgtactacaaaattcctgctttgtggatgccctcaacctggtccctcatgtctttctgttgtttatcacttttccaatattgtttattgggtgggggagccaaagctcaaaagtacaaattcaccacaacacatggcttcattttccgggacataacctgagatggattcttacattcgctctcctgtttgtgcatgtctgtgaaatagcagaaggcattgtttcagactcgcggcgggaatcaaggcacctccacctctttatgccagccgtgatgggattcgttgccactacaacatcgatagtgtattatcataatatcgaaacatcaaattttcctaaattacttttagccctgttcctgtattgggtaatggcctttattacaaaaacaataaaattggttaagtactgtcagtctggcttggacatatcaaacctgcgtttctgcatcacaggcatgatggtcatcttgaatgggctcttgatggctgtggagatcaatgtcattcgagtcaggagatatgtatttttcatgaatcctcagaaagtaaagcctcctgaagacctccaggatctgggagtgagatttcttcaaccatttgtgaatttgctgtcaaaagcaacatactggtggatgaacacacttattatatctgctcacaaaaagcctattgatctgaaggcaattggaaaattgccaatagcaatgagagcagtaacaaattatgtttgcctgaaagatgcatatgaagaacaaaagaaaaaagttgcagatcatccaaatcggactccatctatatggcttgcaatgtacagagcttttgggcgaccaattctacttagtagcacattccgctatctggctgatttactgggttttgctggacctctttgtatttctggaatagttcagcgtgtgaatgaaacccagaatgggacaaataacacaactggaatttcagaaaccctctcatcaaaggaatttcttgaaaacgcttacgttctagcagttcttctcttcttggctcttattctgcaaaggacatttttgcaggcttcctactatgtaaccatagagactggcattaacctccgtggagctctgctggccatgatttataataaaatccttaggctctctacgtctaacttatccatgggggagatgactctggggcagatcaacaacttagtcgccattgaaactaatcaactcatgtggtttttgttcctgtgtcctaatctatgggctatgcctgttcagatcataatgggcgtgattctgctctataatttacttggatcaagtgcattggtcggtgcagctgtcattgtgctccttgcgccaattcagtactttattgctacaaagttggcagaggctcagaaaagtacacttgattattccactgagagactcaagaaaacaaatgaaatattgaaaggcatcaaacttctaaaattgtatgcctgggaacacattttctgcaaaagtgtggaggaaacaagaatgaaagaactatctagtctcaaaacctttgcactatatacatcactctccatcttcatgaatgcagcaattcccatagcagctgttcttgctacatttgtgacccatgcgtatgccagtggaaacaatctgaaacctgcagaggcctttgcttcactgtctctcttccatatcctggtcacaccactgttcctgctctccacggtggtcagatttgcagtcaaagccatcataagtgttcaaaagctgaatgagtttctcttgagtgatgagattggtgacgacagttggcgaactggtgaaagttcgcttccttttgagtcctgtaagaagcacactggagttcagccaaaaactataaacaggaaacagcctggaagatatcacctggacagctatgagcaatcaacacggcgtctacgtcccgcagaaacagaggacattgcaataaaggtcacaaatggatacttttcatggggcagtggtttagctacattatccaatatagatattcgaattccaacaggtcagttaaccatgattgtgggccaagtaggatgtgggaagtcctctcttctccttgccatcctcggtgagatgcagacattggaaggaaaagttcactggagcaatgtaaatgaatctgagccttcttttgaagcaaccagaagtaggaacaggtactctgtggcatatgcagctcaaaagccttggctattaaatgctacagtagaagaaaatattacttttggaagtccttttaacaaacagaggtacaaagctgtcacagatgcctgttctcttcagccagatattgacttattaccatttggagatcaaactgaaattggagagaggggcatcaacctgagtgggggacagaggcagagaatctgtgtggcacgagcgctgtatcaaaacaccaacattgtctttttggatgatccattctcagccctggacattcacttgagtgatcatttaatgcaggaggggattttgaaattcctgcaagatgacaaaaggacactcgttcttgtgactcacaaattacagtatctgacgcatgctgactggatcatagccatgaaagatggaagtgtcctaagagaaggaactttgaaggacattcaaaccaaagatgttgagctttatgaacactggaaaacacttatgaatcggcaagatcaagaattagaaaaggatatggaagctgaccaaactactttagagaggaaaactctccgacgggccatgtattcaagagaagccaaagcccagatggaggacgaagacgaagaggaagaagaggaggaagatgaggatgataacatgtccactgtaatgaggctcaggactaaaatgccatggaaaacctgctggcgctacctgacatctggaggattcttcctgctcatcctgatgattttctctaagcttttgaagcattcggtcattgtagctatagactattggctggccacatggacatcggagtacagtataaacaatactggaaaagctgatcagacctactatgtggctggctttagcatactctgtggagcaggcattttcctttgccttgttacatccctcactgtagaatggatgggtctcacagctgccaaaaatcttcaccacaaccttctcaataagataatccttggaccaataaggttttttgataccacacccctgggactgattctcaatcgcttttcagctgatactaatatcattgatcagcacatccctccaaccttggaatctctaactcgctcaacactgctctgcctgtctgccattgggatgatttcttatgctactcctgtgttcctggttgctctcctgccccttggtgttgccttttattttatccagaaatactttcgggttgcctctaaggacctccaggaacttgacgatagtacccagctccctctgctctgtcacttctcagaaacagcagaaggactcaccaccattcgggcctttaggcatgaaaccagatttaaacaacgtatgctggaactgacggatacaaacaacattgcctacttatttctctcagctgccaacagatggctggaggtcaggacggattatctgggagcttgcattgtcctcactgcatctatagcatccattagtgggtcttcgaattctggattggtaggcttgggtcttctgtatgcacttacgataaccaattatttgaattgggttgtgaggaacttggctgacctggaggtccagatgggtgcagtgaagaaggtgaacagtttcctgactatggagtcagagaactatgaaggcacaatggatccttctcaagttccagaacattggccacaagaaggggagatcaagatacatgatctgtgtgtcagatatgaaaataatctgaaacctgttcttaagcacgtcaaggcttacatcaaacctggacaaaaggtgggcatatgtggtcgcactggcagtgggaaatcatcgttatctctggctttcttcagaatggttgatatatttgatggaaaaattgtcattgatgggatagacatttccaaattaccactgcacacactacgttctagactttcaatcattctgcaggatccaatactattcagtggttccattagatttaatttagatccagagtgcaaatgcacagatgacagactctgggaagccttagaaattgctcagctgaagaatatggtcaaatctctacctggaggtctagatgcggttgtcactgaaggtggggagaattttagcgttggacagagacagctattttgccttgccagggcctttgtccgcaaaagcagcattcttattatggatgaggcaacagcttccattgacatggccacagagaatattttgcaaaaagtagtaatgacagcctttgcagaccggaccgtggtgacaatagctcatcgagtacacactattctgacggcagacctggttattgtgatgaagcgaggaaatattttagaatatgacactccagaaagcctcttggctcaggaaaatggagtatttgcttcttttgttcgcgcagacatgtgaaggagtgtcttaaaacaatacatgtatttaaaataatgcagtcataacctaattaatggatcatcagcttgacctctgtaaagtggcatcttaaaacttttacagatttttgcacaaaaagtggacatttatttttcctgtttttaaaacagtttttcaagatattattgcttaatatgttcattattgatgtttttatagtgatccagccactctagctttaagaatagctaggttgtattaaaacatgtaagctactttaagtgataaatcaatagctaaagttttctcctaactttaagtctggtaaatatctctcaggaatggaagtgtcaatgagtagtcagtattactatactcttgtttgtaagaatatattttccttattgttggagtctccagaggttattggaaggaataaaaaaggacatgttttctaacgaaactctcaaattcattatctacttcatgagaatttatttgtattcattaacattagtaatacctatttttcttaagagccttcttttttcccttttgtttcttgtcaccaagaagttatcacacttatacttattctataaggccaaagccttatctagaaagatcatgaagagtttggatatttttaaaactatactcgaattttcattttttcctgtcctgtaaagagagaattcttaagatatcaggcataatgtatgtaccttttccagactgaagttcaaagaatgattaggttcaatctttcagtggcaggccagctaaactttctatagtttaatgattagctgtggttatgatcttgagccctaacatgccacattactcaagatttacacaggcaagtgacttcatttggcactgctaataatggcaggtgaacattcctctcaggtgtgagatatttcctatgaaacagtccactggcaggctggagatatcttacactttgaagttatatatatataaaacaagtgtctatttctagctgaaagagtttacctcttctagacatttatgcccaatggtgtcacacatgatcatttgctcctgctctaattttaatgtgcatacaaaaaatataccaaaaatgttattgtaattttaatgagcatgtaaagagtgtatcaaaaattgatgggatattagtgttaggttttgcttaaatgaaaattaataaattcaaaaatactaaaagtcaccttctttgtcacgttagcaaccagtttctactattctgtgcccatccagtgtcaatatcattgatttctttttcatatgaagatccacatgcattgtaagattgtgaagatatataaaattgatgaattaagagaaattatgccactttcctatagtttctgtgttctgtttattgtatggtgtattcactcttggaaaatatgtaatagttgtgtatccagaatatgtgtcttcacctgaatatttaatctttatatttacaaaaaaataagttccacaagatggacaaaaatggtccatgatatttagcttaaattgtaaccttttgttgtgtatataaaacttccttggaagaaaataaccttattgttttcttaaagctaaacagaataggattggtactcattaattatgtcttgcaaatattttctaaaaattcaaccactctcctaaaatggtgtttaaatattttgtagggcagaatatgcatattgcctgttagcaagtaataattcattctcatagagaaatgggtttttacccatggaagtaatcttttttttttcttttttttttttaattttttttttaatatactttaagttttagggtacatgtgcacattgtgcaggttagttacatatatatacatgtgccatgctggtgcgctgcacccactaactcgtcatctagcattaggtatatctcccaatgctatccctccccactccccccaccccaccacagtccccagagtgtgatattccccttcctgtgtccatgtgatctcattgttcaattcccacctatgagtgagaatatgcggtgtttggttttttgttcttgcgatagtttactgagaatgatggtttccagtttcatccatgtccctacaaaggacatgaactcatcattttgtatggctgcatagtattccatggtgtatatgtgccacattttcttaatccagtctatcattgttggacatttgggttggttccaagtctttgctattgtgaataatgccgcaataaacatacgtgtgcatgtgtctttatagcagcatgatttatagtcatttgggtatatacccagtaatgggatggctgggtcaaatggtatttctagttctagatccctgaggaatcgccacactgacttccacaatggttaaactaaagagcttctgcacagcaaaagaaactaccatcagagtgaacaggcaacctacaacatgggagaaaattttcgcaacctactcatctgacaaagggctaatatccagaatctacaatgaactcaaacaaatttacaagaaaaaaacaaacaaccccatcaaaaagtgggtgaaggacatgaacagacacttctcaaaagaagacatttatgcagccaaaaaacacatgaaaaaatgctcatcatcactggccatcagagaaatgcaaatcaaaaccactatgagatatcatctcacaccagttagaatggcaatcattaaaaagtcaggaaacaacaggtgctggagaggatgtggagaaataggaacacttttacactgttggtgggactgtaaactagttcaaccattgtggaagtaatcttttaatgatattttcttattatattgctacaggcaacatcagtagaagcctatctagttacactaaactaaagatcacattcaccattcttacagccaagtggttgctggtcccctcataacttttagttacttaagttgagtaaatgtctaattgtttacaaactaaattgactaaataaggtcaaggataatgtttttcattgattaaccatttattatacatataatctattgaatataaaaagattcaccttgaaataatatttgactatataggtacatatctgtaaaagatgaccaccttaactaaatcagattttacatttataaattttatatttaattagtcaaatcaatttttaaatcataactccttaatctcataagaagcaataaatgcataaagcattatattaaaataccagggttacttatgtcattgacagggaaaagactttgtataaacaattatgcaccatctatttttgtactcttactcatgatccatttaaaagtctactcagctctagattagataccagaagaccctctaagtaactgataactgagattcgggaccatgtcttgtttgccattgtgcccttggaatttaatacaagtgcctaacccacagtagggttgattgattcactgattagttttactgccatgtgcctataactataggttattctctttccttttctatgttgtgtttattctatttattctctacaatatataaaatgtatttgttctctacaataaatgtgtttattctctacaatatataaaaacatattggactactattacataattaaattactcttt

SEQ ID NO: 2989 - DNA, 4650 bp, Homo sapiens
  source 1..4650: mol_type = unassigned DNA
atgagcctttcattttgtggtaacaacatttcttcatataatatcaacgatggtgtactacaaaattcctgctttgtggatgccctcaacctggtccctcatgtctttctgttgtttatcacttttccaatattgtttattgggtgggggagccaaagctcaaaagtacaaattcaccacaacacatggcttcattttccgggacataacctgagatggattcttacattcgctctcctgtttgtgcatgtctgtgaaatagcagaaggcattgtttcagactcgcggcgggaatcaaggcacctccacctctttatgccagccgtgatgggattcgttgccactacaacatcgatagtgtattatcataatatcgaaacatcaaattttcctaaattacttttagccctgttcctgtattgggtaatggcctttattacaaaaacaataaaattggttaagtactgtcagtctggcttggacatatcaaacctgcgtttctgcatcacaggcatgatggtcatcttgaatgggctcttgatggctgtggagatcaatgtcattcgagtcaggagatatgtatttttcatgaatcctcagaaagtaaagcctcctgaagacctccaggatctgggagtgagatttcttcaaccatttgtgaatttgctgtcaaaagcaacatactggtggatgaacacacttattatatctgctcacaaaaagcctattgatctgaaggcaattggaaaattgccaatagcaatgagagcagtaacaaattatgtttgcctgaaagatgcatatgaagaacaaaagaaaaaagttgcagatcatccaaatcggactccatctatatggcttgcaatgtacagagcttttgggcgaccaattctacttagtagcacattccgctatctggctgatttactgggttttgctggacctctttgtatttctggaatagttcagcgtgtgaatgaaacccagaatgggacaaataacacaactggaatttcagaaaccctctcatcaaaggaatttcttgaaaacgcttacgttctagcagttcttctcttcttggctcttattctgcaaaggacatttttgcaggcttcctactatgtaaccatagagactggcattaacctccgtggagctctgctggccatgatttataataaaatccttaggctctctacgtctaacttatccatgggggagatgactctggggcagatcaacaacttagtcgccattgaaactaatcaactcatgtggtttttgttcctgtgtcctaatctatgggctatgcctgttcagatcataatgggcgtgattctgctctataatttacttggatcaagtgcattggtcggtgcagctgtcattgtgctccttgcgccaattcagtactttattgctacaaagttggcagaggctcagaaaagtacacttgattattccactgagagactcaagaaaacaaatgaaatattgaaaggcatcaaacttctaaaattgtatgcctgggaacacattttctgcaaaagtgtggaggaaacaagaatgaaagaactatctagtctcaaaacctttgcactatatacatcactctccatcttcatgaatgcagcaattcccatagcagctgttcttgctacatttgtgacccatgcgtatgccagtggaaacaatctgaaacctgcagaggcctttgcttcactgtctctcttccatatcctggtcacaccactgttcctgctctccacggtggtcagatttgcagtcaaagccatcataagtgttcaaaagctgaatgagtttctcttgagtgatgagattggtgacgacagttggcgaactggtgaaagttcgcttccttttgagtcctgtaagaagcacactggagttcagccaaaaactataaacaggaaacagcctggaagatatcacctggacagctatgagcaatcaacacggcgtctacgtcccgcagaaacagaggacattgcaataaaggtcacaaatggatacttttcatggggcagtggtttagctacattatccaatatagatattcgaattccaacaggtcagttaaccatgattgtgggccaagtaggatgtgggaagtcctctcttctccttgccatcctcggtgagatgcagacattggaaggaaaagttcactggagcaatgtaaatgaatctgagccttcttttgaagcaaccagaagtaggaacaggtactctgtggcatatgcagctcaaaagccttggctattaaatgctacagtagaagaaaatattacttttggaagtccttttaacaaacagaggtacaaagctgtcacagatgcctgttctcttcagccagatattgacttattaccatttggagatcaaactgaaattggagagaggggcatcaacctgagtgggggacagaggcagagaatctgtgtggcacgagcgctgtatcaaaacaccaacattgtctttttggatgatccattctcagccctggacattcacttgagtgatcatttaatgcaggaggggattttgaaattcctgcaagatgacaaaaggacactcgttcttgtgactcacaaattacagtatctgacgcatgctgactggatcatagccatgaaagatggaagtgtcctaagagaaggaactttgaaggacattcaaaccaaagatgttgagctttatgaacactggaaaacacttatgaatcggcaagatcaagaattagaaaaggatatggaagctgaccaaactactttagagaggaaaactctccgacgggccatgtattcaagagaagccaaagcccagatggaggacgaagacgaagaggaagaagaggaggaagatgaggatgataacatgtccactgtaatgaggctcaggactaaaatgccatggaaaacctgctggcgctacctgacatctggaggattcttcctgctcatcctgatgattttctctaagcttttgaagcattcggtcattgtagctatagactattggctggccacatggacatcggagtacagtataaacaatactggaaaagctgatcagacctactatgtggctggctttagcatactctgtggagcaggcattttcctttgccttgttacatccctcactgtagaatggatgggtctcacagctgccaaaaatcttcaccacaaccttctcaataagataatccttggaccaataaggttttttgataccacacccctgggactgattctcaatcgcttttcagctgatactaatatcattgatcagcacatccctccaaccttggaatctctaactcgctcaacactgctctgcctgtctgccattgggatgatttcttatgctactcctgtgttcctggttgctctcctgccccttggtgttgccttttattttatccagaaatactttcgggttgcctctaaggacctccaggaacttgacgatagtacccagctccctctgctctgtcacttctcagaaacagcagaaggactcaccaccattcgggcctttaggcatgaaaccagatttaaacaacgtatgctggaactgacggatacaaacaacattgcctacttatttctctcagctgccaacagatggctggaggtcaggacggattatctgggagcttgcattgtcctcactgcatctatagcatccattagtgggtcttcgaattctggattggtaggcttgggtcttctgtatgcacttacgataaccaattatttgaattgggttgtgaggaacttggctgacctggaggtccagatgggtgcagtgaagaaggtgaacagtttcctgactatggagtcagagaactatgaaggcacaatggatccttctcaagttccagaacattggccacaagaaggggagatcaagatacatgatctgtgtgtcagatatgaaaataatctgaaacctgttcttaagcacgtcaaggcttacatcaaacctggacaaaaggtgggcatatgtggtcgcactggcagtgggaaatcatcgttatctctggctttcttcagaatggttgatatatttgatggaaaaattgtcattgatgggatagacatttccaaattaccactgcacacactacgttctagactttcaatcattctgcaggatccaatactattcagtggttccattagatttaatttagatccagagtgcaaatgcacagatgacagactctgggaagccttagaaattgctcagctgaagaatatggtcaaatctctacctggaggtctagatgcggttgtcactgaaggtggggagaattttagcgttggacagagacagctattttgccttgccagggcctttgtccgcaaaagcagcattcttattatggatgaggcaacagcttccattgacatggccacagagaatattttgcaaaaagtagtaatgacagcctttgcagaccggaccgtggtgacaatagctcaccgtgtctcttctattatggatgcaggccttgttttagtcttttctgagggtattttagtggagtgtgatactgtcccaaatttgctcgcccacaagaatggcctcttttccactttggtgatgaccaacaagtag

SEQ ID NO: 2990 - DNA, 1693 bp, Homo sapiens
  source 1..1693: mol_type = unassigned DNA
ggggaaggtctccggccccaggcgcggcgcgcggggcttctgcccagtttcctgcttctcagccgcggtgtctgccccggcccagagcagtctgtgcaatttagaaactcgataggaggcagcagctggtctcccaccaccctaaaaataatccgttccggcgcactgcgtgcttcgcctaggggaggaaaactgtcatcggagagttctgcgtccgggtttgaaatttacatcttaagacagtgtaggaagtcggtgttttgaaggtagctcaagtgcaccggcaggggtttgaagcagcgtgaagctattgcccaaggaaaagtattgtttgtgaccattgctaaatcaattatcaatgaaaggaaagaaagaaaagagtaaaccatataagaagaaatgagcctttcattttgtggtaacaacatttcttcatataatatcaacgatggtgtactacaaaattcctgctttgtggatgccctcaacctggtccctcatgtctttctgttgtttatcacttttccaatattgtttattgggtgggggagccaaagctcaaaagtacaaattcaccacaacacatggcttcattttccgggacataacctgagatggattcttacattcgctctcctgtttgtgcatgtctgtgaaatagcagaaggcattgtttcagactcgcggcgggaatcaaggcacctccacctctttatgccagccgtgatgggattcgttgccactacaacatcgatagtgtattatcataatatcgaaacatcaaattttcctaaattacttttaggttttagccatcatgagagtaaaagctgctatcaacattcttaagtattttgtggctatatgcatttatttctcctaggtaaatacctaagagtgaaatctctgggtcatacaataagtgggtaaatgttcatattttaagaaactgacatcttttcccaaaatgtttgtatcattttttatactcactaacaaggtgtaagagttccagttccacatgttcatcatttggtgatcttggtctaatttagtcatgctagtgggtgtgtactggtaatacattgcggttttaatttgcatttatctgattgctaattatgttgaacactctttgatgagtttattggccatttttaatctttgggatgtggctattcatatcttttgcccatgtttcattgggttgcacttttattattgcgttgtaggaatattttgtgcatactagatattagtatgtcatcagttacatgttttgataatgttttccttctagtctgtggcatacatattcatttatttaatagggtcttttaatgagcagaagattttaaatttcgatgtagtataatttatcatttcttctagtccttagttactgctttctgtgtcttaagacatctttgtcttccctctaaatatgtttccctcttattctcctgtttgcttttagatgctttatggtttccatttttatttttaggactacgattctttctaaattaattgtgtatatggtgtaagataggtgtcaaagttcttttttttttttttccaagtggatatcaatgtgttccagcaccatttgtgggatagactttctgtttctcaagagattgcattggcacttatgtaaaaaaaaataaatcaaatgactatttaaatttaa

SEQ ID NO: 2991 - DNA, 4562 bp, Homo sapiens
  source 1..4562: mol_type = unassigned DNA
agtaaaccatataagaagaaatgagcctttcattttgtggtaacaacatttcttcatataatatcaacgatggtgtactacaaaattcctgctttgtggatgccctcaacctggtccctcatgtctttctgttgtttatcacttttccaatattgtttattgggtgggggagccaaagctcaaaagtacaaattcaccacaacacatggcttcattttccgggacataacctgagatggattcttacattcgctctcctgtttgtgcatgtctgtgaaatagcagaaggcattgtttcagactcgcggcgggaatcaaggcacctccacctctttatgccagccgtgatgggattcgttgccactacaacatcgatagtgtattatcataatatcgaaacatcaaattttcctaaattacttttagccctgttcctgtattgggtaatggcctttattacaaaaacaataaaattggttaagtactgtcagtctggcttggacatatcaaacctgcgtttctgcatcacaggcatgatggtcatcttgaatgggctcttgatggctgtggagatcaatgtcattcgagtcaggagatatgtatttttcatgaatcctcagaaagtaaagcctcctgaagacctccaggatctgggagtgagatttcttcaaccatttgtgaatttgctgtcaaaagcaacatactggtggatgaacacacttattatatctgctcacaaaaagcctattgatctgaaggcaattggaaaattgccaatagcaatgagagcagtaacaaattatgtttgcctgaaagatgcatatgaagaacaaaagaaaaaagttgcagatcatccaaatcggactccatctatatggcttgcaatgtacagagcttttgggcgaccaattctacttagtagcacattccgctatctggctgatttactgggttttgctggacctctttgtatttctggaatagttcagcgtgtgaatgaaacccagaatgggacaaataacacaactggaatttcagaaaccctctcatcaaaggaatttcttgaaaacgcttacgttctagcagttcttctcttcttggctcttattctgcaaaggacatttttgcaggcttcctactatgtaaccatagagactggcattaacctccgtggagctctgctggccatgatttataataaaatccttaggctctctacgtctaacttatccatgggggagatgactctggggcagatcaacaacttagtcgccattgaaactaatcaactcatgtggtttttgttcctgtgtcctaatctatgggctatgcctgttcagatcataatgggcgtgattctgctctataatttacttggatcaagtgcattggtcggtgcagctgtcattgtgctccttgcgccaattcagtactttattgctacaaagttggcagaggctcagaaaagtacacttgattattccactgagagactcaagaaaacaaatgaaatattgaaaggcatcaaacttctaaaattgtatgcctgggaacacattttctgcaaaagtgtggaggaaacaagaatgaaagaactatctagtctcaaaacctttgcactatatacatcactctccatcttcatgaatgcagcaattcccatagcagctgttcttgctacatttgtgacccatgcgtatgccagtggaaacaatctgaaacctgcagaggcctttgcttcactgtctctcttccatatcctggtcacaccactgttcctgctctccacggtggtcagatttgcagtcaaagccatcataagtgttcaaaagctgaatgagtttctcttgagtgatgagattggtgacgacagttggcgaactggtgaaagttcgcttccttttgagtcctgtaagaagcacactggagttgtcacaaatggatacttttcatggggcagtggtttagctacattatccaatatagatattcgaattccaacaggtcagttaaccatgattgtgggccaagtaggatgtgggaagtcctctcttctccttgccatcctcggtgagatgcagacattggaaggaaaagttcactggagcaatgtaaatgaatctgagccttcttttgaagcaaccagaagtaggaacaggtactctgtggcatatgcagctcaaaagccttggctattaaatgctacagtagaagaaaatattacttttggaagtccttttaacaaacagaggtacaaagctgtcacagatgcctgttctcttcagccagatattgacttattaccatttggagatcaaactgaaattggagagaggggcatcaacctgagtgggggacagaggcagagaatctgtgtggcacgagcgctgtatcaaaacaccaacattgtctttttggatgatccattctcagccctggacattcacttgagtgatcatttaatgcaggaggggattttgaaattcctgcaagatgacaaaaggacactcgttcttgtgactcacaaattacagtatctgacgcatgctgactggatcatagccatgaaagatggaagtgtcctaagagaaggaactttgaaggacattcaaaccaaagatgttgagctttatgaacactggaaaacacttatgaatcggcaagatcaagaattagaaaaggatatggaagctgaccaaactactttagagaggaaaactctccgacgggccatgtattcaagagaagccaaagcccagatggaggacgaagacgaagaggaagaagaggaggaagatgaggatgataacatgtccactgtaatgaggctcaggactaaaatgccatggaaaacctgctggcgctacctgacatctggaggattcttcctgctcatcctgatgattttctctaagcttttgaagcattcggtcattgtagctatagactattggctggccacatggacatcggagtacagtataaacaatactggaaaagctgatcagacctactatgtggctggctttagcatactctgtggagcaggcattttcctttgccttgttacatccctcactgtagaatggatgggtctcacagctgccaaaaatcttcaccacaaccttctcaataagataatccttggaccaataaggttttttgataccacacccctgggactgattctcaatcgcttttcagctgatactaatatcattgatcagcacatccctccaaccttggaatctctaactcgctcaacactgctctgcctgtctgccattgggatgatttcttatgctactcctgtgttcctggttgctctcctgccccttggtgttgccttttattttatccagaaatactttcgggttgcctctaaggacctccaggaacttgacgatagtacccagctccctctgctctgtcacttctcagaaacagcagaaggactcaccaccattcgggcctttaggcatgaaaccagatttaaacaacgtatgctggaactgacggatacaaacaacattgcctacttatttctctcagctgccaacagatggctggaggtcaggacggattatctgggagcttgcattgtcctcactgcatctatagcatccattagtgggtcttcgaattctggattggtaggcttgggtcttctgtatgcacttacgataaccaattatttgaattgggttgtgaggaacttggctgacctggaggtccagatgggtgcagtgaagaaggtgaacagtttcctgactatggagtcagagaactatgaaggcacaatggatccttctcaagttccagaacattggccacaagaaggggagatcaagatacatgatctgtgtgtcagatatgaaaataatctgaaacctgttcttaagcacgtcaaggcttacatcaaacctggacaaaaggtgggcatatgtggtcgcactggcagtgggaaatcatcgttatctctggctttcttcagaatggttgatatatttgatggaaaaattgtcattgatgggatagacatttccaaattaccactgcacacactacgttctagactttcaatcattctgcaggatccaatactattcagtggttccattagatttaatttagatccagagtgcaaatgcacagatgacagactctgggaagccttagaaattgctcagctgaagaatatggtcaaatctctacctggaggtctagatgcggttgtcactgaaggtggggagaattttagcgttggacagagacagctattttgccttgccagggcctttgtccgcaaaagcagcattcttattatggatgaggcaacagcttccattgacatggccacagagaatattttgcaaaaagtagtaatgacagcctttgcagaccggaccgtggtgacaatagctcaccgtgtctcttctattatggatgcaggccttgttttagtcttttctgagggtattttagtggagtgtgatactgtcccaaatttgctcgcccacaagaatggcctcttttccactttggtgatgaccaacaagtag

SEQ ID NO: 2992 - DNA, 3664 bp, Homo sapiens
  source 1..3664: mol_type = unassigned DNA
gccaggctgcggagcggacggacgcgcctggtgccccggggaggggcgccaccgggggaggaggaggaggagaaggtggagaggaagagacgccccctctgcccgagacctctcaaggccctgacctcaggggccagggcactgacaggacaggagagccaagttcctccacttgggctgcccgaagaggccgcgaccctggagggccctgagcccaccgcaccaggggccccagcaccaccccgggggcctaaagcgacagtctcaggggccatcgcaaggtttccagttgcctagacaacaggcccagggtcagagcaacaatccttccagccacctgcctcaactgctgccccaggcaccagccccagtccctacgcggcagccagcccaggtgacatgccggtgctctccaggccccggccctggcgggggaacacgctgaagcgcacggccgtgctcctggccctcgcggcctatggagcccacaaagtctaccccttggtgcgccagtgcctggccccggccaggggtcttcaggcgcccgccggggagcccacgcaggaggcctccggggtcgcggcggccaaagctggcatgaaccgggtattcctgcagcggctcctgtggctcctgcggctgctgttcccccgggtcctgtgccgggagacggggctgctggccctgcactcggccgccttggtgagccgcaccttcctgtcggtgtatgtggcccgcctggacggaaggctggcccgctgcatcgtccgcaaggacccgcgggcttttggctggcagctgctgcagtggctcctcatcgccctccctgctaccttcgtcaacagtgccatccgttacctggagggccaactggccctgtcgttccgcagccgtctggtggcccacgcctaccgcctctacttctcccagcagacctactaccgggtcagcaacatggacgggcggcttcgcaaccctgaccagtctctgacggaggacgtggtggcctttgcggcctctgtggcccacctctactccaacctgaccaagccactcctggacgtggctgtgacttcctacaccctgcttcgggcggcccgctcccgtggagccggcacagcctggccctcggccatcgccggcctcgtggtgttcctcacggccaacgtgctgcgggccttctcgcccaagttcggggagctggtggcagaggaggcgcggcggaagggggagctgcgctacatgcactcgcgtgtggtggccaactcggaggagatcgccttctatgggggccatgaggtggagctggccctgctacagcgctcctaccaggacctggcctcgcagatcaacctcatccttctggaacgcctgtggtatgttatgctggagcagttcctcatgaagtatgtgtggagcgcctcgggcctgctcatggtggctgtccccatcatcactgccactggctactcagagtcagatgcagaggccgtgaagaaggcagccttggaaaagaaggaggaggagctggtgagcgagcgcacagaagccttcactattgcccgcaacctcctgacagcggctgcagatgccattgagcggatcatgtcgtcgtacaaggaggtgacggagctggctggctacacagcccgggtgcacgagatgttccaggtatttgaagatgttcagcgctgtcacttcaagaggcccagggagctagaggacgctcaggcggggtctgggaccataggccggtctggtgtccgtgtggagggccccctgaagatccgaggccaggtggtggatgtggaacaggggatcatctgcgagaacatccccatcgtcacgccctcaggagaggtggtggtggccagcctcaacatcagggtggaggaaggcatgcatctgctcatcacaggccccaatggctgcggcaagagctccctgttccggatcctgggtgggctctggcccacgtacggtggtgtgctctacaagcccccaccccagcgcatgttctacatcccgcagaggccctacatgtctgtgggctccctgcgtgaccaggtgatctacccggactcagtggaggacatgcaaaggaagggctactcggagcaggacctggaagccatcctggacgtcgtgcacctgcaccacatcctgcagcgggagggaggttgggaggctatgtgtgactggaaggacgtcctgtcgggtggcgagaagcagagaatcggcatggcccgcatgttctaccacaggcccaagtacgccctcctggatgaatgcaccagcgccgtgagcatcgacgtggaaggcaagatcttccaggcggccaaggacgcgggcattgccctgctctccatcacccaccggccctccctgtggaaataccacacacacttgctacagttcgatggggagggcggctggaagttcgagaagctggactcagctgcccgcctgagcctgacggaggagaagcagcggctggagcagcagctggcgggcattcccaagatgcagcggcgcctccaggagctctgccagatcctgggcgaggccgtggccccagcgcatgtgccggcacctagcccgcaaggccctggtggcctccagggtgcctccacctgacacaaccgtccccggcccctgccccgcccccaagctcggatcacatgaaggagacagcagcacccacccatgcacgcaccccgcccctgcatgcctggcccctcctcctagaaaacccttcccgccctcgggaaagtagatgtggagggtggcgccctgcgtaaccctcgccctgtccctcccactccctgggggcgctgttccacagtgactgggccctgtccagggcagtgagtcctctactttgctccgtggaggaagctggggtacaaggggcccagtgctggccacacagcagcgcagccgagccccaggagcccgtcaggccacagcccctggcactgcaggtggcctccctccagagactcgagtccccatgattccctcctcgtcagtctctcaaagaccccatggtccatcccctgagggtggtcagccaaggctcccgttccgtgggatgccataaaagccgcccagtgggacccacagtcacacagagcgcctcacctgcatcctctcccccacaagagccccaaagatcccacgggagaggggagagggacgcacagcactgcctgccaagcgagaatgcaggccccgccccctcggcccctcaccacctctttctacagcctaatttattggattccctattcgtagccatctccgtggccaatgtgactaccgtgccagcagcgggggcggcccagcctctgagtcccgtggggccccggctcccaccggtgccaaacccagcccctgcggccgtcaccccgccagcctacactgccagccgccaccggggcacacgggcctctgcttgccagccaggagtgcggacaccatgttcccagctcagtgccaaagaggggtcaccagggggagctgtctgcggagccagcgcctgcccgagagagaccccaccgccaccgtgtgcctttcccgggccctcagccctcgggccgggcaccacccccagtccccccagtaaaagcctccactggcaaatgcagtccttcctccctgc

SEQ ID NO: 2993 - DNA, 842 bp, Homo sapiens
  source 1..842: mol_type = unassigned DNA
gcaacatggacgggcggcttcgcaaccctgaccagtctctgacggaggacgtggtggcctttgcggcctctgtggcccacctctactccaacctgaccaagccactcctggacgtggctgtgacttcctacaccctgcttcgggcggcccgctcccgtggagccggcacagcctggccctcggccatcgccggcctcgtggtgttcctcacggccaacgtgctgcgggccttctcgcccaagttcggggagctggtggcagaggaggcgcggcggaagggggagctgcgctacatgcactcgcgtgtggtggccaactcggaggagatcgccttctatgggggccatgaggtggagctggccctgctacagcgctcctaccaggacctggcctcgcagatcaacctcatccttctggaacgcctgtggtatgttatgctggagcagttcctcatgaagtatgtgtggagcgcctcgggcctgctcatggtggctgtccccatcatcactgccactggctactcagagtcaggtgagacccagggctccaagaggatccaggccaggggcctgtcccccataccgctgggtgctgagctcacgagggcccaactcagccagcccgccgcccacttctgctgccggggccaccgaggccctgctgccagccttgatgctttcagaggttgagctcgccttgcccctccttgttgccttttgccctgcgcgcacctcacgccctttgttaccactcagacaagcccaggactgcaagtcaggaacactacatgtcacttctccaggcacagataccctcacccacctgtccctgtcctcaaccca

SEQ ID NO: 2994 - DNA, 668 bp, Homo sapiens
  source 1..668: mol_type = unassigned DNA
gactgttctccacagtggctgccccattttaccttcccgccagcagtgttggagggttccaccttttcatcgtggctagcactgatgcagaggccgtgaagaaggcagccttggaaaagaaggaggaggagctggtgagcgagcgcacagaagccttcactattgcccgcaacctcctgacagcggctgcagatgccattgagcggatcatgtcgtcgtacaaggaggtgacggagctggctggctacacagcccgggtgcacgagatgttccaggtatttgaagatgttcagcgctgtcacttcaagaggcccagggagctagaggacgctcaggcggggtctgggaccataggccggtctggtgtccgtgtggagggccccctgaagatccgaggccaggtggtggatgtggaacaggggatcatctgcgagaacatccccatcgtcacgccctcaggagaggtggtggtggccagcctcaacatcagggtggaggaaggcatgcatctgctcatcacaggccccaatggctgcggcaagagctccctgttccggatcctgggtgggctctggcccacgtacggtggtgtgctctacaagcccccaccccagcgcatgttctacatcccgcagaggccctacatgtctgtgggctccctgcgtgac

SEQ ID NO: 2995 - DNA, 6238 bp, Homo sapiens
  source 1..6238: mol_type = unassigned DNA
aaaacacaacagtggaagagaaacgctgcagactatgggacgctgtaggactttctaaaacatttgctggggatttctgtgaagcatgatcttttaaaacgaattcttttggaagccggtttgggtaactgggaaaatgacacatatgctaaatgcagcagctgatcgagtgaaatggaccagatcgagtgctgctaagagggctgcctgcctggtggctgcggcatatgctctgaaaaccctctatcccatcattggcaagcgtttaaagcaatctggccacgggaagaaaaaagcagcagcttaccctgctgcagagaacacagaaatactgcattgcaccgagaccatttgtgaaaaaccttcgcctggagtgaatgcagatttcttcaaacagctactagaacttcggaaaattttgtttccaaaacttgtgaccactgaaacagggtggctctgcctgcactcagtggctctaatctcaagaacctttctttctatctatgtggctggtctggatggaaaaatcgtgaaaagcattgtggaaaagaagcctcggactttcatcatcaaattaatcaagtggcttatgattgccatccctgctaccttcgtcaacagtgcaataaggtacctggaatgcaaattggctttggccttcagaactcgcctagtagaccacgcctatgaaacctattttacaaatcagacttattataaagtgatcaatatggatgggaggctggcaaaccctgaccaatctcttacggaggatattatgatgttctcccaatctgtggctcacttgtattccaatctgaccaaacctattttagatgtaatgctgacctcctatacactcattcaaactgctacatccagaggagcaagcccaattgggcccaccctactagcaggacttgtggtgtatgccactgctaaagtgttaaaagcctgttctcccaaatttggcaaactggtggcagaggaagcacatagaaaaggctatttgcggtatgtgcactcgagaattatagccaatgtagaagaaattgccttttacagaggacataaggtagaaatgaaacaacttcagaaaagttacaaagctttagcagatcagatgaacctcattttatccaaacgtttgtggtacatcatgatagaacagttcctgatgaagtatgtttggagcagcagtggactaattatggtggctatacctattatcactgcaactggctttgcagatggtgaggatggccaaaagcaagttatggttagtgaacggacagaagcctttaccactgctcgaaatttactggcctctggagctgatgctattgaaaggattatgtcttcatacaaagaggtcactgaattagcaggctacactgctcgagtgtacaatatgttttgggtctttgatgaagtaaaaagaggcatttataagagaactgctgtcattcaagaatctgaaagccatagcaagaatggagctaaggtagaattacctctcagtgacacattggcaattaaaggaaaagttattgatgtggatcacggaattatttgtgaaaatgttcccataattacaccagcaggagaagtggtggcttccaggctaaacttcaaagtagaagaaggaatgcatcttttgataactggtcccaatggttgtgggaaaagttctctcttcagaattctaagtgggctctggcctgtgtatgaaggagtcctctataaaccacctcctcaacatatgttttatattccacaaaggccatatatgtctcttggaagtcttcgggatcaagtcatttaccctgattcagtggatgatatgcatgataaaggttatacagaccaagatctggaacgtatcctacacaatgtccatctctatcacatagttcaaagagaaggaggatgggatgctgttatggactggaaagatgtcctgtcaggaggggaaaagcaaagaatgggcatggctcgtatgttttatcataaaccaaaatatgccttgctggatgaatgtaccagtgctgtcagcattgatgtcgaaggaaagatatttcaggctgcaaaaggggctggaatttccttactgtctataacacacagaccttctctttggaaataccacacacatttattacagtttgatggtgaaggaggttggcgctttgaacaattggatactgctatccgtttgacattgagtgaagaaaaacaaaagctagaatctcagctagctggaattcccaaaatgcagcagagactcaatgaactatgtaaaattttgggagaagactcagtgctgaaaacaattaaaaatgaagatgagacatcttaatttgttttgacatattttaaaagttaattattagataaaggctcaaagacattctgttatactgcatgaagtatgttaagctaagcacagagaaaaaaaggcagcaagacatgttttataagattttagcattaaggaagtatatgatctgacttttcagaagaaaataaacaaatgcattatgtaaggtcagtcattatgacttatactaattcctagtgaaggcctaatgcacttgtaaaacaggattttctaggtgaattcatgatgaataccagatttactatgtatatgtggtgtgtctgaagttcttaacaaacatgggcaatattctggaaatgaaacaagttaaactgagcagcatttgggttgataccaagtgcataagattcaaactttgagtgacatttagtccatttatggttgatattaggtttaatagctagaattcaaattgattattgctagtggccaactaaacctgtacaaaatagctgacagttttataaataatttcaatataaaaattgttttaatggcatttgttgaaagaaaaaagcatggctaaaatgtataaaatgccatatttttaaattttggactttaagcatcttaatgagggcatataacaaattaattttagtacaaatcttaaatatttttaataaatcctttcattttaaaaagagaattgccaatacagaaaaggagtatccaaacaatgtctcaacctgataatttccttagcagaattacctattgcaacttctgttcagaaatacacagcttgtttttttgcccaaggatgagtctacattttaagaactgcaatggtataaaggaacttaaggattctgagaatcatagtaataacatacattggaatagtactttataatttacaatccccatttacatcatttcaccttaatgttgatgacaatgttttgaaacaaatactatttttcctactttgcttttgagaaaattgacactcagacttgccctaatcatgcactttacttaaggaaagatcgagaaatcaaatgaagttctcctgactctctggtttagtgctcttttgttattatcctttaaatcaaactgggctataatagcaataaaagttagacgaagtgtagaaaataaaataaatttcataatgttagtcttattgttatttggttattgtttacaagaaatgaaaattaagtacaaagtgcaaagatcattgttctgcggcttaaaatgaaatgagaaagttagtaaatcattcagcaactatgcagtcttactcaatattaatgtacctctaaggcattagcaatgagaagggcaaataattatggttttggtaaagttaatatttattgaacataatgagaaataatctatatggactagtcatatgaaatagattttattctatttgtgtgcactggagctggaaagccaagactgaaactttatctcttgctgcctgtgataccacattgacataccagaagaatattggaatgatcagttgttagtggcctaggattttatttgcctgttgagacacagccataatagatgttaagtctgtgattcttagacttttcaggtgatagagtacctggaagtcattcataatgatcgttatagaacatcataacatttctacattttcaattctgccatgatagctagtgtatttttaattttcaataaatgtaaccaacttacatgaaggaatgcaatataaaattataatcagtacatttgtccaacgttttcattagtattatcacctacttattcatcagttactaatatttcctgttagaaaagtgaggcaggaattaaagatttttttttaagaagcatggaaccaaaacttaaacttgctaaaaattattcattaatcttttctacataagtgattatccagtttatactgctacaagggcaaaagtctgaggcaagtgttttaagttaacttttaaaggtacaagaagaaaatgaaaaatcctcatgtgaaagatgtgtataattttcatgccttaattttcataatataaaaataaaacataattttaaaacaacctgataattttgttttgaaacattgaaaagaatgccaaaacaaatattagatttgtaattagtcagtatttaatatattttacccatgagctaaagcaaaaaagactcattatttatgatgcacaggattcaaagatgcctaaaattctgtattaaaaactatgtacactgtaatttaaatgttaaagttctaatatgcacatgttttccatgagctttttgtgcctatttgttttctgaatttatttttcaggaccaacatccttaacttggaagggaaaacatctctgatttgaacttgtatttatgtaccattcaattgtttccaaatggtccaatgggtataccatattttactactcttatattttacggaaaacatgaaaaagactgagaaactagccatttttgaatacagcaagggatagatgaggaaaggaaaaaagaaagaatatttcaagtttcaaactacttttaccatgttatatctatttgcccaaacgtttgacatatttttggtcaaacaaaaagctataagtttatggagcttgagtttaaaatgtgcattctttaggttaactcttaaacttgaaaaataagttggattctatgaaaacgttgcattatatttctacagcatgtaatgttatgccaagcatgagtctaaaacagtttgtgttcttgtaagcaggataatgtgtaataatccctctgaaataatctcaagaagaatgatataccttaaaactcaactcaaatttacatttgtttacagtgggaatggttttctcttgatagaaatttggtttttgtctcaagttttggtctgtcagtaaaggcataaatgaatatcctagtttttatttgaaacattggttccaagtatagtttcatatttggcaatagattcatcttattctaatatgtttggaatagctttttgattcaatgagtctaggaaaatctgttacacattgaaacccaagtccagagaatgttacacacttctaatatatgcataaaatgatggtaaaggttattaaatcattgatttaaaaagatgactttgatataattactttatgggcaaaattgtcctcatttagaagtgaaaagtactttcacatagcctaggctatttacagttctgattatatacatttagatatgttgaatatgttttggggttgaatatgttttgccacatgagcgccttcaggtggatgtataaaatatttttttaaaaaccaatttcttcttcattgttgatgcttttcctgactaccaagttcagggctggtttacatttcatattgtgaaattttcaaaaccaatggtctatttataagccagaattgtattaatgaaaatgaatgagaaaaatgtccttaaaggtaaaaatcattatgtagctaaatgaaattgtggctgtgtgtgagtacattataatataatttccatctgatgtgtatttacttgaactcatcattccttatgaattccttaaccattaagaaaaagactagattaatcaaaggaattacaaattattccatttttacaaaataccctgtttctatactgcaaatggccatgttgggtatatgtctatatacgccttacttagacattgtattgtatataaccgtgtgtagaactatagacaatagtcaccaaatagttatttaaatattaattttctttattaatacaacacatttaataagtatctacctatgccaggcactgtgctaagttctattactaaataaaatttggtccctgtccgaa

SEQ ID NO: 2996 - DNA, 884 bp, Homo sapiens
  source 1..884: mol_type = unassigned DNA
atggcggccttcagcaagtacttgacggcgcgaaactcctcgctggctggtgccgcgttcctgctgctctgcctgctccacaagcggcgccgcgccctcggcctgcacggtaagaaaagtggaaaaccaccattacagaacaatgagaaagaggggaaaaaggagcgagctgtggtggacaaggtgtttttctcaaggctcatacagattctgaaaatcatggtccctagaacattttgtaaagagacaggttacttggtacttattgctgttatgctggtgtctcgaacatattgtgatgtttggatgattcaaaatgggacactaattgaaagtggtatcattggtcgtagcaggaaagatttcaagagatacttactcaacttcatcgctgccatgcctcttatctctctggttaataacttcttgaagtatgggttaaatgagcttaaactgtgcttccgagtaaggctcactaaatacctctatgaggagtatcttcaagctttcacatattataaaatggggaatctggacaacagaatagctaatccagaccagctgcttacacaagatgtagaaaaattttgtaacagtgtagtcgatctgtattcaaatcttagtaagccatttttagacatagttttgtatatctttaagttaacgagtgcaattggagctcaggtacttggaaaaattttgtggcattaaaaaccagacaaatgtattggccaggcgtggtggctcatgcctgtaatcccagcactttgggaggctgagatgggaggatcgcttgaatccaggagttcgagacaagcctggacaaaaagcgagacccgcttctttaaaaaataataataaaacagaagttcttaaaccatgaa

SEQ ID NO: 2997 - DNA, 3538 bp, Homo sapiens
  source 1..3538: mol_type = unassigned DNA
cggctcgctggtaccggcagtgccatggcggccttcagcaagtacttgacggcgcgaaactcctcgctggctggtgccgcgttcctgctgctctgcctgctccacaagcggcgccgcgccctcggcctgcacggtaagaaaagtggaaaaccaccattacagaacaatgagaaagaggggaaaaaggagcgagctgtggtggacaaggtgtttttctcaaggctcatacagattctgaaaatcatggtccctagaacattttgtaaagagacaggttacttggtacttattgctgttatgctggtgtctcgaacatattgtgatgtttggatgattcaaaatgggacactaattgaaagtggtatcattggtcgtagcaggaaagatttcaagagatacttactcaacttcatcgctgccatgcctcttatctctctggttaataacttcttgaagtatgggttaaatgagcttaaactgtgcttccgagtaaggctcactaaatacctctatgaggagtatcttcaagctttcacatattataaaatggggaatctggacaacagaatagctaatccagaccagctgcttacacaagatgtagaaaaattttgtaacagtgtagtcgatctgtattcaaatcttagtaagccatttttagacatagttttgtatatctttaagttaacgagtgcaattggagctcagggcccagcgagcatgatggcctacttggttgtttctgggctattcctaactcgacttcgaagacccattggtaagatgacaataactgagcaaaagtatgaaggagaatatagatatgttaattctcggctcatcacaaacagtgaagaaattgccttttacaatgggaataaaagagaaaagcagacagtccactcagtcttccgaaaactggtggaacacctacataatttcattttgtttcggttttcaatgggcttcattgatagtattattgccaaataccttgccactgttgttggttacctagttgtcagtcgccctttcttagatttgtctcatcctcgacatctcaagagtacacattcggaacttctagaggattactaccaaagtggaagaatgcttttgcgaatgtctcaagctctgggtcgaatagttttggctgggcgtgaaatgactagattggccggttttactgctcggattacagaattaatgcaagtactgaaggatttaaatcatggcaaatatgagcgcacaatggtctcacaacaggaaaagggtattgaaggagtacaagtcattcccttgatacctggtgctggagaaatcattattgcagataacattataaagtttgatcatgttcctttagcaacgccaaatggagatgttttgatccgagaccttaattttgaagttcgatctggggctaatgttctaatttgtggtccaaatggctgcggaaagagttcacttttccgtgttcttggtgaattatggcctctttttggaggacgtctaactaaacctgaaagaggaaaattattttatgttcctcagagaccttacatgacccttggaacacttcgagatcaagtgatatatccagatggacgagaagatcagaaaaggaagggaatttctgacctagtactgaaggaatacttagacaatgtccagttgggtcatatccttgaacgtgaaggaggctgggacagtgttcaggattggatggacgtactcagtggtggagaaaagcaaagaatggcgatggcaagattattttatcataaaccccagtttgccattttggatgaatgcacaagtgcagttagtgtcgacgtggaaggctacatttatagtcattgtcgaaaggttggcatcactctcttcactgtgtctcataggaaatctctttggaaacatcatgagtactacctgcatatggatggcagaggcaactatgaattcaaacagataacagaagatacagttgagtttggctcttagagaaatctggagaactatacctgcttcagtgaaataattacagaatatacttagaaaggcaaagtacattgtaaaataaagttgagcttagttttttttaaaaaaaaaaacaaagcaacaaattaactagatacagaataatggagaacaagttgttaaaacatttaatattatataggatattgctaattgtgtatatgttggtttaattaataatatgtactaagaatgtccttattcttgtggttaaaaacctgcctaaattaaattgggcttcaatcactgtaacctgattcatcctgggatgtaaaccattcgaagtcagctaattggacttttatggctctatcttttccttcagtgaagaaccctatttaaaactgggtcatcatttgtcctgttctagcaagatagtcttcagtttcattttcctgtgccctgtggtagttggaaacaaatcataatgtattatttaaatgtttaacatcattgcataacagcgtttattatacagtggcagatttctttagctgccacagtaatactcattccttgtgtgtgtcttggagtgcatttgactccaggaaaagccattttggttttccttaactaaatgataaatgtacccctctcagtctgcagtattgagttgtttaaagtatatgtgcagtcttgcttacaaggaggggttaccatgtatcacacctaatcttcccaatgtttgggatattaaaacacaaagtccttaacatgccaggctcaaggtcttataagagttctagatttttaagagaattagacaaatttgtgtgtgttagaagcccattcattagaagtgtggtggttatttggtattaaactccaaatgagccataggaaggcactacatgaaataatgcactgagtatgcaatgctatcactgtctttgactgtgattttatgtttaaaaagtatgttctaaaattattatatatacatgggtgaattatgtttccgaggcactgttttatctctgtgaatcttgaataacttttttatatttgggttatgatgtcaaacgatcctaagcgaagatgatttcagttcatcaaatcatcattaatgactttatgtattatttgcacagggagaattgaaactgagtataatcaataagctagatacgaaatcagtttctcaaactgagcttcagaaaggggcattttgtactcttgtttttgcataactggttttgtttttttgcagaattaactataacaatcactggctaccgaagtaaactgatgtactgaattccataatacataacattcaatttttaccacttctgtttagcgaacttgtatacttattttctgttcagattaaaaaaaaaaaaaaaaaactcagatatcctatacaacctttgcttgttctttttattctggtatctaaatactgagaagttcatttataattcagccttgacttgaaaacatagatagtttaatcttgacttgaaaaacacaaaaataaattcagaaaatgctttta

SEQ ID NO: 2998 - DNA, 3286 bp, Homo sapiens
  source 1..3286: mol_type = unassigned DNA
ctctgctctcctcccagtctcccccgcgctgcgtgcagtaaggtagccgccgccgccgccgccgccgcgtcccctcgccggctcgctggtaccggcagtgccatggcggccttcagcaagtacttgacggcgcgaaactcctcgctggctggtgccgcgttcctgctgctctgcctgctccacaagcggcgccgcgccctcggcctgcacggtaagaaaagtggaaaaccaccattacagaacaatgagaaagaggggaaaaaggagcgagctgtggtggacaaggtgtttttctcaaggctcatacagattctgaaaatcatggtccctagaacattttgtaaagagacaggttacttggtacttattgctgttatgctggtgtctcgaacatattgtgatgtttggatgattcaaaatgggacactaattgaaagtggtatcattggtcgtagcaggaaagatttcaagagatacttactcaacttcatcgctgccatgcctcttatctctctggttaataacttcttgaagtatgggttaaatgagcttaaactgtgcttccgagtaaggctcactaaatacctctatgaggagtatcttcaagctttcacatattataaaatggggaatctggacaacagaatagctaatccagaccagctgcttacacaagatgtagaaaaattttgtaacagtgtagtcgatctgtattcaaatcttagtaagccatttttagacatagttttgtatatctttaagttaacgagtgcaattggagctcagggcccagcgagcatgatggcctacttggttgtttctgggctattcctaactcgacttcgaagacccattggtaagatgacaataactgagcaaaagtatgaaggagaatatagatatgttaattctcggctcatcacaaacagttttactgctcggattacagaattaatgcaagtactgaaggatttaaatcatggcaaatatgagcgcacaatggtctcacaacaggaaaagggtattgaaggagtacaagtcattcccttgatacctggtgctggagaaatcattattgcagataacattataaagtttgatcatgttcctttagcaacgccaaatggagatgttttgatccgagaccttaattttgaagttcgatctggggctaatgttctaatttgtggtccaaatggctgcggaaagagttcacttttccgtgttcttggtgaattatggcctctttttggaggacgtctaactaaacctgaaagaggaaaattattttatgttcctcagagaccttacatgacccttggaacacttcgagatcaagtgatatatccagatggacgagaagatcagaaaaggaagggaatttctgacctagtactgaaggaatacttagacaatgtccagttgggtcatatccttgaacgtgaaggaggctgggacagtgttcaggattggatggacgtactcagtggtggagaaaagcaaagaatggcgatggcaagattattttatcataaaccccagtttgccattttggatgaatgcacaagtgcagttagtgtcgacgtggaaggctacatttatagtcattgtcgaaaggttggcatcactctcttcactgtgtctcataggaaatctctttggaaacatcatgagtactacctgcatatggatggcagaggcaactatgaattcaaacagataacagaagatacagttgagtttggctcttagagaaatctggagaactatacctgcttcagtgaaataattacagaatatacttagaaaggcaaagtacattgtaaaataaagttgagcttagttttttttaaaaaaaaaaacaaagcaacaaattaactagatacagaataatggagaacaagttgttaaaacatttaatattatataggatattgctaattgtgtatatgttggtttaattaataatatgtactaagaatgtccttattcttgtggttaaaaacctgcctaaattaaattgggcttcaatcactgtaacctgattcatcctgggatgtaaaccattcgaagtcagctaattggacttttatggctctatcttttccttcagtgaagaaccctatttaaaactgggtcatcatttgtcctgttctagcaagatagtcttcagtttcattttcctgtgccctgtggtagttggaaacaaatcataatgtattatttaaatgtttaacatcattgcataacagcgtttattatacagtggcagatttctttagctgccacagtaatactcattccttgtgtgtgtcttggagtgcatttgactccaggaaaagccattttggttttccttaactaaatgataaatgtacccctctcagtctgcagtattgagttgtttaaagtatatgtgcagtcttgcttacaaggaggggttaccatgtatcacacctaatcttcccaatgtttgggatattaaaacacaaagtccttaacatgccaggctcaaggtcttataagagttctagatttttaagagaattagacaaatttgtgtgtgttagaagcccattcattagaagtgtggtggttatttggtattaaactccaaatgagccataggaaggcactacatgaaataatgcactgagtatgcaatgctatcactgtctttgactgtgattttatgtttaaaaagtatgttctaaaattattatatatacatgggtgaattatgtttccgaggcactgttttatctctgtgaatcttgaataacttttttatatttgggttatgatgtcaaacgatcctaagcgaagatgatttcagttcatcaaatcatcattaatgactttatgtattatttgcacagggagaattgaaactgagtataatcaataagctagatacgaaatcagtttctcaaactgagcttcagaaaggggcattttgtactcttgtttttgcataactggttttgtttttttgcagaattaactataacaatcactggctaccgaagtaaactgatgtactgaattccataatacataacattcaatttttaccacttctgtttagcgaacttgtatacttattttctgttcagattaaaaaaaaaaaaaaaaaactcagatatcctatacaacctttgcttgttctttttattctggtatctaaatactgagaagttcatttataattcagccttgacttgaaaacatagatagtttaatcttgacttgaaaaacacaaaaataaattcagaaaatgctttta

SEQ ID NO: 2999 - DNA, 2269 bp, Homo sapiens
  source 1..2269: mol_type = unassigned DNA
agtaaggtagccgccgccgccgccgccgccgcgtcccctcgccggctcgctggtaccggcagtgccatggcggccttcagcaagtacttgacggcgcgaaactcctcgctggctggtgccgcgttcctgctgctctgcctgctccacaagcggcgccgcgccctcggcctgcacgggtatttcatggaaacttggagagagaaaagtgatgaagtgatgggagagctgactgatcatgtgactcattgtaagaaaagtggaaaaccaccattacagaacaatgagaaagaggggaaaaaggagcgagctgtggtggacaaggtgtttttctcaaggctcatacagattctgaaaatcatggtccctagaacattttgtaaagagacaggttacttggtacttattgctgttatgctggtgtctcgaacatattgtgatgtttggatgattcaaaatgggacactaattgaaagtggtatcattggtcgtagcaggaaagatttcaagagatacttactcaacttcatcgctgccatgcctcttatctctctggttaataacttcttgaagtatgggttaaatgagcttaaactgtgcttccgagtaaggctcactaaatacctctatgaggagtatcttcaagctttcacatattataaaatggggaatctggacaacagaatagctaatccagaccagctgcttacacaagatgtagaaaaattttgtaacagtgtagtcgatctgtattcaaatcttagtaagccatttttagacatagttttgtatatctttaagttaacgagtgcaattggagctcagggcccagcgagcatgatggcctacttggttgtttctgggctattcctaactcgacttcgaagacccattggtaagatgacaataactgagcaaaagtatgaaggagaatatagatatgttaattctcggctcatcacaaacagtgaagaaattgccttttacaatgggaataaaagagaaaagcagacagtccactcagtcttccgaaaactggtggaacacctacataatttcattttgtttcggttttcaatgggcttcattgatagtattattgccaaataccttgccactgttgttggttacctagttgtcagtcgccctttcttagatttgtctcatcctcgacatctcaagagtacacattcggaacttctagaggattactaccaaagtggaagaatgcttttgcgaatgtctcaagctctgggtcgaatagttttggctgggcgtgaaatgactagattggccggttttactgctcggattacagaattaatgcaagtactgaaggatttaaatcatggcaaatatgagcgcacaatggtctcacaacaggaaaagggtattgaaggagtacaagtcattcccttgatacctggtgctggagaaatcattattgcagataacattataaagtttgatcatgttcctttagcaacgccaaatggagatgttttgatccgagaccttaattttgaagttcgatctggggctaatgttctaatttgtggtccaaatggctgcggaaagagttcacttttccgtgttcttggtgaattatggcctctttttggaggacgtctaactaaacctgaaagaggaaaattattttatgttcctcagagaccttacatgacccttggaacacttcgagatcaagtgatatatccagatggacgagaagatcagaaaaggaagggaatttctgacctagtactgaaggaatacttagacaatgtccagttgggtcatatccttgaacgtgaaggaggctgggacagtgttcaggattggatggacgtactcagtggtggagaaaagcaaagaatggcgatggcaagattattttatcataaaccccagtttgccattttggatgaatgcacaagtgcagttagtgtcgacgtggaaggctacatttatagtcattgtcgaaaggttggcatcactctcttcactgtgtctcataggaaatctctttggaaacatcatgagtactacctgcatatggatggcagaggcaactatgaattcaaacagataacagaagatacagttgagtttggctcttagagaaatctggagaactatacctgcttcagtgaaataattacagaatatacttagaaaggcaaagtacattgtaaaataaagttgagcttagttttttttaaaaaaaaaaacaaagcaacaaattaactagatacagaataatggagaacaa

SEQ ID NO: 3000 - DNA, 2480 bp, Homo sapiens
  source 1..2480: mol_type = unassigned DNA
taaggtagccgccgccgccgccgccgccgcgtcccctcgccggctcgctggtaccggcagtgccatggcggccttcagcaagtacttgacggcgcgaaactcctcgctggctggtgccgcgttcctgctgctctgcctgctccacaagcggcgccgcgccctcggcctgcacggaaagaggggaaaaaggagcgagctgtggtggacaaggtgtttttctcaaggctcatacagattctgaaaatcatggtccctagaacattttgtaaagagacaggttacttggtacttattgctgttatgctggtgtctcgaacatattgtgatgtttggatgattcaaaatgggacactaattgaaagtggtatcattggtcgtagcaggaaagatttcaagagatacttactcaacttcatcgctgccatgcctcttatctctctggttaataacttcttgaagtatgggttaaatgagcttaaactgtgcttccgagtaaggctcactaaatacctctatgaggagtatcttcaagctttcacatattataaaatggggaatctggacaacagaatagctaatccagaccagctgcttacacaagatgtagaaaaattttgtaacagtgtagtcgatctgtattcaaatcttagtaagccatttttagacatagttttgtatatctttaagttaacgagtgcaattggagctcagggcccagcgagcatgatggcctacttggttgtttctgggctattcctaactcgacttcgaagacccattggtaagatgacaataactgagcaaaagtatgaaggagaatatagatatgttaattctcggctcatcacaaacagtgaagaaattgccttttacaatgggaataaaagagaaaagcagacagtccactcagtcttccgaaaactggtggaacacctacataatttcattttgtttcggttttcaatgggcttcattgatagtattattgccaaataccttgccactgttgttggttacctagttgtcagtcgccctttcttagatttgtctcatcctcgacatctcaagagtacacattcggaacttctagaggattactaccaaagtggaagaatgcttttgcgaatgtctcaagctctgggtcgaatagttttggctgggcgtgaaatgactagattggccggttttactgctcggattacagaattaatgcaagtactgaaggatttaaatcatggcaaatatgagcgcacaatggtctcacaacaggaaaagggtattgaaggagtacaagtcattcccttgatacctggtgctggagaaatcattattgcagataacattataaagtttgatcatgttcctttagcaacgccaaatggagatgttttgatccgagaccttaattttgaagttcgatctggggctaatgttctaatttgtggtccaaatggctgcggaaagagttcacttttccgtgttcttggtgaattatggcctctttttggaggacgtctaactaaacctgaaagaggaaaattattttatgttcctcagagaccttacatgacccttggaacacttcgagatcaagtgatatatccagatggacgagaagatcagaaaaggaagggaatttctgacctagtactgaaggaatacttagacaatgtccagttgggtcatatccttgaacgtgaaggaggctgggacagtgttcaggattggatggacgtactcagtggtggagaaaagcaaagaatggcgatggcaagattattttatcataaaccccagtttgccattttggatgaatgcacaagtgcagttagtgtcgacgtggaaggctacatttatagtcattgtcgaaaggttggcatcactctcttcactgtgtctcataggaaatctctttggaaacatcatgagtactacctgcatatggatggcagaggcaactatgaattcaaacagataacagaagatacagttgagtttggctcttagagaaatctggagaactatacctgcttcagtgaaataattacagaatatacttagaaaggcaaagtacattgtaaaataaagttgagcttagttttttttaaaaaaaaaaacaaagcaacaaattaactagatacagaataatggagaacaagttgttaaaacatttaatattatataggatattgctaattgtgtatatgttggtttaattaataatatgtactaagaatgtccttattcttgtggttaaaaacctgcctaaattaaattgggcttcaatcactgtaacctgattcatcctgggatgtaaaccattcgaagtcagctaattggacttttatggctctatcttttccttcagtgaagaaccctatttaaaactgggtcatcatttgtcctgttctagcaagatagtcttcagtttcattttcctgtgccctgtggtagttggaaacaaatcataatgtattatt

SEQ ID NO: 3001 - DNA, 1770 bp, Homo sapiens
  source 1..1770: mol_type = unassigned DNA
tctacccagtactgaactaggggcagctgggctccagagtccctcgggtctcaggtcatggcggtcgcggggcccgcgcccggagctggcgccagagcaatttgtgatctaccaggttggcttgatccccagtcagtactatggggtcctgggaaacaaagacttggaagggtttaagactctgacattcctggctgtcatgctcattgttctgaactccacgctgaagagctttgatcagttcacctgcaacctgctgtatgtgagctggaggaaggacctcactgagcaccttcaccgcctctacttccggggccgtgcgtactacaccctcaacgtgctgcgggatgacatcgataacccggaccagcgcatcagccaggacgtggagcgattctgccggcagctcagcagcatggccagcaagctcatcatctccccgttcaccctcgtctactacacttaccagtgcttccaaagcacaggctggctcgggcctgtgagcatcttcgggtatttcatcctggggaccgtggtgaacaaaactttgatgggccccattgtgatgaagctggtgcatcaggagaagctggagggagattttagagctgggcatgtggagcacatgaggacagaccgcaggctgcagagactccttcagacccagagggagctgatgtccaaggagctctggctgtacatcggcatcaacacctttgactatctgggcagcatcctgagttacgttgtcatcgcaatccccattttcagcggggtctatggagacctgagtcccgcagagcttagcaccctggtcagcaagaatgcctttgtgtgcatctacctcatcagctgcttcacccagctcatcgacctgtccacgacgctctcagatgtggctggctacacgcacagaattgggcagcttcgggagacgcttctggacatgtccctgaagtcacaggactgcgagatcctgggcgagagcgagtggggcttggacacacccccagggtggccagcggcagagccagcagacacagcatttctccttgagcgggtctccatctctgccccctcctctgacaaacccctaatcaaggatctgagcctaaagatctccgagggacagagcctgctcatcacaggcaacacgggcactggcaagacctccttgctccgggttctgggtggcctctggacgagtacacggggctcagtgcagatgctgacggactttgggccccatggggtgctattcctgccacaaaagccattcttcactgacgggacccttcgggagcaggtgatatatcccctgaaggaggtctaccccgactcaggttctgccgatgatgagaggatcttgaggttcttggaattggcaggcctgtccaacttggtggcaaggacagagggcctggaccagcaggtggactggaactggtatgatgttctgtccccgggggagatgcaacggctctcctttgcccgactcttctacctgcagccgaagtacgcagtgcttgatgaagccaccagtgccctgacagaggaagtggagagcgagctctatcgcatcggccagcagctggggatgacgttcatcagtgtgggacatcggcagagccttgagaaggtacccgtgctcacaaggatggcctgaggaggagaaagaacccaaaggctcagcctggccagggccagaggcccctcaaaacggggagtagcagtagcagagagaaccgagtggcctcctctgccagcggc

SEQ ID NO: 3002 - DNA, 3003 bp, Homo sapiens
  source 1..3003: mol_type = unassigned DNA
cgcttccgggagagtccgcgtctcccgcaccttcctctctatcaaacgccgtctctgtggtagccggggccccgcccctcctcggactctacccagtactgaactaggggcagctgggctccagagtccctcgggtctcaggtcatggcggtcgcggggcccgcgcccggagctggcgccaggcccaggttagatctgcaatttctccagcggttcctgcagatactgaaggttttgtttccttcttggtcatcacaaaatgccttgatgttcctgacccttttgtgcctgaccctactggagcaatttgtgatctaccaggttggcttgatccccagtcagtactatggggtcctgggaaacaaagacttggaagggtttaagactctgacattcctggctgtcatgctcattgttctgaactccacgctgaagagctttgatcagttcacctgcaacctgctgtatgtgagctggaggaaggacctcactgagcaccttcaccgcctctacttccggggccgtgcgtactacaccctcaacgtgctgcgggatgacatcgataacccggaccagcgcatcagccaggacgtggagcgattctgccggcagctcagcagcatggccagcaagctcatcatctccccgttcaccctcgtctactacacttaccagtgcttccaaagcacaggctggctcgggcctgtgagcatcttcgggtatttcatcctggggaccgtggtgaacaaaactttgatgggccccattgtgatgaagctggtgcatcaggagaagctggagggagattttaggttcaagcacatgcagattcgggtgaatgcggagcctgctgctttctacagagctgggcatgtggagcacatgaggacagaccgcaggctgcagagactccttcagacccagagggagctgatgtccaaggagctctggctgtacatcggcatcaacacctttgactatctgggcagcatcctgagttacgttgtcatcgcaatccccattttcagcggggtctatggagacctgagtcccgcagagcttagcaccctggtcagcaagaatgcctttgtgtgcatctacctcatcagctgcttcacccagctcatcgacctgtccacgacgctctcagatgtggctggctacacgcacagaattgggcagcttcgggagacgcttctggacatgtccctgaagtcacaggactgcgagatcctgggcgagagcgagtggggcttggacacacccccagggtggccagcggcagagccagcagacacagcatttctccttgagcgggtctccatctctgccccctcctctgacaaacccctaatcaaggatctgagcctaaagatctccgagggacagagcctgctcatcacaggcaacacgggcactggcaagacctccttgctccgggttctgggtggcctctggacgagtacacggggctcagtgcagatgctgacggactttgggccccatggggtgctattcctgccacaaaagccattcttcactgacgggacccttcgggagcaggtgatatatcccctgaaggaggtctaccccgactcaggttctgccgatgatgagaggatcttgaggttcttggaattggcaggcctgtccaacttggtggcaaggacagagggcctggaccagcaggtggactggaactggtatgatgttctgtccccgggggagatgcaacggctctcctttgcccgactcttctacctgcagccgaagtacgcagtgcttgatgaagccaccagtgccctgacagaggaagtggagagcgagctctatcgcatcggccagcagctggggatgacgttcatcagtgtgggacatcggcagagccttgagaagtttcattccttggttctgaaactctgtggaggaggaagatgggagctgatgagaatcaaagtggaatgaagctctggcttttggaaggagagccacactgtggcgggtcggcggccctcaggagagaccaggaggactgacagcgaagatcgagctcaggttcgccacatagatcccgtgcaggagccacatgggtcctgtgcaggacccctagcagtggtgggctgagcccaggtctaggtttctgtgggggacactgaatctcccagtgttcagtctcccaggactctgctgcctcagccagagcctccatatgcttgaagtgctgattacctacaaatgatttcagatcatgtttgctaaagagaaatctggaagtgtgagatctgtaagaaatgaaagaaatgactcttggagtcaagagatctggaaatcttttaatcagttaaattgtgcagcaatagatttttaactttaactgaccatttaagttttttaataagttttttacaaagaaaagttaaacattaaaaagaattacagctttctgtcttctctatcatggaatgatcttttttattgaatctccagatttgtatttgacagcttggtgggaagggaagcacactctgctgttctggaatcttatgcccagggtttttcacttctccccacatctccctttccacttgccagtgttgtgtagttagaacctgaaccactaacttccaggggcctttggtctgccctaccttaacccaaatgaaagtaaatccctttccccttagccaaaataaggttgggttttctaaaaaaatagtctatattagggaacaacaacagcaaattagacaaaacccagaaagcacaaagcatgaggtggagttactgtgcccaaagtcctcactcagaccagtgcccctccagttcagttgtctatgtattaccttccttaccttcataatttttgccaggcttctgtacttctagtacttgagttacttaatatttttaaaaacaaaccttttaagtttaaatggatttttaagtgaaattttacacttaacatagatggaaagtaactaaaaataaatacaagaaaaacca

SEQ ID NO: 3003 - DNA, 1094 bp, Homo sapiens
  source 1..1094: mol_type = unassigned DNA
atgcggagcctgctgctttctacagtcggcatcaacacctttgactatctgggcagcatcctgagttacgttgtcatcgcaatccccattttcagcggggtctatggagacctgagtcccgcagagcttagcaccctggtcagcaagaatgcctttgtgtgcatctacctcatcagctgcttcacccagctcatcgacctgtccacgacgctctcagatgtggctggctacacgcacagaattgggcagcttcgggagacgcttctggacatgtccctgaagtcacaggactgcgagatcctgggcgagagcgagtggggcttggacacacccccagggtggccagcggcagagccagcagacacagcatttctccttgagcgggtctccatctctgccccctcctctgacaaacccctaatcaaggatctgagcctaaagatctccgagggacagagcctgctcatcacaggcaacacgggcactggcaagacctccttgctccgggttctgggtggcctctggacgagtacacggggctcagtgcagatgctgacggactttgggccccatggggtgctattcctgccacaaaagccattcttcactgacgggacccttcgggagcaggtgatatatcccctgaaggaggtctaccccgactcaggttctgccgatgatgagaggatcttgaggttcttggaattggcaggcctgtccaacttggtggcaaggacagagggcctggaccagcaggtggactggaactggtatgatgttctgtccccgggggagatgcaacggctctcctttgcccgactcttctacctgcagccgaagtacgcagtgcttgatgaagccaccagtgccctgacagaggaagtggagagcgagctctatcgcatcggccagcagctggggatgacgttcatcagtgtgggacatcggcagagccttgagaaggtacccgtgctcacaaggatggcctgaggaggagaaagaacccaaaggctcagcctggccagggccagaggcccctcaaaacggggagtagcagtagcagagagaaccgagtggcctcctctgccagcggc

SEQ ID NO: 3004 - DNA, 3921 bp, Homo sapiens
  source 1..3921: mol_type = unassigned DNA
aagccgtgtcggcaccagactctgttggtcctactgacacctccagcgttagaatgactaaggctccactcctgacccaccggccttgaggaaagcgcaaacgtaaaaaaagattgaaaccggagaggcgaatgcatctgtttacgctaggaccacgctcgacgtcggagaaaagcccacacactcacagtttccagacctggctgcttgccgaaactcagattctcggcacctccagcagctggcttcgccaacggcgttgaacaagggtcgcagctcaatgacgtcatatctccctacctacctccagggttccgcctcacgctctatgtcgcgcgcgcgcactacgtcctatggcttgcgcgtgcggcggctgggcaccgccattttggccggtggccgtgagaacacgctgtgtggctgaaaagtgaaggcaagagctgatttggcctctgtgctcccctccgcaaggggatcgttttctccagaagagctggatattctttcgcccagttatggcagacaagttaacgagaattgctattgtcaaccatgacaaatgtaaacctaagaaatgtcgacaggaatgcaaaaagagttgtcctgtagttcgaatgggaaaattatgcatagaggttacaccccagagcaaaatagcatggatttccgaaactctttgtattggttgtggtatctgtattaagaaatgcccctttggcgccttatcaattgtcaatctaccaagcaacttggaaaaagaaaccacacatcgatattgtgccaatgccttcaaacttcacaggttgcctatccctcgtccaggtgaagttttgggattagttggaactaatggtattggaaagtcaactgctttaaaaattttagcaggaaaacaaaagccaaaccttggaaagtacgatgatcctcctgactggcaggagattttgacttatttccgtggatctgaattacaaaattactttacaaagattctagaagatgacctaaaagccatcatcaaacctcaatatgtagaccagattcctaaggctgcaaaggggacagtgggatctattttggaccgaaaagatgaaacaaagacacaggcaattgtatgtcagcagcttgatttaacccacctaaaagaacgaaatgttgaagatctttcaggaggagagttgcagagatttgcttgtgctgtcgtttgcatacagaaagctgatattttcatgtttgatgagccttctagttacctagatgtcaagcagcgtttaaaggctgctattactatacgatctctaataaatccagatagatatatcattgtggtggaacatgatctaagtgtattagactatctctccgacttcatctgctgtttatatggtgtaccaagcgcctatggagttgtcactatgccttttagtgtaagagaaggcataaacatttttttggatggctatgttccaacagaaaacttgagattcagagatgcatcacttgtttttaaagtggctgagacagcaaatgaagaagaagttaaaaagatgtgtatgtataaatatccaggaatgaagaaaaaaatgggagaatttgagctagcaattgtagctggagagtttacagattctgaaattatggtgatgctgggggaaaatggaacgggtaaaacgacatttatcagaatgcttgctggaagacttaaacctgatgaaggaggagaagtaccagttctaaatgtcagttataagccacagaaaattagtcccaaatcaactggaagtgttcgccagttactacatgaaaagataagagatgcttatactcacccacaatttgtgaccgatgtaatgaagcctctgcaaattgaaaacatcattgatcaagaggtgcagacattatctggtggtgaactacagcgagtagctttagccctttgcttgggcaaacctgctgatgtctatttaattgatgaaccatctgcatatttggattctgagcaaagactgatggcagctcgagttgtcaaacgtttcatactccatgcaaaaaagacagcctttgttgtggaacatgacttcatcatggccacctatctagcggatcgcgtcatcgtttttgatggtgttccatctaagaacacagttgcaaacagtcctcaaacccttttggctggcatgaataaatttttgtctcagcttgaaattacattcagaagagatccaaacaactataggccacgaataaacaaacttaattcaattaaggatgtagaacaaaagaagagtggaaactactttttcttggatgattagactgactctgagaatattgataagccatttattaaaaggagtatttactagaattttttgtcatataaaacttgaatcaggattttatgccccacatactctggaacttgaagtataatatacttaatataacataaaaagccagttgggttctaaattgtagttgaaacacagaaaatgccacttttctgttcctgaagaggctcttttgtgcataatattctaaaatgaagacatttcaagctatacaaattacttccaagttttcatgatgtatgggaagattttcagtaggtgtattatattcacggtaccaaatgctgaccagtgttgctccattttttaaatcttgaaaagggtttctgtacttacctggtttgccaagtatgccagtgtaatgaaactgcccttattttaaaagccagtcaaagattccactgattgacatttgataaataaacatcaggattatgtttattgtttgttttcagtctttgcactatattaccagtatatggtttccgaggaagattatctactgcaaaacaccactgttggaaaaataggtatttttaaattgtttttaatcttttttggtgcttttaaacatgtttagcaaaaaccaattcagttccattccccgcaaaaaacccctaactttactctgaactttttttgtttttgcattccatgaggttctgtattcagtcattctctaggtaatgtcatttttgtacacatatatttatataatcactgattgagatttaggaaaaagcatttctaaagaatatttgcttcccttagaactacagactcgaaatctttaaagatggtgcctaagcatctatgtattttttttaagttccacagatttttctgttgggcagccaaggattataaaccacttccctaaaggcaacattaatgcaaaagtccccagatggcaatacaaagtatcccctggtaccacatatattcatttgtgagtttggatatagagcacattatctaaaccattttgtagttccaaaaacccatctaaatttcttgagttcctgaattttgaacaggattacctggagcctggagccactttaagttgtacttctgactaaactggaattatgagtgaggaagagtgtttactaaataaatgactggggcaagcaaaattgaggaggaaattagaaactgtttgacaaactttaagagctacttgaaataacagaagtcttgattaatatgcaaataatggctagaaagtatggtttaactggaccctattatgccttttaaaaataatttcagtaacccataaatacatgttgtaaaaaattcaaatatacagaatggaataaaaaaatgatctccctttattaccctcccaaaggttaccagcgtttgaatttaataatgtatattctttcatgcttttttctgtgcacttacctaagtgtgaatatgtaaagggtttgttttgtatacaaatgggattatactaaaataagtaatgcctatttttaaggataggttaaatttgtgaatgatcatttcaaatatattgaataaaataagcaaaagctattgttatttactgatcctg

SEQ ID NO: 3005 - DNA, 786 bp, Homo sapiens
  source 1..786: mol_type = unassigned DNA
gcttgcgcgtgcggcggctgggcaccgccattttggccggtggccgtgagaacacgctgtgtggctgaaaagtgaaggcaagagctgatttggcctctgtgctcccctccgcaaggggatcgttttctccagagctggatattctttcgcccagttatggcagacaagttaacgagaattgctattgtcaaccatgacaaatgtaaacctaagaaatgtcgacaggaatgcaaaaagagttgtcctgtagttcgaatgggaaaattatgcatagaggttacaccccagagcaaaatagcatggatttccgaaactctttgtattggttgtggtatctgtattaagaaatgcccctttggcgccttatcaattgtcaatctaccaagcaacttggaaaaagaaaccacacatcgatattgtgccaatgccttcaaacttcacaggttgcctatccctcgtccaggtgaagttttgggattagttggaactaatggtattggaaagtcaactgctttaaaaattttagcaggaaaacaaaagccaaaccttggaaagtacgatgatcctcctgactggcaggagattttgacttatttccgtggatctgaattacaaaattactttacaaagattctagaagatgacctaaaagccatcatcaaacctcaatatgtagaccagattcctaaggctgcaaaggggacagtgggatctattttggaccgaaaagatgaaacaaagacacaggcaattgtatgtcagcagcttgatttaacccacctaaaa

SEQ ID NO: 3006 - DNA, 3481 bp, Homo sapiens
  source 1..3481: mol_type = unassigned DNA
cgggggcggggttggccgcgccagcttggagagccagccccatcggggttccccgccgccggaagcggaaatagcaccgggcgccgccacagtagctgtaactgccaccgcgatgccgaaggcgcccaagcagcagccgccggagcccgagtggatcggggacggagagagcacgagcccatcagacaaagtggtgaagaaagggaagaaggacaagaagatcaaaaaaacgttctttgaagagctggcagtagaagataaacaggctggggaagaagagaaagtgctcaaggagaaggagcagcagcagcagcaacagcaacagcagcaaaaaaaaaagcgagatacccgaaaaggcaggcggaagaaggatgtggatgatgatggagaagagaaagagctcatggagcgtcttaagaagctctcagtgccaaccagtgatgaggaggatgaagtacccgccccaaaaccccgcggagggaagaaaaccaagggtggtaatgtttttgcagccctgattcaggatcagagtgaggaagaggaggaggaagaaaaacatcctcctaagcctgccaagccggagaagaatcggatcaataaggccgtatctgaggaacagcagcctgcactcaagggcaaaaagggaaaggaagagaagtcaaaagggaaggctaagcctcaaaataaattcgctgctctggacaatgaagaggaggataaagaagaagaaattataaaggaaaaggagcctcccaaacaagggaaggagaaggccaagaaggcagagcagggttcagaggaagaaggagaaggggaagaagaggaggaggaaggaggagagtctaaggcagatgatccctatgctcatcttagcaaaaaggagaagaaaaagctgaaaaaacagatggagtatgagcgccaagtggcttcattaaaagcagccaatgcagctgaaaatgacttctccgtgtcccaggcggagatgtcctcccgccaagccatgttagaaaatgcatctgacatcaagctggagaagttcagcatctccgctcatggcaaggagctgttcgtcaatgcagacctgtacattgtagccggccgccgctacgggctggtaggacccaatggcaagggcaagaccacactcctcaagcacattgccaaccgagccctgagcatccctcccaacattgatgtgttgctgtgtgagcaggaggtggtagcagatgagacaccagcagtccaggctgttcttcgagctgacaccaagcgattgaagctgctggaagaggagcggcggcttcagggacagctggaacaaggggatgacacagctgctgagaggctagagaaggtgtatgaggaattgcgggccactggggcggcagctgcagaggccaaagcacggcggatcctggctggcctgggctttgaccctgaaatgcagaatcgacccacacagaagttctcagggggctggcgcatgcgtgtctccctggccagggcactgttcatggagcccacactgctgatgctggatgagcccaccaaccacctggacctcaacgctgtcatctggcttaataactacctccagggctggcggaagaccttgctgatcgtctcccatgaccagggcttcttggatgatgtctgcactgatatcatccacctcgatgcccagcggctccactactataggggcaattacatgaccttcaaaaagatgtaccagcagaagcagaaagaactgctgaaacagtatgagaagcaagagaaaaagctgaaggagctgaaggcaggcgggaagtccaccaagcaggcggaaaaacaaacgaaggaagccctgactcggaagcagcagaaatgccgacggaaaaaccaagatgaggaatcccaggaggcccctgagctcctgaagcgccctaaggagtacactgtgcgcttcacttttccagaccccccaccactcagccctccagtgctgggtctgcatggtgtgacattcggctaccagggacagaaaccactctttaagaacttggattttggcatcgacatggattcaaggatttgcattgtgggccctaatggtgtggggaagagtacgctactcctgctgctgactggcaagctgacaccgacccatggggaaatgagaaagaaccaccggctgaaaattggcttcttcaaccagcagtatgcagagcagctgcgcatggaggagacgcccactgagtacctgcagcggggcttcaacctgccctaccaggatgcccgcaagtgcctgggccgcttcggcctggagagtcacgcccacaccatccagatctgcaaactctctggtggtcagaaggcgcgagttgtgtttgctgagctggcctgtcgggaacctgatgtcctcatcttggacgagccaaccaataacctggacatagagtctattgatgctctaggggaggccatcaatgaatacaagggtgctgtgatcgttgtcagccatgatgcccgactcatcacagaaaccaattgccagctgtgggtggtggaggagcagagtgttagccaaatcgatggtgactttgaagactacaagcgggaggtgttggaggccctgggtgaagtcatggtcagccggccccgagagtgagctttccttcccagaagtctcccgagagacatatttgtgtggcctagaagtcctctgtggtctcccctcctctgaagactgcctctggcctgcagctgacctggcaaccattcaggcacatgaaggtggagtgtgaccttgatgtgaccgggatcccactctgattgcatccatttctctgaaagacttgtttgttctgcttctcttcatataactgagctggccttatccttggcatccccctaaacaaacaagaggtgaccaccttattgtgaggttccatccagccaagtttatgtggcctattgtctcaggactctcatcactcagaagcctgcctctgatttaccctacagcttcaggcccagctgccccccagtctttgggtggtgctgttcttttctggtggatttaatgctgactcactggtacaaacagctgttgaagctcagagctggaggtgagcttctgaggcctttgccattatccagcccaagatttggtgcctgcagcctcttgtctggttgaggacttggggcaggaaaggaatgctgctgaacttgaatttccctttacaaggggaagaaataaaggaaaggagttgctgccgacctgtcactgtttggagattgatgggagttggaactgttctcagtcttgatttgctttattcagttttctagcagcttttaatagtcccctcttccccactaaatggatcttgtttgcagtcttgctgacagtgtttgctgtttaaggatcataggattcctttcccccaacccttcacgcaaggaaaaagcaaagtgattcataccttctatcttggaa

SEQ ID NO: 3007 - DNA, 3131 bp, Homo sapiens
  source 1..3131: mol_type = unassigned DNA
gcgccagcttggagagccagccccatcggggttccccgccgccggaagcggaaatagcaccgggcgccgccacagtagctgtaactgccaccgcgatgccgaaggcgcccaagcagcagccgccggagcccgagtggatcggggacggagagagcacgagcccatcagacaaagtggtgaagaaagggaagaaggacaagaagatcaaaaaaacgttctttgaagagctggcagtagaagataaacaggctggggaagaagagaaagtgctcaaggagaaggagcagcagcagcagcaacagcaacagcagcaaaaaaaaaagcgagatacccgaaaaggcaggcggaagaaggatgtggatgatgatggagaagagaaagagctcatggagcgtcttaagaagctctcagtgccaaccagtgatgaggaggatgaagtacccgccccaaaaccccgcggagggaagaaaaccaagggtggtaatgtttttgcagccctgattcaggatcagagtgaggaagaggaggaggaagaaaaacatcctcctaagcctgccaagccggagaagaatcggatcaataaggccgtatctgaggaacagcagcctgcactcaagggcaaaaagggaaaggaagagaagtcaaaagggaaggctaagcctcaaaataaattcgctgctctggacaatgaagaggaggataaagaagaagaaattataaaggaaaaggagcctcccaaacaagggaaggagaaggccaagaaggcagagcagatggagtatgagcgccaagtggcttcattaaaagcagccaatgcagctgaaaatgacttctccgtgtcccaggcggagatgtcctcccgccaagccatgttagaaaatgcatctgacatcaagctggagaagttcagcatctccgctcatggcaaggagctgttcgtcaatgcagacctgtacattgtagccggccgccgctacgggctggtaggacccaatggcaagggcaagaccacactcctcaagcacattgccaaccgagccctgagcatccctcccaacattgatgtgttgctgtgtgagcaggaggtggtagcagatgagacaccagcagtccaggctgttcttcgagctgacaccaagcgattgaagctgctggaagaggagcggcggcttcagggacagctggaacaaggggatgacacagctgctgagaggctagagaaggtgtatgaggaattgcgggccactggggcggcagctgcagaggccaaagcacggcggatcctggctggcctgggctttgaccctgaaatgcagaatcgacccacacagaagttctcagggggctggcgcatgcgtgtctccctggccagggcactgttcatggagcccacactgctgatgctggatgagcccaccaaccacctggacctcaacgctgtcatctggcttaataactacctccagggctggcggaagaccttgctgatcgtctcccatgaccagggcttcttggatgatgtctgcactgatatcatccacctcgatgcccagcggctccactactataggggcaattacatgaccttcaaaaagatgtaccagcagaagcagaaagaactgctgaaacagtatgagaagcaagagaaaaagctgaaggagctgaaggcaggcgggaagtccaccaagcaggcggaaaaacaaacgaaggaagccctgactcggaagcagcagaaatgccgacggaaaaaccaagatgaggaatcccaggaggcccctgagctcctgaagcgccctaaggagtacactgtgcgcttcacttttccagaccccccaccactcagccctccagtgctgggtctgcatggtgtgacattcggctaccagggacagaaaccactctttaagaacttggattttggcatcgacatggattcaaggatttgcattgtgggccctaatggtgtggggaagagtacgctactcctgctgctgactggcaagctgacaccgacccatggggaaatgagaaagaaccaccggctgaaaattggcttcttcaaccagcagtatgcagagcagctgcgcatggaggagacgcccactgagtacctgcagcggggcttcaacctgccctaccaggatgcccgcaagtgcctgggccgcttcggcctggagagtcacgcccacaccatccagatctgcaaactctctggtggtcagaaggcgcgagttgtgtttgctgagctggcctgtcgggaacctgatgtcctcatcttggacgagccaaccaataacctggacatagagtctattgatgctctaggggaggccatcaatgaatacaagggtgctgtgatcgttgtcagccatgatgcccgactcatcacagaaaccaattgccagctgtgggtggtggaggagcagagtgttagccaaatcgatggtgactttgaagactacaagcgggaggtgttggaggccctgggtgaagtcatggtcagccggccccgagagtgagctttccttcccagaagtctcccgagagacatatttgtgtggcctagaagtcctctgtggtctcccctcctctgaagactgcctctggcctgcagctgacctggcaaccattcaggcacatgaaggtggagtgtgaccttgatgtgaccgggatcccactctgattgcatccatttctctgaaagacttgtttgttctgcttctcttcatataactgagctggccttatccttggcatccccctaaacaaacaagaggtgaccaccttattgtgaggttccatccagccaagtttatgtggcctattgtctcaggactctcatcactcagaagcctgcctctgatttaccctacagcttcaggcccagctgccccccagtctttgggtggtgctgttcttttctggtggatttaatgctgactcactggtacaaacagctgttgaagctcagagctggaggtgagcttctgaggcctttgccattatccagcccaagatttggtgcctgcagcctcttgtctggttgaggacttggggcaggaaaggaatgctgctgaacttgaatttccctttacaaggggaagaaataaaggaaaggagttgctgccgac

SEQ ID NO: 3008 - DNA, 3250 bp, Homo sapiens
  source 1..3250: mol_type = unassigned DNA
gcgccagcttggagagccagccccatcggggttccccgccgccggaagcggaaatagcaccgggcgccgccacagtagctgtaactgccaccgcgatgccgaaggcgcccaagcagcagccgccggagcccgagtggatcggggacggagagagcacgagcccatcagacaaagtggtgaagaaagggaagaaggacaagaagatcaaaaaaacgttctttgaagagctggcagtagaagataaacaggctggggaagaagagaaagtgctcaaggagaaggagcagcagcagcagcaacagcaacagcagcaaaaaaaaaagcgagatacccgaaaaggcaggcggaagaaggatgtggatgatgatggagaagagaaagagctcatggagcgtcttaagaagctctcagtgccaaccagtgatgaggaggatgaagtacccgccccaaaaccccgcggagggaagaaaaccaagggtggtaatgtttttgcagccctgattcaggatcagagtgaggaagaggaggaggaagaaaaacatcctcctaagcctgccaagccggagaagaatcggatcaataaggccgtatctgaggaacagcagcctgcactcaagggcaaaaagggaaaggaagagaagtcaaaagggaaggctaagcctcaaaataaattcgctgctctggacaatgaagaggaggataaagaagaagaaattataaaggaaaaggagcctcccaaacaagggaaggagaaggccaagaaggcagagcagatggagtatgagcgccaagtggcttcattaaaagcagccaatgcagctgaaaatgacttctccgtgtcccaggcggagatgtcctcccgccaagccatgttagaaaatgcatctgacatcaagctggagaagttcagcatctccgctcatggcaaggagctgttcgtcaatgcagacctgtacattgtagccggccgccgctacgggctggtaggacccaatggcaagggcaagaccacactcctcaagcacattgccaaccgagccctgagcatccctcccaacattgatgtgttgctgtgtgagcaggaggtggtagcagatgagacaccagcagtccaggctgttcttcgagctgacaccaagcgattgaagctgctggaagaggagcggcggcttcagggacagctggaacaaggggatgacacagctgctgagaggctagagaaggtgtatgaggaattgcgggccactggggcggcagctgcagaggccaaagcacggcggatcctggctggcctgggctttgaccctgaaatgcagaatcgacccacacagaagttctcagggggctggcgcatgcgtgtctccctggccagggcactgttcatggagcccacactgctgatgctggatgagcccaccaaccacctggacctcaacgctgtcatctggcttaataactacctccagggctggcggaagaccttgctgatcgtctcccatgaccagggcttcttggatgatgtctgcactgatatcatccacctcgatgcccagcggctccactactataggggcaattacatgaccttcaaaaagatgtaccagcagaagcagaaagaactgctgaaacagtatgagaagcaagagaaaaagctgaaggagctgaaggcaggcgggaagtccaccaagcaggcggaaaaacaaacgaaggaagccctgactcggaagcagcagaaatgccgacggaaaaaccaagatgaggaatcccaggaggcccctgagctcctgaagcgccctaaggagtacactgtgcgcttcacttttccagaccccccaccactcagccctccagtgctgggtctgcatggtgtgacattcggctaccagggacagaaaccactctttaagaacttggattttggcatcgacatggattcaaggatttgcattgtgggccctaatggtgtggggaagagtacgctactcctgctgctgactggcaagctgacaccgacccatggggaaatgagaaagaaccaccggctgaaaattggcttcttcaaccagcagtatgcagagcagctgcgcatggaggagacgcccactgagtacctgcagcggggcttcaacctgccctaccaggatgcccgcaagtgcctgggccgcttcggcctggagagtcacgcccacaccatccagatctgcaaactctctggtggtcagaaggcgcgagttgtgtttgctgagctggcctgtcgggaacctgatgtcctcatcttggacgagccaaccaataacctggacatagagtctattgatgctctaggggaggccatcaatgaatacaagggtgctgtgatcgttgtcagccatgatgcccgactcatcacagaaaccaattgccagctgtgggtggtggaggagcagagtgttagccaaatcgatggtgactttgaagactacaagcgggaggtgttggaggccctgggtgaagtcatggtcagccggccccgagagtgaagctttccttcccagaagtctcccgagagacatatttgtgtggcctagaagtcctctgtggtctcccctcctctgaagactgcctctggcctgcagctgacctggcaaccattcaggcacatgaaggtggagtgtgaccttgatgtgaccgggatcccactctgattgcatccatttctctgaaagacttgtttgttctgcttctcttcatataactgagctggccttatccttggcatccccctaaacaaacaagaggtgaccaccttattgtgaggttccatccagccaagtttatgtggcctattgtctcaggactctcatcactcagaagcctgcctctgatttaccctacagcttcaggcccagctgccccccagtctttgggtggtgctgttcttttctggtggatttaatgctgactcactggtacaaacagctgttgaagctcagagctggaggtgagcttctgaggcctttgccattatccagcccaagatttggtgcctgcagcctcttgtctggttgaggacttggggcaggaaaggaatgctgctgaacttgaatttccctttacaaggggaagaaataaaggaaaggagttgctgccgacctgtcactgtttggagattgatgggagttggaactgttctcagtcttgatttgctttattcagttttctagcagcttttaatagtcccctcttccccactaaatggatcttgtttgca

SEQ ID NO: 3009 - DNA, 3381 bp, Homo sapiens
  source 1..3381: mol_type = unassigned DNA
cgggggcggggttggccgcgccagcttggagagccagccccatcggggttccccgccgccggaagcggaaatagcaccgggcgccgccacagtagctgtaactgccaccgcgatgccgaaggcgcccaagcagcagccgccggagcccgagtggatcggggacggagagagcacgagcccatcagacaaagtggtgaagaaagggaagaaggacaagaagatcaaaaaaacgttctttgaagagctggcagtagaagataaacaggctggggaagaagagaaagtgctcaaggagaaggagcagcagcagcagcaacagcaacagcagcaaaaaaaaaagcgagatacccgaaaaggcaggcggaagaaggatgtggatgatgatggagaagagaaagagctcatggagcgtcttaagaagctctcagtgccaaccagtgatgaggaggatgaagtacccgccccaaaaccccgcggagggaagaaaaccaagggtggtaatgtttttgcagccctgattcaggatcagagtgaggaagaggaggaggaagaaaaacatcctcctaagcctgccaagccggagaagaatcggatcaataaggccgtatctgaggaacagcagcctgcactcaagggcaaaaagggaaaggaagagaagtcaaaagggaaggctaagcctcaaaataaattcgctgctctggacaatgaagaggaggataaagaagaagaaattataaaggaaaaggagcctcccaaacaagggaaggagaaggccaagaaggcagagcagggttcagaggaagaaggagaaggggaagaagaggaggaggaaggaggagagtctaaggcagatgatccctatgctcatcttagcaaaaaggagaagaaaaagctgaaaaaacagatggagtatgagcgccaagtggcttcattaaaagcagccaatgcagctgaaaatgacttctccgtgtcccaggcggagatgtcctcccgccaagccatgttagaaaatgcatctgacatcaagctggagaagttcagcatctccgctcatggcaaggagctgttcgtcaatgcagacctgtacattgtagccggccgccgctacgggctggtaggacccaatggcaagggcaagaccacactcctcaagcacattgccaaccgagccctgagcatccctcccaacattgatgtgttgctgtgtgagcaggaggtggtagcagatgagacaccagcagtccaggctgttcttcgagctgacaccaagcgattgaagctgctggaagaggagcggcggcttcagggacagctggaacaaggggatgacacagctgctgagaggctagagaaggtgtatgaggaattgcgggccactggggcggcagctgcagaggccaaagcacggcggatcctggctggcctgggctttgaccctgaaatgcagaatcgacccacacagaagttctcagggggctggcgcatgcgtgtctccctggccagggcactgttcatggagcccacactgctgatgctggatgagcccaccaaccacctggacctcaacgctgtcatctggcttaataactacctccagggctggcggaagaccttgctgatcgtctcccatgaccagggcttcttggatgatgtctgcactgatatcatccacctcgatgcccagcggctccactactataggggcaattacatgaccttcaaaaagatgtaccagcagaagcagaaagaactgctgaaacagtatgagaagcaagagaaaaagctgaaggagctgaaggcaggcgggaagtccaccaagcaggcggaaaaacaaacgaaggaagccctgactcggaagcagcagaaatgccgacggaaaaaccaagatgaggaatcccaggaggcccctgagctcctgaagcgccctaaggagtacactgtgcgcttcacttttccagaccccccaccactcagccctccagtgctgggtctgcatggtgtgacattcggctaccagggacagaaaccactctttaagaacttggattttggcatcgacatggattcaaggatttgcattgtgggccctaatggtgtggggaagagtacgctactcctgctgctgactggcaagctgacaccgacccatggggaaatgagaaagaaccaccggctgaaaattggcttcttcaaccagcagtatgcagagcagctgcgcatggaggagacgcccactgagtacctgcagcggggcttcaacctgccctaccaggatgcccgcaagtgcctgggccgcttcggcctggagagtcacgcccacaccatccagatctgcaaactctctggtggtcagaaggcgcgagttgtgtttgctgagctggcctgtcgggaacctgatgtcctcatcttggacgagccaaccaataacctggacatagagtctattgatgctctaggggaggccatcaatgaatacaagggtgctgtgatcgttgtcagccatgatgcccgactcatcacagaaaccaattgccagctgtgggtggtggaggagcagagtgttagccaaatcgatggtgactttgaagactacaagcgggaggtgttggaggccctgggtgaagtcatggtcagccggccccgagagtgaagctttccttcccagaagtctcccgagagacatatttgtgtggcctagaagtcctctgtggtctcccctcctctgaagactgcctctggcctgcagctgacctggcaaccattcaggcacatgaaggtggagtgtgaccttgatgtgaccgggatcccactctgattgcatccatttctctgaaagacttgtttgttctgcttctcttcatataactgagctggccttatccttggcatccccctaaacaaacaagaggtgaccaccttattgtgaggttccatccagccaagtttatgtggcctattgtctcaggactctcatcactcagaagcctgcctctgatttaccctacagcttcaggcccagctgccccccagtctttgggtggtgctgttcttttctggtggatttaatgctgactcactggtacaaacagctgttgaagctcagagctggaggtgagcttctgaggcctttgccattatccagcccaagatttggtgcctgcagcctcttgtctggttgaggacttggggcaggaaaggaatgctgctgaacttgaatttccctttacaaggggaagaaataaaggaaaggagttgctgccgacctgtcactgtttggagattgatgggagttggaactgttctcagtcttgatttgctttattcagttttctagcagcttttaatagtcccctcttccccactaaatggatcttgtttgca

SEQ ID NO: 3010 - DNA, 1484 bp, Homo sapiens
  source 1..1484: mol_type = unassigned DNA
ccgggcgccgccacagtagctgtaactgccaccgcgatgccgaaggcgcccaagcagcagccgccggagcccgagtggatcggggacggagagagcacgagcccatcagacaaagtggtgaagaaagggaagaaggacaagaagatcaaaaaaacgttctttgaagagctggcagtagaagataaacaggctggggaagaagagaaagtgctcaaggagaaggagcagcagcagcagcaacagcaacagcagcaaaaaaaaaagcgagatacccgaaaaggcaggcggaagaaggatgtggatgatgatggagaagagaaagagctcatggagcgtcttaagaagctctcacggggcttcaacctgccctaccaggatgcccgcaagtgcctgggccgcttcggcctggagagtcacgcccacaccatccagatctgcaaactctctggtggtcagaaggcgcgagttgtgtttgctgagctggcctgtcgggaacctgatgtcctcatcttggacgagccaaccaataacctggacatagagtctattgatgctctaggggaggccatcaatgaatacaagggtgctgtgatcgttgtcagccatgatgcccgactcatcacagaaaccaattgccagctgtgggtggtggaggagcagagtgttagccaaatcgatggtgactttgaagactacaagcgggaggtgttggaggccctgggtgaagtcatggtcagccggccccgagagtgaagctttccttcccagaagtctcccgagagacatatttgtgtggcctagaagtcctctgtggtctcccctcctctgaagactgcctctggcctgcagctgacctggcaaccattcaggcacatgaaggtggagtgtgaccttgatgtgaccgggatcccactctgattgcatccatttctctgaaagacttgtttgttctgcttctcttcatataactgagctggccttatccttggcatccccctaaacaaacaagaggtgaccaccttattgtgaggttccatccagccaagtttatgtggcctattgtctcaggactctcatcactcagaagcctgcctctgatttaccctacagcttcaggcccagctgccccccagtctttgggtggtgctgttcttttctggtggatttaatgctgactcactggtacaaacagctgttgaagctcagagctggaggtgagcttctgaggcctttgccattatccagcccaagatttggtgcctgcagcctcttgtctggttgaggacttggggcaggaaaggaatgctgctgaacttgaatttccctttacaaggggaagaaataaaggaaaggagttgctgccgacctgtcactgtttggagattgatgggagttggaactgttctcagtcttgatttgctttattcagttttctagcagcttttaatagtcccctcttccccactaaatggatcttgtttgca

SEQ ID NO: 3011 - DNA, 3249 bp, Homo sapiens
  source 1..3249: mol_type = unassigned DNA
gcgccagcttggagagccagccccatcggggttccccgccgccggaagcggaaatagcaccgggcgccgccacagtagctgtaactgccaccgcgatgccgaaggcgcccaagcagcagccgccggagcccgagtggatcggggacggagagagcacgagcccatcagacaaagtggtgaagaaagggaagaaggacaagaagatcaaaaaaacgttctttgaagagctggcagtagaagataaacaggctggggaagaagagaaagtgctcaaggagaaggagcagcagcagcagcaacagcaacagcagcaaaaaaaaaagcgagatacccgaaaaggcaggcggaagaaggatgtggatgatgatggagaagagaaagagctcatggagcgtcttaagaagctctcagtgccaaccagtgatgaggaggatgaagtacccgccccaaaaccccgcggagggaagaaaaccaagggtggtaatgtttttgcagccctgattcaggatcagagtgaggaagaggaggaggaagaaaaacatcctcctaagcctgccaagccggagaagaatcggatcaataaggccgtatctgaggaacagcagcctgcactcaagggcaaaaagggaaaggaagagaagtcaaaagggaaggctaagcctcaaaataaattcgctgctctggacaatgaagaggaggataaagaagaagaaattataaaggaaaaggagcctcccaaacaagggaaggagaaggccaagaaggcagagcagatggagtatgagcgccaagtggcttcattaaaagcagccaatgcagctgaaaatgacttctccgtgtcccaggcggagatgtcctcccgccaagccatgttagaaaatgcatctgacatcaagctggagaagttcagcatctccgctcatggcaaggagctgttcgtcaatgcagacctgtacattgtagccggccgccgctacgggctggtaggacccaatggcaagggcaagaccacactcctcaagcacattgccaaccgagccctgagcatccctcccaacattgatgtgttgctgtgtgagcaggaggtggtagcagatgagacaccagcagtccaggctgttcttcgagctgacaccaagcgattgaagctgctggaagaggagcggcggcttcagggacagctggaacaaggggatgacacagctgctgagaggctagagaaggtgtatgaggaattgcgggccactggggcggcagctgcagaggccaaagcacggcggatcctggctggcctgggctttgaccctgaaatgcagaatcgacccacacagaagttctcagggggctggcgcatgcgtgtctccctggccagggcactgttcatggagcccacactgctgatgctggatgagcccaccaaccacctggacctcaacgctgtcatctggcttaataactacctccagggctggcggaagaccttgctgatcgtctcccatgaccagggcttcttggatgatgtctgcactgatatcatccacctcgatgcccagcggctccactactataggggcaattacatgaccttcaaaaagatgtaccagcagaagcagaaagaactgctgaaacagtatgagaagcaagagaaaaagctgaaggagctgaaggcaggcgggaagtccaccaagcaggcggaaaaacaaacgaaggaagccctgactcggaagcagcagaaatgccgacggaaaaaccaagatgaggaatcccaggaggcccctgagctcctgaagcgccctaaggagtacactgtgcgcttcacttttccagaccccccaccactcagccctccagtgctgggtctgcatggtgtgacattcggctaccagggacagaaaccactctttaagaacttggattttggcatcgacatggattcaaggatttgcattgtgggccctaatggtgtggggaagagtacgctactcctgctgctgactggcaagctgacaccgacccatggggaaatgagaaagaaccaccggctgaaaattggcttcttcaaccagcagtatgcagagcagctgcgcatggaggagacgcccactgagtacctgcagcggggcttcaacctgccctaccaggatgcccgcaagtgcctgggccgcttcggcctggagagtcacgcccacaccatccagatctgcaaactctctggtggtcagaaggcgcgagttgtgtttgctgagctggcctgtcgggaacctgatgtcctcatcttggacgagccaaccaataacctggacatagagtctattgatgctctaggggaggccatcaatgaatacaagggtgctgtgatcgttgtcagccatgatgcccgactcatcacagaaaccaattgccagctgtgggtggtggaggagcagagtgttagccaaatcgatggtgactttgaagactacaagcgggaggtgttggaggccctgggtgaagtcatggtcagccggccccgagagtgagctttccttcccagaagtctcccgagagacatatttgtgtggcctagaagtcctctgtggtctcccctcctctgaagactgcctctggcctgcagctgacctggcaaccattcaggcacatgaaggtggagtgtgaccttgatgtgaccgggatcccactctgattgcatccatttctctgaaagacttgtttgttctgcttctcttcatataactgagctggccttatccttggcatccccctaaacaaacaagaggtgaccaccttattgtgaggttccatccagccaagtttatgtggcctattgtctcaggactctcatcactcagaagcctgcctctgatttaccctacagcttcaggcccagctgccccccagtctttgggtggtgctgttcttttctggtggatttaatgctgactcactggtacaaacagctgttgaagctcagagctggaggtgagcttctgaggcctttgccattatccagcccaagatttggtgcctgcagcctcttgtctggttgaggacttggggcaggaaaggaatgctgctgaacttgaatttccctttacaaggggaagaaataaaggaaaggagttgctgccgacctgtcactgtttggagattgatgggagttggaactgttctcagtcttgatttgctttattcagttttctagcagcttttaatagtcccctcttccccactaaatggatcttgtttgca

SEQ ID NO: 3012 - DNA, 1484 bp, Homo sapiens; identical to SEQ ID NO: 3010
  source 1..1484: mol_type = unassigned DNA

SEQ ID NO: 3013 - DNA, 1074 bp, Homo sapiens
  source 1..1074: mol_type = unassigned DNA
gccggaagcggaaatagcaccgggcgccgccacagtagctgtaactgccaccgcgatgccgaaggcgcccaagcagcagccgccggagcccgagtggatcggggacggagagagcacgagcccatcagacaaagtggtgaagaaagggaagaaggacaagaagatcaaaaaaacgttctttgaagagctggcagtagaagataaacaggctggggaagaagagaaagtgctcaaggagaaggagcagcagcagcagcaacagcaacagcagcagcaaaaaaaaaagcgagatacccgaaaaggcaggcggaagaaggatgtggatgatgatggagaagagaaagagctcatggagcgtcttaagaagctctcagtgccaaccagtgatgaggaggatgaagtacccgccccaaaaccccgcggagggaagaaaaccaagggtggtaatgtttttgcagccctgattcaggatcagagtgaggaagaggaggaggaagaaaaacatcctcctaagcctgccaagccggagaagaatcggatcaataaggccgtatctgaggaacagcagcctgcactcaagggcaaaaagggaaaggaagagaagtcaaaagggaaggctaagcctcaaaataaattcgctgctctggacaatgaagaggaggataaagaagaagaaattataaaggaaaaggagcctcccaaacaagggaaggagaaggccaagaaggcagagcagggttcagaggaagaaggagaaggggaagaagaggaggaggaaggaggagagtctaaggcagatgatccctatgctcatcttagcaaaaaggagaagaaaaagctgaaaaaacagatggagtatgagcgccaagtggcttcattaaaagcagccaatgcagctgaaaatgacttctccgtgtcccaggcggagatgtcctcccgccaagccatgttagaaaatgcatctgacatcaagctggagaagttcagcatctccgctcatggcaaggagctgttcgtcaatgcagacctgtacattgtagccggccgccgctacgggctggtaggacccaatgg

SEQ ID NO: 3014 - DNA, 3381 bp, Homo sapiens; identical to SEQ ID NO: 3009
  source 1..3381: mol_type = unassigned DNA

SEQ ID NO: 3015 - DNA, 3250 bp, Homo sapiens; identical to SEQ ID NO: 3008
  source 1..3250: mol_type = unassigned DNA

SEQ ID NO: 3016 - DNA, 3249 bp, Homo sapiens; identical to SEQ ID NO: 3011
  source 1..3249: mol_type = unassigned DNA

SEQ ID NO: 3017 - DNA, 1483 bp, Homo sapiens
  source 1..1483: mol_type = unassigned DNA
ccgggcgccgccacagtagctgtaactgccaccgcgatgccgaaggcgcccaagcagcagccgccggagcccgagtggatcggggacggagagagcacgagcccatcagacaaagtggtgaagaaagggaagaaggacaagaagatcaaaaaaacgttctttgaagagctggcagtagaagataaacaggctggggaagaagagaaagtgctcaaggagaaggagcagcagcagcagcaacagcaacagcagcaaaaaaaaaagcgagatacccgaaaaggcaggcggaagaaggatgtggatgatgatggagaagagaaagagctcatggagcgtcttaagaagctctcacggggcttcaacctgccctaccaggatgcccgcaagtgcctgggccgcttcggcctggagagtcacgcccacaccatccagatctgcaaactctctggtggtcagaaggcgcgagttgtgtttgctgagctggcctgtcgggaacctgatgtcctcatcttggacgagccaaccaataacctggacatagagtctattgatgctctaggggaggccatcaatgaatacaagggtgctgtgatcgttgtcagccatgatgcccgactcatcacagaaaccaattgccagctgtgggtggtggaggagcagagtgttagccaaatcgatggtgactttgaagactacaagcgggaggtgttggaggccctgggtgaagtcatggtcagccggccccgagagtgagctttccttcccagaagtctcccgagagacatatttgtgtggcctagaagtcctctgtggtctcccctcctctgaagactgcctctggcctgcagctgacctggcaaccattcaggcacatgaaggtggagtgtgaccttgatgtgaccgggatcccactctgattgcatccatttctctgaaagacttgtttgttctgcttctcttcatataactgagctggccttatccttggcatccccctaaacaaacaagaggtgaccaccttattgtgaggttccatccagccaagtttatgtggcctattgtctcaggactctcatcactcagaagcctgcctctgatttaccctacagcttcaggcccagctgccccccagtctttgggtggtgctgttcttttctggtggatttaatgctgactcactggtacaaacagctgttgaagctcagagctggaggtgagcttctgaggcctttgccattatccagcccaagatttggtgcctgcagcctcttgtctggttgaggacttggggcaggaaaggaatgctgctgaacttgaatttccctttacaaggggaagaaataaaggaaaggagttgctgccgacctgtcactgtttggagattgatgggagttggaactgttctcagtcttgatttgctttattcagttttctagcagcttttaatagtcccctcttccccactaaatggatcttgtttgca

SEQ ID NO: 3018 - DNA, 1074 bp, Homo sapiens; identical to SEQ ID NO: 3013
  source 1..1074: mol_type = unassigned DNA

SEQ ID NO: 3019 - DNA, 3381 bp, Homo sapiens; identical to SEQ ID NO: 3009
  source 1..3381: mol_type = unassigned DNA

SEQ ID NO: 3020 - DNA, 1074 bp, Homo sapiens; identical to SEQ ID NO: 3013
  source 1..1074: mol_type = unassigned DNA

SEQ ID NO: 3021 - DNA, 3380 bp, Homo sapiens
  source 1..3380: mol_type = unassigned DNA
cgggggcggggttggccgcgccagcttggagagccagccccatcggggttccccgccgccggaagcggaaatagcaccgggcgccgccacagtagctgtaactgccaccgcgatgccgaaggcgcccaagcagcagccgccggagcccgagtggatcggggacggagagagcacgagcccatcagacaaagtggtgaagaaagggaagaaggacaagaagatcaaaaaaacgttctttgaagagctggcagtagaagataaacaggctggggaagaagagaaagtgctcaaggagaaggagcagcagcagcagcaacagcaacagcagcaaaaaaaaaagcgagatacccgaaaaggcaggcggaagaaggatgtggatgatgatggagaagagaaagagctcatggagcgtcttaagaagctctcagtgccaaccagtgatgaggaggatgaagtacccgccccaaaaccccgcggagggaagaaaaccaagggtggtaatgtttttgcagccctgattcaggatcagagtgaggaagaggaggaggaagaaaaacatcctcctaagcctgccaagccggagaagaatcggatcaataaggccgtatctgaggaacagcagcctgcactcaagggcaaaaagggaaaggaagagaagtcaaaagggaaggctaagcctcaaaataaattcgctgctctggacaatgaagaggaggataaagaagaagaaattataaaggaaaaggagcctcccaaacaagggaaggagaaggccaagaaggcagagcagggttcagaggaagaaggagaaggggaagaagaggaggaggaaggaggagagtctaaggcagatgatccctatgctcatcttagcaaaaaggagaagaaaaagctgaaaaaacagatggagtatgagcgccaagtggcttcattaaaagcagccaatgcagctgaaaatgacttctccgtgtcccaggcggagatgtcctcccgccaagccatgttagaaaatgcatctgacatcaagctggagaagttcagcatctccgctcatggcaaggagctgttcgtcaatgcagacctgtacattgtagccggccgccgctacgggctggtaggacccaatggcaagggcaagaccacactcctcaagcacattgccaaccgagccctgagcatccctcccaacattgatgtgttgctgtgtgagcaggaggtggtagcagatgagacaccagcagtccaggctgttcttcgagctgacaccaagcgattgaagctgctggaagaggagcggcggcttcagggacagctggaacaaggggatgacacagctgctgagaggctagagaaggtgtatgaggaattgcgggccactggggcggcagctgcagaggccaaagcacggcggatcctggctggcctgggctttgaccctgaaatgcagaatcgacccacacagaagttctcagggggctggcgcatgcgtgtctccctggccagggcactgttcatggagcccacactgctgatgctggatgagcccaccaaccacctggacctcaacgctgtcatctggcttaataactacctccagggctggcggaagaccttgctgatcgtctcccatgaccagggcttcttggatgatgtctgcactgatatcatccacctcgatgcccagcggctccactactataggggcaattacatgaccttcaaaaagatgtaccagcagaagcagaaagaactgctgaaacagtatgagaagcaagagaaaaagctgaaggagctgaaggcaggcgggaagtccaccaagcaggcggaaaaacaaacgaaggaagccctgactcggaagcagcagaaatgccgacggaaaaaccaagatgaggaatcccaggaggcccctgagctcctgaagcgccctaaggagtacactgtgcgcttcacttttccagaccccccaccactcagccctccagtgctgggtctgcatggtgtgacattcggctaccagggacagaaaccactctttaagaacttggattttggcatcgacatggattcaaggatttgcattgtgggccctaatggtgtggggaagagtacgctactcctgctgctgactggcaagctgacaccgacccatggggaaatgagaaagaaccaccggctgaaaattggcttcttcaaccagcagtatgcagagcagctgcgcatggaggagacgcccactgagtacctgcagcggggcttcaacctgccctaccaggatgcccgcaagtgcctgggccgcttcggcctggagagtcacgcccacaccatccagatctgcaaactctctggtggtcagaaggcgcgagttgtgtttgctgagctggcctgtcgggaacctgatgtcctcatcttggacgagccaaccaataacctggacatagagtctattgatgctctaggggaggccatcaatgaatacaagggtgctgtgatcgttgtcagccatgatgcccgactcatcacagaaaccaattgccagctgtgggtggtggaggagcagagtgttagccaaatcgatggtgactttgaagactacaagcgggaggtgttggaggccctgggtgaagtcatggtcagccggccccgagagtgagctttccttcccagaagtctcccgagagacatatttgtgtggcctagaagtcctctgtggtctcccctcctctgaagactgcctctggcctgcagctgacctggcaaccattcaggcacatgaaggtggagtgtgaccttgatgtgaccgggatcccactctgattgcatccatttctctgaaagacttgtttgttctgcttctcttcatataactgagctggccttatccttggcatccccctaaacaaacaagaggtgaccaccttattgtgaggttccatccagccaagtttatgtggcctattgtctcaggactctcatcactcagaagcctgcctctgatttaccctacagcttcaggcccagctgccccccagtctttgggtggtgctgttcttttctggtggatttaatgctgactcactggtacaaacagctgttgaagctcagagctggaggtgagcttctgaggcctttgccattatccagcccaagatttggtgcctgcagcctcttgtctggttgaggacttggggcaggaaaggaatgctgctgaacttgaatttccctttacaaggggaagaaataaaggaaaggagttgctgccgacctgtcactgtttggagattgatgggagttggaactgttctcagtcttgatttgctttattcagttttctagcagcttttaatagtcccctcttccccactaaatggatcttgtttgca

SEQ ID NO: 3022 - DNA, 1074 bp, Homo sapiens; identical to SEQ ID NO: 3013
  source 1..1074: mol_type = unassigned DNA

SEQ ID NO: 3023 - DNA, 1074 bp, Homo sapiens; identical to SEQ ID NO: 3013
  source 1..1074: mol_type = unassigned DNA

SEQ ID NO: 3024 - DNA, 1074 bp, Homo sapiens; identical to SEQ ID NO: 3013
  source 1..1074: mol_type = unassigned DNA

SEQ ID NO: 3025 - DNA, 1074 bp, Homo sapiens; identical to SEQ ID NO: 3013
  source 1..1074: mol_type = unassigned DNA

SEQ ID NO: 3026 - DNA, 3250 bp, Homo sapiens; identical to SEQ ID NO: 3008
  source 1..3250: mol_type = unassigned DNA

SEQ ID NO: 3027 - DNA, 3250 bp, Homo sapiens; identical to SEQ ID NO: 3008
  source 1..3250: mol_type = unassigned DNA

SEQ ID NO: 3028 - DNA, 1483 bp, Homo sapiens; identical to SEQ ID NO: 3017
  source 1..1483: mol_type = unassigned DNA

SEQ ID NO: 3029 - DNA, 2526 bp, Homo sapiens
  source 1..2526: mol_type = unassigned DNA
gcgccagcttggagagccagccccatcggggttccccgccgccggaagcggaaatagcaccgggcgccgccacagtagctgtaactgccaccgcgatgccgaaggcgcccaagcagcagccgccggagcccgagtggatcggggacggagagagcacgagcccatcagacaaagtggtgaagaaagggaagaaggacaagaagatcaaaaaaacgttctttgaagagctggcagtagaagataaacaggctggggaagaagagaaagtgctcaaggagaaggagcagcagcagcagcaacagcaacagcagcagcaaaaaaaaaagcgagatacccgaaaaggcaggcggaagaaggatgtggatgatgatggagaagagaaagagctcatggagcgtcttaagaagctctcagtgccaaccagtgatgaggaggatgaagtacccgccccaaaaccccgcggagggaagaaaaccaagggtggtaatgtttttgcagccctgattcaggatcagagtgaggaagaggaggaggaagaaaaacatcctcctaagcctgccaagccggagaagaatcggatcaataaggccgtatctgaggaacagcagcctgcactcaagggcaaaaagggaaaggaagagaagtcaaaagggaaggctaagcctcaaaataaattcgctgctctggacaatgaagaggaggataaagaagaagaaattataaaggaaaaggagcctcccaaacaagggaaggagaaggccaagaaggcagagcagggttcagaggaagaaggagaaggggaagaagaggaggaggaaggaggagagtctaaggcagatgatccctatgctcatcttagcaaaaaggagaagaaaaagctgaaaaaacagatggagtatgagcgccaagtggcttcattaaaagcagccaatgcagctgaaaatgacttctccgtgtcccaggcggagatgtcctcccgccaagccatgttagaaaatgcatctgacatcaagctggagaagttcagcatctccgctcatggcaaggagctgttcgtcaatgcagacctgtacattgtagccggccgccgctacgggctggtaggacccaatggcaagggcaagaccacactcctcaagcacattgccaaccgagccctgagcatccctcccaacattgatgtgttgctgtgtgagcaggaggtggtagcagatgagacaccagcagtccaggctgttcttcgagatgacacagctgctgagaggctagagaaggtgtatgaggaattgcgggccactggggcggcagctgcagaggccaaagcacggcggatcctggctggcctgggctttgaccctgaaatgcagaatcgacccacacagaagttctcagggggctggcgcatgcgtgtctccctggccagggcactgttcatggagcccacactgctgatgctggacgagccaaccaataacctggacatagagtctattgatgctctaggggaggccatcaatgaatacaagggtgctgtgatcgttgtcagccatgatgcccgactcatcacagaaaccaattgccagctgtgggtggtggaggagcagagtgttagccaaatcgatggtgactttgaagactacaagcgggaggtgttggaggccctgggtgaagtcatggtcagccggccccgagagtgagctttccttcccagaagtctcccgagagacatatttgtgtggcctagaagtcctctgtggtctcccctcctctgaagactgcctctggcctgcagctgacctggcaaccattcaggcacatgaaggtggagtgtgaccttgatgtgaccgggatcccactctgattgcatccatttctctgaaagacttgtttgttctgcttctcttcatataactgagctggccttatccttggcatccccctaaacaaacaagaggtgaccaccttattgtgaggttccatccagccaagtttatgtggcctattgtctcaggactctcatcactcagaagcctgcctctgatttaccctacagcttcaggcccagctgccccccagtctttgggtggtgctgttcttttctggtggatttaatgctgactcactggtacaaacagctgttgaagctcagagctggaggtgagcttctgaggcctttgccattatccagcccaagatttggtgcctgcagcctcttgtctggttgaggacttggggcaggaaaggaatgctgctgaacttgaatttccctttacaaggggaagaaataaaggaaaggagttgctgccgacctgtcactgtttggagattgatgggagttggaactgttctcagtcttgatttgctttattcagttttctagcagcttttaatagtcccctcttccccactaaatggatcttgtttgcagtcttgctgacagtgtttgctgtttaaggatcataggattcctttcccccaacccttcacgcaaggaaaaagcaaagtgattcataccttctatcttgg

SEQ ID NO: 3030 - DNA, 1484 bp, Homo sapiens; identical to SEQ ID NO: 3010
  source 1..1484: mol_type = unassigned DNA

SEQ ID NO: 3031 - DNA, 3380 bp, Homo sapiens; identical to SEQ ID NO: 3021
  source 1..3380: mol_type = unassigned DNA

SEQ ID NO: 3032 - DNA, 3381 bp, Homo sapiens; identical to SEQ ID NO: 3009
  source 1..3381: mol_type = unassigned DNA

SEQ ID NO: 3033 - DNA, 1484 bp, Homo sapiens; identical to SEQ ID NO: 3010
  source 1..1484: mol_type = unassigned DNA

SEQ ID NO: 3034 - DNA, 2526 bp, Homo sapiens; identical to SEQ ID NO: 3029
  source 1..2526: mol_type = unassigned DNA

SEQ ID NO: 3035 - DNA, 1950 bp, Homo sapiens
  source 1..1950: mol_type = unassigned DNA
accgggcgccgccacagtagctgtaactgccaccgcgatgccgaaggcgcccaagcagcagccgccggagcccgagtggatcggggacggagagagcacgagcccatcagacaaagtggtgaagaaagggaagaaggacaagaagatcaaaaaaacgttctttgaagagctggcagtagaagataaacaggctggggaagaagagaaagtgctcaaggagaaggagcagcagcagcagcaacagcaacagcagcaaaaaaaaaagcgagatacccgaaaaggcaggcggaagaaggatgtggatgatgatggagaagagaaagagctcatggagcgtcttaagaagctctcagtgccaaccagtgatgaggaggatgaagtacccgccccaaaaccccgcggagggaagaaaaccaagggtggtaatgtttttgcagccctgattcaggatcagagtgaggaagaggaggaggaagaaaaacatcctcctaagcctgccaagccggagaagaatcggatcaataaggccgtatctgaggaacagcagcctgcactcaagggcaaaaagggaaaggaagagaagtcaaaagggaaggctaagcctcaaaataaattcgctgctctggacaatgaagaggaggataaagaagaagaaattataaaggaaaaggagcctcccaaacaagggaaggagaaggccaagaaggcagagcagggttcagaggaagaaggagaaggggaagaagaggaggaggaaggaggagagtctaaggcagatgatccctatgctcatcttagcaaaaaggagaagaaaaagctgaaaaaacagatggagtatgagcgccaagtggcttcattaaaagcagccaatgcagctgaaaatgacttctccgtgtcccaggcggagatgtcctcccgccaagccatgttagaaaatgcatctgacatcaagctggagaagttcagcatctccgctcatggcaaggagctgttcgtcaatgcagacctgtacattgtagccggccgccgctacgggctggtaggacccaatggcaagggcaagaccacactcctcaagcacattgccaaccgagccctgagcatccctcccaacattgatgtgttgctgtgtgagcaggaggtggtagcagatgagacaccagcagtccaggctgttcttcgagatgacacagctgctgagaggctagagaaggtgtatgaggaattgcgggccactggggcggcagctgcagaggccaaagcacggcggatcctggctggcctgggctttgaccctgaaatgcagaatcgacccacacagaagttctcagggggctggcgcatgcgtgtctccctggccagggcactgttcatggagcccacactgctgatgctggatgagccaaccaataacctggacatagagtctattgatgctctaggggaggccatcaatgaatacaagggtgctgtgatcgttgtcagccatgatgcccgactcatcacagaaaccaattgccagctgtgggtggtggaggagcagagtgttagccaaatcgatggtgactttgaagactacaagcgggaggtgttggaggccctgggtgaagtcatggtcagccggccccgagagtgaagctttccttcccagaagtctcccgagagacatatttgtgtggcctagaagtcctctgtggtctcccctcctctgaagactgcctctggcctgcagctgacctggcaaccattcaggcacatgaaggtggagtgtgaccttgatgtgaccgggatcccactctgattgcatccatttctctgaaagacttgtttgttctgcttctcttcatataactgagctggccttatccttggcatccccctaaacaaacaagaggtgaccaccttattgtgaggttccatccagccaagtttatgtggcctattgtctca

SEQ ID NO: 3036 - DNA, 1950 bp, Homo sapiens; identical to SEQ ID NO: 3035
  source 1..1950: mol_type = unassigned DNA

SEQ ID NO: 3037 - DNA, 1950 bp, Homo sapiens; identical to SEQ ID NO: 3035
  source 1..1950: mol_type = unassigned DNA

SEQ ID NO: 3038 - DNA, 1950 bp, Homo sapiens; identical to SEQ ID NO: 3035
  source 1..1950: mol_type = unassigned DNA

SEQ ID NO: 3039 - DNA, 2526 bp, Homo sapiens; identical to SEQ ID NO: 3029
  source 1..2526: mol_type = unassigned DNA

SEQ ID NO: 3040 - DNA, 2185 bp, Homo sapiens
  source 1..2185: mol_type = unassigned DNA
cccagctccctgaaacaacagtaacctacccctgtgggtcatcatcatgccctccgacctggccaagaagaaggcagccaaaaagaaggaggctgccaaagctcgacagcggcccagaaaaggacatgaagaaaatggagatgttgtcacagaaccacaggtggcagagaagaatgaggccaatggcagagagaccacagaagtagatttgctgaccaaggagctagaggactttgagatgaagaaagctgctgctcgagctgtcactggcgtcctggcctctcaccccaacagtactgatgttcacatcatcaacctctcacttacctttcatggtcaagagctgctcagtgacaccaaactggaattaaactcaggccgtcgttatggcctcattggtttaaatggaattggaaagtccatgctgctctctgctattgggaagcgtgaagtgcccatccctgagcacatcgacatctaccatctgactcgagagatgccccctagtgacaagacacccttgcattgtgtgatggaagtcgacacagagcgggccatgctggagaaagaggcagagcggctggctcatgaggatgcggagtgtgagaagctcatggagctctacgagcgcctggaggagctggatgccgacaaggcagagatgagggcctcgcggatcttgcatggactgggtttcacacctgccatgcagcgcaagaagctaaaagacttcagtgggggctggaggatgagggttgcccttgccagagccctctttattcggcccttcatgctgctcctggatgagcctaccaaccacctggacctagatgcttgcgtgtggttggaagaagaactaaaaacttttaagcgcatcttggtcctcgtctcccattcccaggattttctgaatggtgtctgtaccaatatcattcacatgcacaacaagaaactgaagtattatacgggtaattatgatcagtacgtgaagacgcggctagagctggaggagaaccagatgaagaggtttcactgggagcaagatcagattgcacacatgaagaactacattgcgaggtttggtcatggcagtgccaagctggcccggcaggcccagagcaaggagaagacgctacagaaaatgatggcatcaggactgacagagagggtcgtgagcgataagacactgtcattttatttcccaccatgtggcaagatccctccacctgtcattatggtgcaaaatgtgagcttcaagtatacaaaagatgggccttgcatctacaataatctagaatttggaattgaccttgacacacgagtggctctggtagggcccaatggagcagggaagtcaactcttctgaagctgctaactggagagctactacccacagatggcatgatccgaaaacactctcatgtcaagatagggcgttaccatcagcatttacaagagcagctggacttagatctctcacctttggagtacatgatgaagtgctacccagagatcaaggagaaggaagaaatgaggaagatcattgggcgatacggtctcactgggaaacaacaggtgagcccaatccggaacttgtcagacgggcagaagtgccgagtgtgtctggcctggctggcctggcagaacccccacatgctcttcctggatgaacccaccaatcacctggatatcgagaccatcgacgccctggcagatgccatcaatgagtttgagggtggtatgatgctggtcagccatgacttcagactcattcagcaggttgcacaggaaatttgggtctgtgagaagcagacaatcaccaagtggcctggagacatcctggcttacaaggagcacctcaagtccaagctggtggatgaggagccccagctcaccaagaggacccacaacgtgtgcaccctgacattggcatctctgccaaggccatgagcatcatgaactcgtttgtaaacgacgtgtttgagcagctggcgtgtgaggctgcccggctggcccagtactcgggccggaccaccctgacatcccgagaagtccagacggctgtgcgtctgctgctgcctggggagctggccaagcacgctgtgtctgagggcaccaaggctgtcaccaagtacaccagctccaagtgacccagggcctgacaaaaataaagggtgaactgtt

SEQ ID NO: 3041 - DNA, 3546 bp, Homo sapiens
  source 1..3546: mol_type = unassigned DNA
gagccggccgcacgcggaggatcctaaggagcagctctgttgcgacataggccgagcagcgaggcccagctccctgaaacaacagtaacctacccctgtgggtcatcatcatgccctccgacctggccaagaagaaggcagccaaaaagaaggaggctgccaaagctcgacagcggcccagaaaaggacatgaagaaaatggagatgttgtcacagaaccacaggtggcagagaagaatgaggccaatggcagagagaccacagaagtagatttgctgaccaaggagctagaggactttgagatgaagaaagctgctgctcgagctgtcactggcgtcctggcctctcaccccaacagtactgatgttcacatcatcaacctctcacttacctttcatggtcaagagctgctcagtgacaccaaactggaattaaactcaggccgtcgttatggcctcattggtttaaatggaattggaaagtccatgctgctctctgctattgggaagcgtgaagtgcccatccctgagcacatcgacatctaccatctgactcgagagatgccccctagtgacaagacacccttgcattgtgtgatggaagtcgacacagagcgggccatgctggagaaagaggcagagcggctggctcatgaggatgcggagtgtgagaagctcatggagctctacgagcgcctggaggagctggatgccgacaaggcagagatgagggcctcgcggatcttgcatggactgggtttcacacctgccatgcagcgcaagaagctaaaagacttcagtgggggctggaggatgagggttgcccttgccagagccctctttattcggcccttcatgctgctcctggatgagcctaccaaccacctggacctagatgcttgcgtgtggttggaagaagaactaaaaacttttaagcgcatcttggtcctcgtctcccattcccaggattttctgaatggtgtctgtaccaatatcattcacatgcacaacaagaaactgaagtattatacgggtaattatgatcagtacgtgaagacgcggctagagctggaggagaaccagatgaagaggtttcactgggagcaagatcagattgcacacatgaagaactacattgcgaggtttggtcatggcagtgccaagctggcccggcaggcccagagcaaggagaagacgctacagaaaatgatggcatcaggactgacagagagggtcgtgagcgataagacactgtcattttatttcccaccatgtggcaagatccctccacctgtcattatggtgcaaaatgtgagcttcaagtatacaaaagatgggccttgcatctacaataatctagaatttggaattgaccttgacacacgagtggctctggtagggcccaatggagcagggaagtcaactcttctgaagctgctaactggagagctactacccacagatggcatgatccgaaaacactctcatgtcaagatagggcgttaccatcagcatttacaagagcagctggacttagatctctcacctttggagtacatgatgaagtgctacccagagatcaaggagaaggaagaaatgaggaagatcattgggcgatacggtctcactgggaaacaacaggtgagcccaatccggaacttgtcagacgggcagaagtgccgagtgtgtctggcctggctggcctggcagaacccccacatgctcttcctggatgaacccaccaatcacctggatatcgagaccatcgacgccctggcagatgccatcaatgagtttgagggtggtatgatgctggtcagccatgacttcagactcattcagcaggttgcacaggaaatttgggtctgtgagaagcagacaatcaccaagtggcctggagacatcctggcttacaaggagcacctcaagtccaagctggtggatgaggagccccagctcaccaagaggacccacaacgtgtgagccctctacctgggttcgggtcaggagctccatctgggaactaacagctgctaacctgaccagccgctcaggacaggaccctggggctacactcctgcattgctgcaatactgctcccccagcctctcccctgcccctcaacctgccttagctgcactctcttacctacagctggacagtacctgtctgtttcctgtcctccttccagttacatctgtccatgtctggactcggctggccgttccctccagccccttgctggttatcttactctgagtgtgatgcagtcagaggcacctgcgggttagcccaggggcccaagccctggatttggcctgcggaggagcttaggatcctcgttttctgggttttggtgatgttggaggagtaccccccagcccaccgccccgattcctttttgcttctggtttggagctccggaccaggaccttcgtcctggtcagtttttaaataattatttagcagtgtaacttttagacctgcgtgacatctacaaagcgcccaataaagaaagaggaagccacggtccctaccttccttctcgggtctctggggccttctcctccctgcagtgccaacatgcactgcccacagcaggagctggatccagcgtcagtgtgtcgatgggaactgaagactagtccataggagctggaagaactttgtccctttacttctgatttgaaattgtaccttttctcaggcctgtgattcacagactttaacatgaatcagaatcacctggagggctcatgcaatcagattgccagatctcgcctcagcgtttctggttcaataggttttgggggagaccaagaacgttaacatttctagcaagtttccaggtgatgctgttgttgctggtctagagactattttgagaaccactgtccaggagcgtggttttctgattgtgatctgaggttctgccccaactgcacagcagttgggctgcttgttaaaaatgcaggccaggtgcggtggctcacacctgtaatcccagcgctttgggaggctgaggcaggtggatcacttgagctcaggagttcaagaccagcttgggaaacatggcaaaacccgtctttatgtgcctggaatcccacctgctcaggtggctagggtggatggatcgcttgagcccaggaggtggaggttgcagtgagctgagattgcaccactgcattccagcctggatgacagagcaaaaccctgtctcaaaaaaatgcagactggccaggcacagtggctcacacctgtaatccgactgtaagctcatcaccttgggaggccactgtaggaggatcaattgagcctagaagttcaagaccagcctgggcaaagtagggagaccccttctctacaaatagtaataaaatgaaccgggcatagtagcatgtgcctgcggtcccagctgctctgataagaggaggctcacttgagcccaggaggttgaggctgcagtgagcagagcgtgccgctacactccagcctgatgacagaccgagacactgtctcaaaaaaataaaaaaattcagattgctga

SEQ ID NO: 3042 - DNA, 941 bp, Homo sapiens
  source 1..941: mol_type = unassigned DNA
gagaagctgacgggcggggtgggggaggacccgggggtgacgagcgtggagactcggaggggactcacgcgggcgaggacgagtgcgtcccggcaagaggctgggctcgacggccgggtgatgtggagagggacgatcgagaagaggcccgagacggacgggaggaggaagcccggaaagctccctgaaacaacagtaacctacccctgtgggtcatcatcatgccctccgacctggccaagaagaaggcagccaaaaagaaggaggctgccaaagctcgacagcggcccagaaaaggacatgaagaaaatggagatgttgtcacagaaccacaggtggcagagaagaatgaggccaatggcagagagaccacagaagtagatttgctgaccaaggagctagaggactttgagatgaagaaagctgctgctcgagctgtcactggcgtcctggcctctcaccccaacagtactgatgttcacatcatcaacctctcacttacctttcatggtcaagagctgctcagtgacaccaaactggaattaaactcaggccgtcgttatggcctcattggtttaaatggaattggaaagtccatgctgctctctgctattgggaagcgtgaagtgcccatccctgagcacatcgacatctaccatctgactcgagagatgccccctagtgacaagacacccttgcattgtgtgatggaagtcgacacagagcgggccatgctggagaaagaggcagagcggctggctcatgaggatgcggagtgtgagaagctcatggagctctacgagcgcctggaggagctggatgccgacaaggcagagatgagggcctcgcggatcttgcatggactgggtttcacacctgccatgcagcgcaagaagctaaaagacttcagtgggggctggaggatgagggttgcccttgcc

SEQ ID NO: 3043 - DNA, 1031 bp, Homo sapiens
  source 1..1031: mol_type = unassigned DNA
gcgggggcaggccagggcatcagaggcttgatgttgatacgaagattcctgagagggatggagcagggcccaggcattcttactagtaagtttagggtttgggggtatctgtttgccttccttcaggctccctgaaacaacagtaacctacccctgtgggtcatcatcatgccctccgacctggccaagaagaaggcagccaaaaagaaggaggctgccaaagctcgacagcggcccagaaaaggacatgaagaaaatggagatgttgtcacagaaccacaggtggcagagaagaatgaggccaatggcagagagaccacagaagtagatttgctgaccaaggagctagaggactttgagatgaagaaagctgctgctcgagctgtcactggcgtcctggcctctcaccccaacagtactgatgttcacatcatcaacctctcacttacctttcatggtcaagagctgctcagtgacaccaaactggaattaaactcaggccgtcgttatggcctcattggtttaaatggaattggaaagtccatgctgctctctgctattgggaagcgtgaagtgcccatccctgagcacatcgacatctaccatctgactcgagagatgccccctagtgacaagacacccttgcattgtgtgatggaagtcgacacagagcgggccatgctggagaaagaggcagagcggctggctcatgaggatgcggagtgtgagaagctcatggagctctacgagcgcctggaggagctggatgccgacaaggcagagatgagggcctcgcggatcttgcatggactgggtttcacacctgccatgcagcgcaagaagctaaaagacttcagtgggggctggaggatgagggttgcccttgccagagccctctttattcggcccttcatgctgctcctggatgagcctaccaaccacctggacctagatgcttgcgtgtggttggaagaagaactaaaaacttttaagcgcatcttggtcctcgtctcccattcccaggattttct

SEQ ID NO: 3044 - DNA, 3211 bp, Homo sapiens
  source 1..3211: mol_type = unassigned DNA
atggtcaggagaggttggtctgtctgtaccgccattctcttggccagactgtggtgtctggtccctactcacaccttcctgtcagagtatccagaggccgcagagtatccacaccctggctgggtgtactggctacagatggctgtggctccaggtcacctgcgtgcctgggtgatgagaaataatgtcacaacaaatatcccatctgcattctctgggacactgacccatgaagagaaagcagttctcacagtttttacaggcacagccacagccgtgcatgtacaggtggcagctttagcttctgctaaactggagagctcagtgtttgtgacagactgcgtgtcctgcaaaatcgaaaatgtctgtgattcagctcttcagggaaaaagggtgccgatgtctggcctacagggctcaagcattgtcatcatgcccccatccaaccgtccactcaaggccagtgcggcatcctgcacgtggtcagtccaagtccagggagggccccatcacctgggggtggtcgctatcagtggcaaagtcttgtcagcagctcatggggcaggaagggcctatggttgggggtttcctggcgatcccatggaggaaggatacaagaccctcctgaaaggaatttccgggaagttcaatagtggtgagttggtggccattatgggtccttccggggccgggaagtccacgctgatgaacatcctggctggatacagggagacgggcatgaagggggccgtcctcatcaacggcctgccccgggacctgcgctgcttccggaaggtgtcctgctacatcatgcaggatgacatgctgctgccgcatctcactgtgcaggaggccatgatggtgtcggcacatctgaagcttcaggagaaggatgaaggcagaagggaaatggtcaaggagatactgacagcgctgggcttgctgtcttgcgccaacacgcggaccgggagcctgtcaggtggtcagcgcaagcgcctggccatcgcgctggagctggtgaacaaccctccagtcatgttcttcgatgagcccaccagcggcctggacagcgcctcctgcttccaggtggtctcgctgatgaaagggctcgctcaagggggtcgctccatcatttgcaccatccaccagcccagcgccaaactcttcgagctgttcgaccagctttacgtcctgagtcaaggacaatgtgtgtaccggggaaaagtctgcaatcttgtgccatatttgagggatttgggtctgaactgcccaacctaccacaacccagcagattttgtcatggaggttgcatccggcgagtacggtgatcagaacagtcggctggtgagagcggttcgggagggcatgtgtgactcagaccacaagagagacctcgggggtgatgccgaggtgaacccttttctttggcaccggccctctgaagaggtaaagcagacaaaacgattaaaggggttgagaaaggactcctcgtccatggaaggctgccacagcttctctgccagctgcctcacgcagttctgcatcctcttcaagaggaccttcctcagcatcatgagggactcggtcctgacacacctgcgcatcacctcgcacattgggatcggcctcctcattggcctgctgtacttggggatcgggaacgaagccaagaaggtcttgagcaactccggcttcctcttcttctccatgctgttcctcatgttcgcggccctcatgcctactgttctgacatttcccctggagatgggagtctttcttcgggaacacctgaactactggtacagcctgaaggcctactacctggccaagaccatggcagacgtgccctttcagatcatgttcccagtggcctactgcagcatcgtgtactggatgacgtcgcagccgtccgacgccgtgcgctttgtgctgtttgccgcgctgggcaccatgacctccctggtggcacagtccctgggcctgctgatcggagccgcctccacgtccctgcaggtggccactttcgtgggcccagtgacagccatcccggtgctcctgttctcggggttcttcgtcagcttcgacaccatccccacgtacctacagtggatgtcctacatctcctatgtcaggtatgggttcgaaggggtcatcctctccatctatggcttagaccgggaagatctgcactgtgacatcgacgagacgtgccacttccagaagtcggaggccatcctgcgggagctggacgtggaaaatgccaagctgtacctggacttcatcgtactcgggattttcttcatctccctccgcctcattgcctattttgtcctcaggtacaaaatccgggcagagaggtaaaacacctgaatgccaggaaacaggaagattagacactgtggccgagggcacgtctagaatcgaggaggcaagcctgtgcccgaccgacgacacagagactcttctgatccaacccctagaaccgcgttgggtttgtgggtgtctcgtgctcagccactctgcccagctgggttggatcttctctccattcccctttctagctttaactaggaagatgtaggcagattggtggtttttttttttttaacatacagaattttaaataccacaactggggcagaatttaaagctgcaacacagctggtgatgagaggcttcctcagtccagtcgctccttagcaccaggcaccgtgggtcctggatggggaactgcaagcagcctctcagctgatggctgcacagtcagatgtctggtggcagagagtccgagcatggagcgattccattttatgactgttgtttttcacattttcatctttctaaggtgtgtctcttttccaatgagaagtcatttttgcaagccaaaagtcgatcaatcgcattcattttaagaaattatacctttttagtacttgctgaagaatgattcagggtaaatcacatactttgtttagagaggcgaggggtttaaccgagtcacccagctggtctcatacatagacagcacttgtgaaggattgaatgcaggttccaggtggagggaagacgtggacaccatctccactgagccatgcagacatttttaaaagctatacaaaaaattgtgagaagacattggccaactctttcaaagtctttctttttccacgtgcttcttattttaagcgaaatatattgtttgtttcttcct

SEQ ID NO: 3045 - DNA, 3037 bp, Homo sapiens
  source 1..3037: mol_type = unassigned DNA
agcctgcgactgcactcccggggacaccctctcccggacccactcggggaggcggcggcgaaggcccggggagacccgcgaggggcaagcccggattcctgccggccgcctttctgcgcgcgccggagagagagacgcggtggggacagggatgcgcatttcacttccccgagctccggagagggatggcggggtgtcggcgagttcactgctggacacagttactaatgccagcagttactctgcagagatgacggagcccaagtcggtgtgtgtctcggtggatgaggtggtgtccagcaacatggaggccactgagacggacctgctgaatggacatctgaaaaaagtagataataacctcacggaagcccagcgcttctcctccttgcctcggagggcagctgtgaacattgaattcagggacctttcctattcggttcctgaaggaccctggtggaggaagaaaggatacaagaccctcctgaaaggaatttccgggaagttcaatagtggtgagttggtggccattatgggtccttccggggccgggaagtccacgctgatgaacatcctggctggatacagggagacgggcatgaagggggccgtcctcatcaacggcctgccccgggacctgcgctgcttccggaaggtgtcctgctacatcatgcaggatgacatgctgctgccgcatctcactgtgcaggaggccatgatggtgtcggcacatctgaagcttcaggagaaggatgaaggcagaagggaaatggtcaaggagatactgacagcgctgggcttgctgtcttgcgccaacacgcggaccgggagcctgtcaggtggtcagcgcaagcgcctggccatcgcgctggagctggtgaacaaccctccagtcatgttcttcgatgagcccaccagcggcctggacagcgcctcctgcttccaggtggtctcgctgatgaaagggctcgctcaagggggtcgctccatcatttgcaccatccaccagcccagcgccaaactcttcgagctgttcgaccagctttacgtcctgagtcaaggacaatgtgtgtaccggggaaaagtctgcaatcttgtgccatatttgagggatttgggtctgaactgcccaacctaccacaacccagcagattttgtcatggaggttgcatccggcgagtacggtgatcagaacagtcggctggtgagagcggttcgggagggcatgtgtgactcagaccacaagagagacctcgggggtgatgccgaggtgaacccttttctttggcaccggccctctgaagaggactcctcgtccatggaaggctgccacagcttctctgccagctgcctcacgcagttctgcatcctcttcaagaggaccttcctcagcatcatgagggactcggtcctgacacacctgcgcatcacctcgcacattgggatcggcctcctcattggcctgctgtacttggggatcgggaacgaagccaagaaggtcttgagcaactccggcttcctcttcttctccatgctgttcctcatgttcgcggccctcatgcctactgttctgacatttcccctggagatgggagtctttcttcgggaacacctgaactactggtacagcctgaaggcctactacctggccaagaccatggcagacgtgccctttcagatcatgttcccagtggcctactgcagcatcgtgtactggatgacgtcgcagccgtccgacgccgtgcgctttgtgctgtttgccgcgctgggcaccatgacctccctggtggcacagtccctgggcctgctgatcggagccgcctccacgtccctgcaggtggccactttcgtgggcccagtgacagccatcccggtgctcctgttctcggggttcttcgtcagcttcgacaccatccccacgtacctacagtggatgtcctacatctcctatgtcaggtatgggttcgaaggggtcatcctctccatctatggcttagaccgggaagatctgcactgtgacatcgacgagacgtgccacttccagaagtcggaggccatcctgcgggagctggacgtggaaaatgccaagctgtacctggacttcatcgtactcgggattttcttcatctccctccgcctcattgcctattttgtcctcaggtacaaaatccgggcagagaggtaaaacacctgaatgccaggaaacaggaagattagacactgtggccgagggcacgtctagaatcgaggaggcaagcctgtgcccgaccgacgacacagagactcttctgatccaacccctagaaccgcgttgggtttgtgggtgtctcgtgctcagccactctgcccagctgggttggatcttctctccattcccctttctagctttaactaggaagatgtaggcagattggtggtttttttttttttaacatacagaattttaaataccacaactggggcagaatttaaagctgcaacacagctggtgatgagaggcttcctcagtccagtcgctccttagcaccaggcaccgtgggtcctggatggggaactgcaagcagcctctcagctgatggctgcacagtcagatgtctggtggcagagagtccgagcatggagcgattccattttatgactgttgtttttcacattttcatctttctaaggtgtgtctcttttccaatgagaagtcatttttgcaagccaaaagtcgatcaatcgcattcattttaagaaattatacctttttagtacttgctgaagaatgattcagggtaaatcacatactttgtttagagaggcgaggggtttaaccgagtcacccagctggtctcatacatagacagcacttgtgaaggattgaatgcaggttccaggtggagggaagacgtggacaccatctccactgagccatgcagacatttttaaaagctatacaaaaaattgtgagaagacattggccaactctttcaaagtctttctttttccacgtgcttcttattttaagcgaaatatattgtttgtttcttcctaa

SEQ ID NO: 3046 - DNA, 2923 bp, Homo sapiens
  source 1..2923: mol_type = unassigned DNA
gctttataaaggggagtttccctgcacaagctctctctcttgtctgccgccatgtgagacatgcctttcaccttccgccatgatcatgaggcttccccagccacatggaactaatgccagcagttactctgcagagatgacggagcccaagtcggtgtgtgtctcggtggatgaggtggtgtccagcaacatggaggccactgagacggacctgctgaatggacatctgaaaaaagtagataataacctcacggaagcccagcgcttctcctccttgcctcggagggcagctgtgaacattgaattcagggacctttcctattcggttcctgaaggaccctggtggaggaagaaaggatacaagaccctcctgaaaggaatttccgggaagttcaatagtggtgagttggtggccattatgggtccttccggggccgggaagtccacgctgatgaacatcctggctggatacagggagacgggcatgaagggggccgtcctcatcaacggcctgccccgggacctgcgctgcttccggaaggtgtcctgctacatcatgcaggatgacatgctgctgccgcatctcactgtgcaggaggccatgatggtgtcggcacatctgaagcttcaggagaaggatgaaggcagaagggaaatggtcaaggagatactgacagcgctgggcttgctgtcttgcgccaacacgcggaccgggagcctgtcaggtggtcagcgcaagcgcctggccatcgcgctggagctggtgaacaaccctccagtcatgttcttcgatgagcccaccagcggcctggacagcgcctcctgcttccaggtggtctcgctgatgaaagggctcgctcaagggggtcgctccatcatttgcaccatccaccagcccagcgccaaactcttcgagctgttcgaccagctttacgtcctgagtcaaggacaatgtgtgtaccggggaaaagtctgcaatcttgtgccatatttgagggatttgggtctgaactgcccaacctaccacaacccagcagattttgtcatggaggttgcatccggcgagtacggtgatcagaacagtcggctggtgagagcggttcgggagggcatgtgtgactcagaccacaagagagacctcgggggtgatgccgaggtgaacccttttctttggcaccggccctctgaagaggactcctcgtccatggaaggctgccacagcttctctgccagctgcctcacgcagttctgcatcctcttcaagaggaccttcctcagcatcatgagggactcggtcctgacacacctgcgcatcacctcgcacattgggatcggcctcctcattggcctgctgtacttggggatcgggaacgaagccaagaaggtcttgagcaactccggcttcctcttcttctccatgctgttcctcatgttcgcggccctcatgcctactgttctgacatttcccctggagatgggagtctttcttcgggaacacctgaactactggtacagcctgaaggcctactacctggccaagaccatggcagacgtgccctttcagatcatgttcccagtggcctactgcagcatcgtgtactggatgacgtcgcagccgtccgacgccgtgcgctttgtgctgtttgccgcgctgggcaccatgacctccctggtggcacagtccctgggcctgctgatcggagccgcctccacgtccctgcaggtggccactttcgtgggcccagtgacagccatcccggtgctcctgttctcggggttcttcgtcagcttcgacaccatccccacgtacctacagtggatgtcctacatctcctatgtcaggtatgggttcgaaggggtcatcctctccatctatggcttagaccgggaagatctgcactgtgacatcgacgagacgtgccacttccagaagtcggaggccatcctgcgggagctggacgtggaaaatgccaagctgtacctggacttcatcgtactcgggattttcttcatctccctccgcctcattgcctattttgtcctcaggtacaaaatccgggcagagaggtaaaacacctgaatgccaggaaacaggaagattagacactgtggccgagggcacgtctagaatcgaggaggcaagcctgtgcccgaccgacgacacagagactcttctgatccaacccctagaaccgcgttgggtttgtgggtgtctcgtgctcagccactctgcccagctgggttggatcttctctccattcccctttctagctttaactaggaagatgtaggcagattggtggtttttttttttttaacatacagaattttaaataccacaactggggcagaatttaaagctgcaacacagctggtgatgagaggcttcctcagtccagtcgctccttagcaccaggcaccgtgggtcctggatggggaactgcaagcagcctctcagctgatggctgcacagtcagatgtctggtggcagagagtccgagcatggagcgattccattttatgactgttgtttttcacattttcatctttctaaggtgtgtctcttttccaatgagaagtcatttttgcaagccaaaagtcgatcaatcgcattcattttaagaaattatacctttttagtacttgctgaagaatgattcagggtaaatcacatactttgtttagagaggcgaggggtttaaccgagtcacccagctggtctcatacatagacagcacttgtgaaggattgaatgcaggttccaggtggagggaagacgtggacaccatctccactgagccatgcagacatttttaaaagctatacaaaaaattgtgagaagacattggccaactctttcaaagtctttctttttccacgtgcttcttattttaagcgaaatatattgtttgtttcttcctaa

SEQ ID NO: 3047 - DNA, 3034 bp, Homo sapiens
  source 1..3034: mol_type = unassigned DNA
gagccggagccggatcccagccggagcccaagcgcagcccgcaccccgcgcagcggctgagccgggagccagcgcagcctcggccccgcagctcaagcctcgtccccgccgccgccgccgccgccgccgccgccgcccccggggcatggcctgtctgatggccgctttctcggtcggcaccgccatgaatgccagcagttactctgcagagatgacggagcccaagtcggtgtgtgtctcggtggatgaggtggtgtccagcaacatggaggccactgagacggacctgctgaatggacatctgaaaaaagtagataataacctcacggaagcccagcgcttctcctccttgcctcggagggcagctgtgaacattgaattcagggacctttcctattcggttcctgaaggaccctggtggaggaagaaaggatacaagaccctcctgaaaggaatttccgggaagttcaatagtggtgagttggtggccattatgggtccttccggggccgggaagtccacgctgatgaacatcctggctggatacagggagacgggcatgaagggggccgtcctcatcaacggcctgccccgggacctgcgctgcttccggaaggtgtcctgctacatcatgcaggatgacatgctgctgccgcatctcactgtgcaggaggccatgatggtgtcggcacatctgaagcttcaggagaaggatgaaggcagaagggaaatggtcaaggagatactgacagcgctgggcttgctgtcttgcgccaacacgcggaccgggagcctgtcaggtggtcagcgcaagcgcctggccatcgcgctggagctggtgaacaaccctccagtcatgttcttcgatgagcccaccagcggcctggacagcgcctcctgcttccaggtggtctcgctgatgaaagggctcgctcaagggggtcgctccatcatttgcaccatccaccagcccagcgccaaactcttcgagctgttcgaccagctttacgtcctgagtcaaggacaatgtgtgtaccggggaaaagtctgcaatcttgtgccatatttgagggatttgggtctgaactgcccaacctaccacaacccagcagattttgtcatggaggttgcatccggcgagtacggtgatcagaacagtcggctggtgagagcggttcgggagggcatgtgtgactcagaccacaagagagacctcgggggtgatgccgaggtgaacccttttctttggcaccggccctctgaagaggtaaagcagacaaaacgattaaaggggttgagaaaggactcctcgtccatggaaggctgccacagcttctctgccagctgcctcacgcagttctgcatcctcttcaagaggaccttcctcagcatcatgagggactcggtcctgacacacctgcgcatcacctcgcacattgggatcggcctcctcattggcctgctgtacttggggatcgggaacgaagccaagaaggtcttgagcaactccggcttcctcttcttctccatgctgttcctcatgttcgcggccctcatgcctactgttctgacatttcccctggagatgggagtctttcttcgggaacacctgaactactggtacagcctgaaggcctactacctggccaagaccatggcagacgtgccctttcagatcatgttcccagtggcctactgcagcatcgtgtactggatgacgtcgcagccgtccgacgccgtgcgctttgtgctgtttgccgcgctgggcaccatgacctccctggtggcacagtccctgggcctgctgatcggagccgcctccacgtccctgcaggtggccactttcgtgggcccagtgacagccatcccggtgctcctgttctcggggttcttcgtcagcttcgacaccatccccacgtacctacagtggatgtcctacatctcctatgtcaggtatgggttcgaaggggtcatcctctccatctatggcttagaccgggaagatctgcactgtgacatcgacgagacgtgccacttccagaagtcggaggccatcctgcgggagctggacgtggaaaatgccaagctgtacctggacttcatcgtactcgggattttcttcatctccctccgcctcattgcctattttgtcctcaggtacaaaatccgggcagagaggtaaaacacctgaatgccaggaaacaggaagattagacactgtggccgagggcacgtctagaatcgaggaggcaagcctgtgcccgaccgacgacacagagactcttctgatccaacccctagaaccgcgttgggtttgtgggtgtctcgtgctcagccactctgcccagctgggttggatcttctctccattcccctttctagctttaactaggaagatgtaggcagattggtggtttttttttttttaacatacagaattttaaataccacaactggggcagaatttaaagctgcaacacagctggtgatgagaggcttcctcagtccagtcgctccttagcaccaggcaccgtgggtcctggatggggaactgcaagcagcctctcagctgatggctgcacagtcagatgtctggtggcagagagtccgagcatggagcgattccattttatgactgttgtttttcacattttcatctttctaaggtgtgtctcttttccaatgagaagtcatttttgcaagccaaaagtcgatcaatcgcattcattttaagaaattatacctttttagtacttgctgaagaatgattcagggtaaatcacatactttgtttagagaggcgaggggtttaaccgagtcacccagctggtctcatacatagacagcacttgtgaaggattgaatgcaggttccaggtggagggaagacgtggacaccatctccactgagccatgcagacatttttaaaagctatacaaaaaattgtgagaagacattggccaactctttcaaagtctttctttttccacgtgcttcttattttaagcgaaatatattgtttgtttcttcctaa

SEQ ID NO: 3048 - DNA, 3475 bp, Homo sapiens
  source 1..3475: mol_type = unassigned DNA
ttctttccaagggtctctgggtgaggcccgtgaccttcccaagcctctccctgtcttgtgaaacctgggcgtgatatacctcccttttagggctgctgcgatcatttaggcagattaaacctcataagtggtttcccatacaagaaagatgctagcagtgcaacagacagaacacttacctgcctgccctcccgccaggaggtggtcttccaacttttgcccggagtctacagagggtgggccctctctgctggggctccgggacatggtcaggagaggttggtctgtctgtaccgccattctcttggccagactgtggtgtctggtccctactcacaccttcctgtcagagtatccagaggccgcagagtatccacaccctggctgggtgtactggctacagatggctgtggctccaggtcacctgcgtgcctgggtgatgagaaataatgtcacaacaaatatcccatctgcattctctgggacactgacccatgaagagaaagcagttctcacagtttttacaggcacagccacagccgtgcatgtacaggtggcagctttagcttctgctaaactggagagctcagtgtttgtgacagactgcgtgtcctgcaaaatcgaaaatgtctgtgattcagctcttcagggaaaaagggtgccgatgtctggcctacagggctcaagcattgtcatcatgcccccatccaaccgtccactcgccagtgcggcatcctgcacgtggtcagtccaagtccagggagggccccatcacctgggggtggtcgctatcagtggcaaagtcttgtcagcagctcatggggcaggaagggcctatggttgggggtttcctggcgatcccatggaggaaggatacaagaccctcctgaaaggaatttccgggaagttcaatagtggtgagttggtggccattatgggtccttccggggccgggaagtccacgctgatgaacatcctggctggatacagggagacgggcatgaagggggccgtcctcatcaacggcctgccccgggacctgcgctgcttccggaaggtgtcctgctacatcatgcaggatgacatgctgctgccgcatctcactgtgcaggaggccatgatggtgtcggcacatctgaagcttcaggagaaggatgaaggcagaagggaaatggtcaaggagatactgacagcgctgggcttgctgtcttgcgccaacacgcggaccgggagcctgtcaggtggtcagcgcaagcgcctggccatcgcgctggagctggtgaacaaccctccagtcatgttcttcgatgagcccaccagcggcctggacagcgcctcctgcttccaggtggtctcgctgatgaaagggctcgctcaagggggtcgctccatcatttgcaccatccaccagcccagcgccaaactcttcgagctgttcgaccagctttacgtcctgagtcaaggacaatgtgtgtaccggggaaaagtctgcaatcttgtgccatatttgagggatttgggtctgaactgcccaacctaccacaacccagcagattttgtcatggaggttgcatccggcgagtacggtgatcagaacagtcggctggtgagagcggttcgggagggcatgtgtgactcagaccacaagagagacctcgggggtgatgccgaggtgaacccttttctttggcaccggccctctgaagaggtaaagcagacaaaacgattaaaggggttgagaaaggactcctcgtccatggaaggctgccacagcttctctgccagctgcctcacgcagttctgcatcctcttcaagaggaccttcctcagcatcatgagggactcggtcctgacacacctgcgcatcacctcgcacattgggatcggcctcctcattggcctgctgtacttggggatcgggaacgaagccaagaaggtcttgagcaactccggcttcctcttcttctccatgctgttcctcatgttcgcggccctcatgcctactgttctgacatttcccctggagatgggagtctttcttcgggaacacctgaactactggtacagcctgaaggcctactacctggccaagaccatggcagacgtgccctttcagatcatgttcccagtggcctactgcagcatcgtgtactggatgacgtcgcagccgtccgacgccgtgcgctttgtgctgtttgccgcgctgggcaccatgacctccctggtggcacagtccctgggcctgctgatcggagccgcctccacgtccctgcaggtggccactttcgtgggcccagtgacagccatcccggtgctcctgttctcggggttcttcgtcagcttcgacaccatccccacgtacctacagtggatgtcctacatctcctatgtcaggtatgggttcgaaggggtcatcctctccatctatggcttagaccgggaagatctgcactgtgacatcgacgagacgtgccacttccagaagtcggaggccatcctgcgggagctggacgtggaaaatgccaagctgtacctggacttcatcgtactcgggattttcttcatctccctccgcctcattgcctattttgtcctcaggtacaaaatccgggcagagaggtaaaacacctgaatgccaggaaacaggaagattagacactgtggccgagggcacgtctagaatcgaggaggcaagcctgtgcccgaccgacgacacagagactcttctgatccaacccctagaaccgcgttgggtttgtgggtgtctcgtgctcagccactctgcccagctgggttggatcttctctccattcccctttctagctttaactaggaagatgtaggcagattggtggtttttttttttttaacatacagaattttaaataccacaactggggcagaatttaaagctgcaacacagctggtgatgagaggcttcctcagtccagtcgctccttagcaccaggcaccgtgggtcctggatggggaactgcaagcagcctctcagctgatggctgcacagtcagatgtctggtggcagagagtccgagcatggagcgattccattttatgactgttgtttttcacattttcatctttctaaggtgtgtctcttttccaatgagaagtcatttttgcaagccaaaagtcgatcaatcgcattcattttaagaaattatacctttttagtacttgctgaagaatgattcagggtaaatcacatactttgtttagagaggcgaggggtttaaccgagtcacccagctggtctcatacatagacagcacttgtgaaggattgaatgcaggttccaggtggagggaagacgtggacaccatctccactgagccatgcagacatttttaaaagctatacaaaaaattgtgagaagacattggccaactctttcaaagtctttctttttccacgtgcttcttattttaagcgaaatatattgtttgtttcttcctaa

SEQ ID NO: 3049 - DNA, 2998 bp, Homo sapiens
  source 1..2998: mol_type = unassigned DNA
gagccggagccggatcccagccggagcccaagcgcagcccgcaccccgcgcagcggctgagccgggagccagcgcagcctcggccccgcagctcaagcctcgtccccgccgccgccgccgccgccgccgccgccgcccccggggcatggcctgtctgatggccgctttctcggtcggcaccgccatgaatgccagcagttactctgcagagatgacggagcccaagtcggtgtgtgtctcggtggatgaggtggtgtccagcaacatggaggccactgagacggacctgctgaatggacatctgaaaaaagtagataataacctcacggaagcccagcgcttctcctccttgcctcggagggcagctgtgaacattgaattcagggacctttcctattcggttcctgaaggaccctggtggaggaagaaaggatacaagaccctcctgaaaggaatttccgggaagttcaatagtggtgagttggtggccattatgggtccttccggggccgggaagtccacgctgatgaacatcctggctggatacagggagacgggcatgaagggggccgtcctcatcaacggcctgccccgggacctgcgctgcttccggaaggtgtcctgctacatcatgcaggatgacatgctgctgccgcatctcactgtgcaggaggccatgatggtgtcggcacatctgaagcttcaggagaaggatgaaggcagaagggaaatggtcaaggagatactgacagcgctgggcttgctgtcttgcgccaacacgcggaccgggagcctgtcaggtggtcagcgcaagcgcctggccatcgcgctggagctggtgaacaaccctccagtcatgttcttcgatgagcccaccagcggcctggacagcgcctcctgcttccaggtggtctcgctgatgaaagggctcgctcaagggggtcgctccatcatttgcaccatccaccagcccagcgccaaactcttcgagctgttcgaccagctttacgtcctgagtcaaggacaatgtgtgtaccggggaaaagtctgcaatcttgtgccatatttgagggatttgggtctgaactgcccaacctaccacaacccagcagattttgtcatggaggttgcatccggcgagtacggtgatcagaacagtcggctggtgagagcggttcgggagggcatgtgtgactcagaccacaagagagacctcgggggtgatgccgaggtgaacccttttctttggcaccggccctctgaagaggactcctcgtccatggaaggctgccacagcttctctgccagctgcctcacgcagttctgcatcctcttcaagaggaccttcctcagcatcatgagggactcggtcctgacacacctgcgcatcacctcgcacattgggatcggcctcctcattggcctgctgtacttggggatcgggaacgaagccaagaaggtcttgagcaactccggcttcctcttcttctccatgctgttcctcatgttcgcggccctcatgcctactgttctgacatttcccctggagatgggagtctttcttcgggaacacctgaactactggtacagcctgaaggcctactacctggccaagaccatggcagacgtgccctttcagatcatgttcccagtggcctactgcagcatcgtgtactggatgacgtcgcagccgtccgacgccgtgcgctttgtgctgtttgccgcgctgggcaccatgacctccctggtggcacagtccctgggcctgctgatcggagccgcctccacgtccctgcaggtggccactttcgtgggcccagtgacagccatcccggtgctcctgttctcggggttcttcgtcagcttcgacaccatccccacgtacctacagtggatgtcctacatctcctatgtcaggtatgggttcgaaggggtcatcctctccatctatggcttagaccgggaagatctgcactgtgacatcgacgagacgtgccacttccagaagtcggaggccatcctgcgggagctggacgtggaaaatgccaagctgtacctggacttcatcgtactcgggattttcttcatctccctccgcctcattgcctattttgtcctcaggtacaaaatccgggcagagaggtaaaacacctgaatgccaggaaacaggaagattagacactgtggccgagggcacgtctagaatcgaggaggcaagcctgtgcccgaccgacgacacagagactcttctgatccaacccctagaaccgcgttgggtttgtgggtgtctcgtgctcagccactctgcccagctgggttggatcttctctccattcccctttctagctttaactaggaagatgtaggcagattggtggtttttttttttttaacatacagaattttaaataccacaactggggcagaatttaaagctgcaacacagctggtgatgagaggcttcctcagtccagtcgctccttagcaccaggcaccgtgggtcctggatggggaactgcaagcagcctctcagctgatggctgcacagtcagatgtctggtggcagagagtccgagcatggagcgattccattttatgactgttgtttttcacattttcatctttctaaggtgtgtctcttttccaatgagaagtcatttttgcaagccaaaagtcgatcaatcgcattcattttaagaaattatacctttttagtacttgctgaagaatgattcagggtaaatcacatactttgtttagagaggcgaggggtttaaccgagtcacccagctggtctcatacatagacagcacttgtgaaggattgaatgcaggttccaggtggagggaagacgtggacaccatctccactgagccatgcagacatttttaaaagctatacaaaaaattgtgagaagacattggccaactctttcaaagtctttctttttccacgtgcttcttattttaagcgaaatatattgtttgtttcttcctaa

SEQ ID NO: 3050 - DNA, 3119 bp, Homo sapiens
  source 1..3119: mol_type = unassigned DNA
agacactgaatcatcatttgtagtttggggggctttacatgcctgcagtggtgaaaactgaaattttgtcccacttaagggagtttcttcttccctttattaattgcaaaataaatatatgtcacttcagagggcagcagctggactacctatgtttgtggcgctacaccaacctgaacttcgcttcctgagacctaagattcagccccgtgctcagcagacatcagggatcaccgactctgtgccaggagctgttcttgatgctgggaacgcaggggtggacaaaacagagaaagccctgccctcagaatgccagcagttactctgcagagatgacggagcccaagtcggtgtgtgtctcggtggatgaggtggtgtccagcaacatggaggccactgagacggacctgctgaatggacatctgaaaaaagtagataataacctcacggaagcccagcgcttctcctccttgcctcggagggcagctgtgaacattgaattcagggacctttcctattcggttcctgaaggaccctggtggaggaagaaaggatacaagaccctcctgaaaggaatttccgggaagttcaatagtggtgagttggtggccattatgggtccttccggggccgggaagtccacgctgatgaacatcctggctggatacagggagacgggcatgaagggggccgtcctcatcaacggcctgccccgggacctgcgctgcttccggaaggtgtcctgctacatcatgcaggatgacatgctgctgccgcatctcactgtgcaggaggccatgatggtgtcggcacatctgaagcttcaggagaaggatgaaggcagaagggaaatggtcaaggagatactgacagcgctgggcttgctgtcttgcgccaacacgcggaccgggagcctgtcaggtggtcagcgcaagcgcctggccatcgcgctggagctggtgaacaaccctccagtcatgttcttcgatgagcccaccagcggcctggacagcgcctcctgcttccaggtggtctcgctgatgaaagggctcgctcaagggggtcgctccatcatttgcaccatccaccagcccagcgccaaactcttcgagctgttcgaccagctttacgtcctgagtcaaggacaatgtgtgtaccggggaaaagtctgcaatcttgtgccatatttgagggatttgggtctgaactgcccaacctaccacaacccagcagattttgtcatggaggttgcatccggcgagtacggtgatcagaacagtcggctggtgagagcggttcgggagggcatgtgtgactcagaccacaagagagacctcgggggtgatgccgaggtgaacccttttctttggcaccggccctctgaagaggactcctcgtccatggaaggctgccacagcttctctgccagctgcctcacgcagttctgcatcctcttcaagaggaccttcctcagcatcatgagggactcggtcctgacacacctgcgcatcacctcgcacattgggatcggcctcctcattggcctgctgtacttggggatcgggaacgaagccaagaaggtcttgagcaactccggcttcctcttcttctccatgctgttcctcatgttcgcggccctcatgcctactgttctgacatttcccctggagatgggagtctttcttcgggaacacctgaactactggtacagcctgaaggcctactacctggccaagaccatggcagacgtgccctttcagatcatgttcccagtggcctactgcagcatcgtgtactggatgacgtcgcagccgtccgacgccgtgcgctttgtgctgtttgccgcgctgggcaccatgacctccctggtggcacagtccctgggcctgctgatcggagccgcctccacgtccctgcaggtggccactttcgtgggcccagtgacagccatcccggtgctcctgttctcggggttcttcgtcagcttcgacaccatccccacgtacctacagtggatgtcctacatctcctatgtcaggtatgggttcgaaggggtcatcctctccatctatggcttagaccgggaagatctgcactgtgacatcgacgagacgtgccacttccagaagtcggaggccatcctgcgggagctggacgtggaaaatgccaagctgtacctggacttcatcgtactcgggattttcttcatctccctccgcctcattgcctattttgtcctcaggtacaaaatccgggcagagaggtaaaacacctgaatgccaggaaacaggaagattagacactgtggccgagggcacgtctagaatcgaggaggcaagcctgtgcccgaccgacgacacagagactcttctgatccaacccctagaaccgcgttgggtttgtgggtgtctcgtgctcagccactctgcccagctgggttggatcttctctccattcccctttctagctttaactaggaagatgtaggcagattggtggtttttttttttttaacatacagaattttaaataccacaactggggcagaatttaaagctgcaacacagctggtgatgagaggcttcctcagtccagtcgctccttagcaccaggcaccgtgggtcctggatggggaactgcaagcagcctctcagctgatggctgcacagtcagatgtctggtggcagagagtccgagcatggagcgattccattttatgactgttgtttttcacattttcatctttctaaggtgtgtctcttttccaatgagaagtcatttttgcaagccaaaagtcgatcaatcgcattcattttaagaaattatacctttttagtacttgctgaagaatgattcagggtaaatcacatactttgtttagagaggcgaggggtttaaccgagtcacccagctggtctcatacatagacagcacttgtgaaggattgaatgcaggttccaggtggagggaagacgtggacaccatctccactgagccatgcagacatttttaaaagctatacaaaaaattgtgagaagacattggccaactctttcaaagtctttctttttccacgtgcttcttattttaagcgaaatatattgtttgtttcttcctaa

SEQ ID NO: 3051 - DNA, 3849 bp, Homo sapiens
  source 1..3849: mol_type = unassigned DNA
aagaacggcgggaccggcgagcagtagctggtaggagagcgcagtcgccccgcgggctcggaggacacagcgtccgggaccaggctctgggaagcgggtgtgcacagcccagcagagtcagggcgcgaccccaaccgcctctcaccatccttgccgtctcctccgagccgagggccggccctcctgcctcgcctgccccgccccggccccgccccggcccgggccgccgggaccgggagccgggacgcgggtgccgcagcccgaggcaggtaaggggagccccggctctccgtccccggtccgtggcagcgctgagcatcccggccccgcaccggcccgggggcgcgtcaaggtcggcggcgtgatggcggagaaggcgctggaggccgtgggctgtggactagggccgggggctgtggccatggccgtgacgctggaggacggggcggaaccccctgtgctgaccacgcacctgaagaaggtggagaaccacatcactgaagcccagcgcttctcccacctacccaagcgctcagccgtggacatcgagttcgtggagctgtcctattccgtgcgggaggggccctgctggcgcaaaaggggttataagacccttctcaagtgcctctcaggtaaattctgccgccgggagctgattggcatcatgggcccctcaggggctggcaagtctacattcatgaacatcttggcaggatacagggagtctggaatgaaggggcagatcctggttaatggaaggccacgggagctgaggaccttccgcaagatgtcctgctacatcatgcaagatgacatgctgctgccgcacctcacggtgttggaagccatgatggtctctgctaacctgaagctgagtgagaagcaggaggtgaagaaggagctggtgacagagatcctgacggcactgggcctgatgtcgtgctcccacacgaggacagccctgctctctggcgggcagaggaagcgtctggccatcgccctggagctggtcaacaacccgcctgtcatgttctttgatgagcccaccagtggtctggatagcgcctcttgtttccaagtggtgtccctcatgaagtccctggcacaggggggccgtaccatcatctgcaccatccaccagcccagtgccaagctctttgagatgtttgacaagctctacatcctgagccagggtcagtgcatcttcaaaggcgtggtcaccaacctgatcccctatctaaagggactcggcttgcattgccccacctaccacaacccggctgacttcatcatcgaggtggcctctggcgagtatggagacctgaaccccatgttgttcagggctgtgcagaatgggctgtgcgctatggctgagaagaagagcagccctgagaagaacgaggtccctgccccatgccctccttgtcctccggaagtggatcccattgaaagccacacctttgccaccagcaccctcacacagttctgcatcctcttcaagaggaccttcctgtccatcctcagggacacggtcctgacccacctacggttcatgtcccacgtggttattggcgtgctcatcggcctcctctacctgcatattggcgacgatgccagcaaggtcttcaacaacaccggctgcctcttcttctccatgctgttcctcatgttcgccgccctcatgccaactgtgctcaccttccccttagagatggcggtcttcatgagggagcacctcaactactggtacagcctcaaagcgtattacctggccaagaccatggctgacgtgccctttcaggtggtgtgtccggtggtctactgcagcattgtgtactggatgacgggccagcccgctgagaccagccgcttcctgctcttctcagccctggccaccgccaccgccttggtggcccaatctttggggctgctgatcggagctgcttccaactccctacaggtggccacttttgtgggcccagttaccgccatccctgtcctcttgttctccggcttctttgtcagcttcaagaccatccccacttacctgcaatggagctcctatctctcctatgtcaggtatggctttgagggtgtgatcctgacgatctatggcatggagcgaggagacctgacatgtttagaggaacgctgcccgttccgggagccacagagcatcctccgagcgctggatgtggaggatgccaagctctacatggacttcctggtcttgggcatcttcttcctagccctgcggctgctggcctaccttgtgctgcgttaccgggtcaagtcagagagatagaggcttgccccagcctgtaccccagccctgcagcaggaagcccccagtcccagccctttgggactgttttaaccttatagacttgggcactggttcctggcggggctatcctctcctcccttggctcctccacaggctggctgtcggactgcgctcccagcctgggctctgggagtgggggctccagccctccccactatgcccaggagtcttcccaagttgatgcggtttgtagcttcctccctactctctccaacacctgcatgcaaagactactgggaggctgctgcctccttcctgcccatggcaccctcctctgctgtctgcctgggagccctaggctctctagggccccacttacaactgaccaaagtggccccctctgggggtccccaccacacaagtgtttgtaaactgggctgctataaggttggagttccagggctgggccctggtggagtccactggaagtcccattatggatgttgaaatggacagggaaggactctggaagtctcttcctcctcctcctcttctctccacccctagaccctggctgacttggacaatctgccaggacagaagctgggttttctgtctaggtcaccactcccaatcctggggattggagaggcctggggctgtgggatgccccatccccctccccatcacctttggtgggggcagggcctggtggcacctgtgcaataatgtctgtgtttctctcccacctgccactggaactggagaatgcactttattctgggcggggggtgagtgggggaagacccaaccctcctttctcgctgcccctaacgcatgcacggtctcgtgatgctccctccctctccggagtgacaggcacatacatgagaacaggccatctcagccctacacacttgccatcccctacagcacagaggaagagtgatggtggcatgctggtggtggcgggtgctggtgggaggacagtgccaacctcctcctggggatcccatgttggagactctaaggataaggctggtgctgcccagggtgtctacaggaactgcaggtgtctacccccaagtcttccctcctcccaagccaggggtggcacagggcactagatccctggagttcaggaaccaacacaagcacaaccacgggcataagttggccttggccactgccacccacggccctccttttgtgctccatgctggcatcttcactcccctaccccttccccagccactgctgctcattcaaacttctgtccatgtccctccactgttcctatcagcaggtggcccctgggcatcagaacagcctgccctgggcaccaggtggcagacacactcagagcatgtctggctttcctggtgggtccaggctcattctgcttctgatttcccctcccccagggctcattttccccctttttcctgtacacatccctgtctacctcctctcaccctgccacagattcttcctatcacacagggatgccagttgtatttgtgggatttcacccattattaataaaacctatatttatacag

SEQ ID NO: 3052 - DNA, 2458 bp, Homo sapiens
  source 1..2458: mol_type = unassigned DNA
aagggatggggagtgggacgcagccggaggcctgaagcctcctcctctccgccttcccctggtccgccctgcactcaccctgctaccccgacctcctagagcgggcagcctctgccggctgcctcttctcccccgccccctattccttcagtccccaggggctgctggcctgcggggtcggcggcgtgatggcggagaaggcgctggaggccgtgggctgtggactagggccgggggctgtggccatggccgtgacgctggaggacggggcggaaccccctgtgctgaccacgcacctgaagaaggtggagaaccacatcactgaagcccagcgcttctcccacctacccaagcgctcagccgtggacatcgagttcgtggagctgtcctattccgtgcgggaggggccctgctggcgcaaaaggggttataagacccttctcaagtgcctctcaggtaaattctgccgccgggagctgattggcatcatgggcccctcaggggctggcaagtctacattcatgaacatcttggcaggatacagggagtctggaatgaaggggcagatcctggttaatggaaggccacgggagctgaggaccttccgcaagatgtcctgctacatcatgcaagatgacatgctgctgccgcacctcacggtgttggaagccatgatggtctctgctaacctgaagctgagtgagaagcaggaggtgaagaaggagctggtgacagagatcctgacggcactgggcctgatgtcgtgctcccacacgaggacagccctgctctctggcgggcagaggaagcgtctggccatcgccctggagctggtcaacaacccgcctgtcatgttctttgatgagcccaccagtggtctggatagcgcctcttgtttccaagtggtgtccctcatgaagtccctggcacaggggggccgtaccatcatctgcaccatccaccagcccagtgccaagctctttgagatgtttgacaagctctacatcctgagccagggtcagtgcatcttcaaaggcgtggtcaccaacctgatcccctatctaaagggactcggcttgcattgccccacctaccacaacccggctgacttcatcatcgaggtggcctctggcgagtatggagacctgaaccccatgttgttcagggctgtgcagaatgggctgtgcgctatggctgagaagaagagcagccctgagaagaacgaggtccctgccccatgccctccttgtcctccggaagtggatcccattgaaagccacacctttgccaccagcaccctcacacagttctgcatcctcttcaagaggaccttcctgtccatcctcagggacacggtcctgacccacctacggttcatgtcccacgtggttattggcgtgctcatcggcctcctctacctgcatattggcgacgatgccagcaaggtcttcaacaacaccggctgcctcttcttctccatgctgttcctcatgttcgccgccctcatgccaactgtgctcaccttccccttagagatggcggtcttcatgagggagcacctcaactactggtacagcctcaaagcgtattacctggccaagaccatggctgacgtgccctttcaggtggtgtgtccggtggtctactgcagcattgtgtactggatgacgggccagcccgctgagaccagccgcttcctgctcttctcagccctggccaccgccaccgccttggtggcccaatctttggggctgctgatcggagctgcttccaactccctacaggtggccacttttgtgggcccagttaccgccatccctgtcctcttgttctccggcttctttgtcagcttcaagaccatccccacttacctgcaatggagctcctatctctcctatgtcaggtatggctttgagggtgtgatcctgacgatctatggcatggagcgaggagacctgacatgtttagaggaacgctgcccgttccgggagccacagagcatcctccgagcgctggatgtggaggatgccaagctctacatggacttcctggtcttgggcatcttcttcctagccctgcggctgctggcctaccttgtgctgcgttaccgggtcaagtcagagagatagaggcttgccccagcctgtaccccagccctgcagcaggaagcccccagtcccagccctttgggactgttttaaccttatagacttgggcactggttcctggcggggctatcctctcctcccttggctcctccacaggctggctgtcggactgcgctcccagcctgggctctgggagtgggggctccagccctccccactatgcccaggagtcttcccaagttgatgcggtttgtagcttcctccctactctctccaacacctgcatgcaaagactactgggaggctgctgcctccttcctgcccatggcaccctcctctgctgtctgcct

SEQ ID NO: 3053 - DNA, 2552 bp, Homo sapiens
  source 1..2552: mol_type = unassigned DNA
ggagctttgagccgggctcggtggtctgccccaaactgagcaggccctccccttgcaggtcggcggcgtgatggcggagaaggcgctggaggccgtgggctgtggactagggccgggggctgtggccatggccgtgacgctggaggacggggcggaaccccctgtgctgaccacgcacctgaagaaggtggagaaccacatcactgaagcccagcgcttctcccacctacccaagcgctcagccgtggacatcgagttcgtggagctgtcctattccgtgcgggaggggccctgctggcgcaaaaggggttataagacccttctcaagtgcctctcaggtaaattctgccgccgggagctgattggcatcatgggcccctcaggggctggcaagtctacattcatgaacatcttggcaggatacagggagtctggaatgaaggggcagatcctggttaatggaaggccacgggagctgaggaccttccgcaagatgtcctgctacatcatgcaagatgacatgctgctgccgcacctcacggtgttggaagccatgatggtctctgctaacctgaagctgagtgagaagcaggaggtgaagaaggagctggtgacagagatcctgacggcactgggcctgatgtcgtgctcccacacgaggacagccctgctctctggcgggcagaggaagcgtctggccatcgccctggagctggtcaacaacccgcctgtcatgttctttgatgagcccaccagtggtctggatagcgcctcttgtttccaagtggtgtccctcatgaagtccctggcacaggggggccgtaccatcatctgcaccatccaccagcccagtgccaagctctttgagatgtttgacaagctctacatcctgagccagggtcagtgcatcttcaaaggcgtggtcaccaacctgatcccctatctaaagggactcggcttgcattgccccacctaccacaacccggctgacttcatcatcgaggtggcctctggcgagtatggagacctgaaccccatgttgttcagggctgtgcagaatgggctgtgcgctatggctgagaagaagagcagccctgagaagaacgaggtccctgccccatgccctccttgtcctccggaagtggatcccattgaaagccacacctttgccaccagcaccctcacacagttctgcatcctcttcaagaggaccttcctgtccatcctcagggacacggtcctgacccacctacggttcatgtcccacgtggttattggcgtgctcatcggcctcctctacctgcatattggcgacgatgccagcaaggtcttcaacaacaccggctgcctcttcttctccatgctgttcctcatgttcgccgccctcatgccaactgtgctcaccttccccttagagatggcggtcttcatgagggagcacctcaactactggtacagcctcaaagcgtattacctggccaagaccatggctgacgtgccctttcaggtggtgtgtccggtggtctactgcagcattgtgtactggatgacgggccagcccgctgagaccagccgcttcctgctcttctcagccctggccaccgccaccgccttggtggcccaatctttggggctgctgatcggagctgcttccaactccctacaggtggccacttttgtgggcccagttaccgccatccctgtcctcttgttctccggcttctttgtcagcttcaagaccatccccacttacctgcaatggagctcctatctctcctatgtcaggtatggctttgagggtgtgatcctgacgatctatggcatggagcgaggagacctgacatgtttagaggaacgctgcccgttccgggagccacagagcatcctccgagcgctggatgtggaggatgccaagctctacatggacttcctggtcttgggcatcttcttcctagccctgcggctgctggcctaccttgtgctgcgttaccgggtcaagtcagagagatagaggcttgccccagcctgtaccccagccctgcagcaggaagcccccagtcccagccctttgggactgttttaaccttatagacttgggcactggttcctggcggggctatcctctcctcccttggctcctccacaggctggctgtcggactgcgctcccagcctgggctctgggagtgggggctccagccctccccactatgcccaggagtcttcccaagttgatgcggtttgtagcttcctccctactctctccaacacctgcatgcaaagactactgggaggctgctgcctccttcctgcccatggcaccctcctctgctgtctgcctgggagccctaggctctctagggccccacttacaactgaccaaagtggccccctctgggggtccccaccacacaagtgtttgtaaactgggctgctataaggttggagttccagggctgggccctggtggagtccactggaagtcccattatggatgttgaaatggacagggaaggactctggaagtctcttcctcctcctcctcttctctcc

SEQ ID NO: 3054 - DNA, 2740 bp, Homo sapiens
  source 1..2740: mol_type = unassigned DNA
aagtcccagtcctgctgtcccaagggactccggggtcaggtggagcaggcagggcagtctgccacgggctccccaactgaagccactctggggagggtccggccaccagaaaatttgcccagctttgctgcctgttggccatgggtgacctctcatctttgacccccggagggtccatgggtctccaagtaaacagaggctcccagagctccctggagggggctcctgccaccgccccggagcctcacagcctgggcatcctccatgcctcctacagcgtcagccaccgcgtgaggccctggtgggacatcacatcttgccggcagcagtggaccaggcagatcctcaaagatgtctccttgtacgtggagagcgggcagatcatgtgcatcctaggaagctcaggctccgggaaaaccacgctgctggacgccatgtccgggaggctggggcgcgcggggaccttcctgggggaggtgtatgtgaacggccgggcgctgcgccgggagcagttccaggactgcttctcctacgtcctgcagagcgacaccctgctgagcagcctcaccgtgcgcgagacgctgcactacaccgcgctgctggccatccgccgcggcaatcccggctccttccagaagaaggtggaggccgtcatggcagagctgagtctgagccatgtggcagaccgactgattggcaactacagcttggggggcatttccacgggtgagcggcgccgggtctccatcgcagcccagctgctccaggatcctaaggtcatgctgtttgatgagccaaccacaggcctggactgcatgactgctaatcagattgtcgtcctcctggtggaactggctcgcaggaaccgaattgtggttctcaccattcaccagccccgttctgagctttttcagctctttgacaaaattgccatcctgagcttcggagagctgattttctgtggcacgccagcggaaatgcttgatttcttcaatgactgcggttacccttgtcctgaacattcaaacccttttgacttctatatggacctgacgtcagtggatacccaaagcaaggaacgggaaatagaaacctccaagagagtccagatgatagaatctgcctacaagaaatcagcaatttgtcataaaactttgaagaatattgaaagaatgaaacacctgaaaacgttaccaatggttcctttcaaaaccaaagattctcctggagttttctctaaactgggtgttctcctgaggagagtgacaagaaacttggtgagaaataagctggcagtgattacgcgtctccttcagaatctgatcatgggtttgttcctccttttcttcgttctgcgggtccgaagcaatgtgctaaagggtgctatccaggaccgcgtaggtctcctttaccagtttgtgggcgccaccccgtacacaggcatgctgaacgctgtgaatctgtttcccgtgctgcgagctgtcagcgaccaggagagtcaggacggcctctaccagaagtggcagatgatgctggcctatgcactgcacgtcctccccttcagcgttgttgccaccatgattttcagcagtgtgtgctactggacgctgggcttacatcctgaggttgcccgatttggatatttttctgctgctctcttggccccccacttaattggtgaatttctaactcttgtgctacttggtatcgtccaaaatccaaatatagtcaacagtgtagtggctctgctgtccattgcgggggtgcttgttggatctggattcctcagaaacatacaagaaatgcccattccttttaaaatcatcagttattttacattccaaaaatattgcagtgagattcttgtagtcaatgagttctacggactgaatttcacttgtggcagctcaaatgtttctgtgacaactaatccaatgtgtgccttcactcaaggaattcaattcattgagaaaacctgcccaggtgcaacatctagattcacaatgaactttctgattttgtattcatttattccagctcttgtcatcctaggaatagttgttttcaaaataagggatcatctcattagcaggtagtgaaagccatggctgggaaaatggaagtgaagctgccgactgtgcatgactgctctgaacgtctgaaatgagagtgccatgtatttctttcttgacaggacatctcaagtcttttaaccattaagactccatttgtgcctcttggatccaagcaggccttgaatgcaatggaagtggtttatagtcccttgctcttacaacttgcagggacatgtggttatttggaaattgtgactgagcggacccaagaatgtaaataatattcataaacctatgggagactcgtgtgactattttttttccttgttctaggcacagaaaaaaataggtcagcttaaaaatatgtttacattggataaaggattaggcaaaaataaaatgtttcaaggattcctgaccataagtgacagagaaagagagttgtgggtttagatgaagcaaggttatcatgcagaattgggtaagaatgcttctgttcctggaagacccagagttaaatgcagatgtccacacgaggggtcggagttacctgatcacatcgagagagtgctgggcagatggatggtgagcaccactgctacagagcacccagtgattttactgaggattaaaataaaaaaccgtaggaatgggctcaacagtga

SEQ ID NO: 3055 - DNA, 2896 bp, Homo sapiens
  source 1..2896: mol_type = unassigned DNA
gctccccaactgaagccactctggggagggtccggccaccagaaaatttgcccagctttgctgcctgttggccatgggtgacctctcatctttgacccccggagggtccatgggtctccaagtaaacagaggctcccagagctccctggagggggctcctgccaccgccccggagcctcacagcctgggcatcctccatgcctcctacagcgtcaggtaaggcagagcccttgctgctgctgctcccccaggagtgcggggcccggcgctcacccctctgctgcctttcttcactctttaagtgccagtctgggcacttcgggctccctctttagtggatcgggtggagagaggagagggagaagggctgtgctgggaaacatggagcgacagtgaatggcccctccccctgcccagggaagggcctgggcataaacaaagtggcagcagtgccctgccaacccagtgtctacggcctgccctctgtggatgggaatgggggtactgcgaatgcaaggagtcttgaaacctggtgaaagaatgcagggacagccacctcgcagccaaacggacaggacattcagagcaactccagcacaggccccctccctacgtggcagacagcctcagtcgctatctgccaggttctacagaggagggcgcagagactgaaacacgttaggagcctgtccggagactactggggtggggcacaggtaggatcaatgctggggacctgggtgtggccccttccagggccccaagctgcctttgccttcctggggtttcctttaaagccaccgcgtgaggccctggtgggacatcacatcttgccggcagcagtggaccaggcagatcctcaaagatgtctccttgtacgtggagagcgggcagatcatgtgcatcctaggaagctcaggctccgggaaaaccacgctgctggacgccatgtccgggaggctggggcgcgcggggaccttcctgggggaggtgtatgtgaacggccgggcgctgcgccgggagcagttccaggactgcttctcctacgtcctgcagagcgacaccctgctgagcagcctcaccgtgcgcgagacgctgcactacaccgcgctgctggccatccgccgcggcaatcccggctccttccagaagaaggtggaggccgtcatggcagagctgagtctgagccatgtggcagaccgactgattggcaactacagcttggggggcatttccacgggtgagcggcgccgggtctccatcgcagcccagctgctccaggatcctatggacctgacgtcagtggatacccaaagcaaggaacgggaaatagaaacctccaagagagtccagatgatagaatctgcctacaagaaatcagcaatttgtcataaaactttgaagaatattgaaagaatgaaacacctgaaaacgttaccaatggttcctttcaaaaccaaagattctcctggagttttctctaaactgggtgttctcctgaggagagtgacaagaaacttggtgagaaataagctggcagtgattacgcgtctccttcagaatctgatcatgggtttgttcctccttttcttcgttctgcgggtccgaagcaatgtgctaaagggtgctatccaggaccgcgtaggtctcctttaccagtttgtgggcgccaccccgtacacaggcatgctgaacgctgtgaatctgtttcccgtgctgcgagctgtcagcgaccaggagagtcaggacggcctctaccagaagtggcagatgatgctggcctatgcactgcacgtcctccccttcagcgttgttgccaccatgattttcagcagtgtgtgctactggacgctgggcttacatcctgaggttgcccgatttggatatttttctgctgctctcttggccccccacttaattggtgaatttctaactcttgtgctacttggtatcgtccaaaatccaaatatagtcaacagtgtagtggctctgctgtccattgcgggggtgcttgttggatctggattcctcagaaacatacaagaaatgcccattccttttaaaatcatcagttattttacattccaaaaatattgcagtgagattcttgtagtcaatgagttctacggactgaatttcacttgtggcagctcaaatgtttctgtgacaactaatccaatgtgtgccttcactcaaggaattcaattcattgagaaaacctgcccaggtgcaacatctagattcacaatgaactttctgattttgtattcatttattccagctcttgtcatcctaggaatagttgttttcaaaataagggatcatctcattagcaggtagtgaaagccatggctgggaaaatggaagtgaagctgccgactgtgcatgactgctctgaacgtctgaaatgagagtgccatgtatttctttcttgacaggacatctcaagtcttttaaccattaagactccatttgtgcctcttggatccaagcaggccttgaatgcaatggaagtggtttatagtcccttgctcttacaacttgcagggacatgtggttatttggaaattgtgactgagcggacccaagaatgtaaataatattcataaacctatgggagactcgtgtgactattttttttccttgttctaggcacagaaaaaaataggtcagcttaaaaatatgtttacattggataaaggattaggcaaaaataaaatgtttcaaggattcctgaccataagtgacagagaaagagagttgtgggtttagatgaagcaaggttatcatgcagaattgggtaagaatgcttctgttcctggaagacccagagttaaatgcagatgtccacacgaggggtcggagttacctgatcacatcgagagagtgctgggca

SEQ ID NO: 3056 - DNA, 3033 bp, Homo sapiens
  source 1..3033: mol_type = unassigned DNA
tccccaactgaagccactctggggagggtccggccaccagaaaatttgcccagctttgctgcctgttggccatgggtgacctctcatctttgacccccggagggtccatgggtctccaagtaaacagaggctcccagagctccctggagggggctcctgccaccgccccggagcctcacagcctgggcatcctccatgcctcctacagcgtcaggtaaggcagagcccttgctgctgctgctcccccaggagtgcggggcccggcgctcacccctctgctgcctttcttcactctttaagtgccagtctgggcacttcgggctccctctttagtggatcgggtggagagaggagagggagaagggctgtgctgggaaacatggagcgacagtgaatggcccctccccctgcccagggaagggcctgggcataaacaaagtggcagcagtgccctgccaacccagtgtctacggcctgccctctgtggatgggaatgggggtactgcgaatgcaaggagtcttgaaacctggtgaaagaatgcagggacagccacctcgcagccaaacggacaggacattcagagcaactccagcacaggccccctccctacgtggcagacagcctcagtcgctatctgccaggttctacagaggagggcgcagagactgaaacacgttaggagcctgtccggagactactggggtggggcacaggtaggatcaatgctggggacctgggtgtggccccttccagggccccaagctgcctttgccttcctggggtttcctttaaagccaccgcgtgaggccctggtgggacatcacatcttgccggcagcagtggaccaggcagatcctcaaagatgtctccttgtacgtggagagcgggcagatcatgtgcatcctaggaagctcaggctccgggaaaaccacgctgctggacgccatgtccgggaggctggggcgcgcggggaccttcctgggggaggtgtatgtgaacggccgggcgctgcgccgggagcagttccaggactgcttctcctacgtcctgcagagcgacaccctgctgagcagcctcaccgtgcgcgagacgctgcactacaccgcgctgctggccatccgccgcggcaatcccggctccttccagaagaagagacagggtctctctttgttgcccaagctggtctcaaactcctggcctcaagcaattctccctcctcagccttccaaagtattgggattacaggcatgagccactgcacccagcctctggggacgttttaaaaaattcatattatttatttaaatctgacacatgtattacgatttaagccgaattggatcatattattatcaaagacatgctttccccagggtgtggtgagtctggaagtggcccttggattcttgggcggtgtgctgcctctttcatgtcctccccagcccatgaattgaaatagcagccacagagactcccagccttcctgtaatttgtgtctcctgcaggtggaggccgtcatggcagagctgagtctgagccatgtggcagaccgactgattggcaactacagcttggggggcatttccacgggtgagcggcgccgggtctccatcgcagcccagctgctccaggatcctagagagtgacaagaaacttggtgagaaataagctggcagtgattacgcgtctccttcagaatctgatcatgggtttgttcctccttttcttcgttctgcgggtccgaagcaatgtgctaaagggtgctatccaggaccgcgtaggtctcctttaccagtttgtgggcgccaccccgtacacaggcatgctgaacgctgtgaatctgtttcccgtgctgcgagctgtcagcgaccaggagagtcaggacggcctctaccagaagtggcagatgatgctggcctatgcactgcacgtcctccccttcagcgttgttgccaccatgattttcagcagtgtgtgctactggacgctgggcttacatcctgaggttgcccgatttggatatttttctgctgctctcttggccccccacttaattggtgaatttctaactcttgtgctacttggtatcgtccaaaatccaaatatagtcaacagtgtagtggctctgctgtccattgcgggggtgcttgttggatctggattcctcagaaacatacaagaaatgcccattccttttaaaatcatcagttattttacattccaaaaatattgcagtgagattcttgtagtcaatgagttctacggactgaatttcacttgtggcagctcaaatgtttctgtgacaactaatccaatgtgtgccttcactcaaggaattcaattcattgagaaaacctgcccaggtgcaacatctagattcacaatgaactttctgattttgtattcatttattccagctcttgtcatcctaggaatagttgttttcaaaataagggatcatctcattagcaggtagtgaaagccatggctgggaaaatggaagtgaagctgccgactgtgcatgactgctctgaacgtctgaaatgagagtgccatgtatttctttcttgacaggacatctcaagtcttttaaccattaagactccatttgtgcctcttggatccaagcaggccttgaatgcaatggaagtggtttatagtcccttgctcttacaacttgcagggacatgtggttatttggaaattgtgactgagcggacccaagaatgtaaataatattcataaacctatgggagactcgtgtgactattttttttccttgttctaggcacagaaaaaaataggtcagcttaaaaatatgtttacattggataaaggattaggcaaaaataaaatgtttcaaggattcctgaccataagtgacagagaaagagagttgtgggtttagatgaagcaaggttatcatgcagaattgggtaagaatgcttctgttcctggaagacccagagttaaatgcagatgtccacacgaggggtcggagttacctgatcacatcgagagagtgctgggca

SEQ ID NO: 3057 - DNA, 2665 bp, Homo sapiens
  source 1..2665: mol_type = unassigned DNA
ctccaggaaacagagtgaagacactggccctggcaggcagcagctgggtctaagagagctgcagcccagggtcacagacctgtgggccccatggccgggaaggcggcagaggagagagggctgccgaaaggggccactccccaggatacctcgggcctccaggatagattgttctcctctgaaagtgacaacagcctgtacttcacctacagtggccagcccaacaccctggaggtcagagacctcaactaccaggtggacctggcctctcaggtcccttggtttgagcagctggctcagttcaagatgccctggacatctcccagctgccagaattcttgtgagctgggcatccagaacctaagcttcaaagtgagaagtgggcagatgctggccatcatagggagctcaggttgtgggagagcctccttgctagatgtgatcactggccgaggtcacggcggcaagatcaagtcaggccagatctggatcaatgggcagcccagctcgcctcagctggtgaggaagtgtgtggcccacgtgcgccagcacaaccagctgctccccaacttgactgtgcgagagaccttggccttcattgcccagatgcggctgcccagaaccttctcccaggcccagcgtgacaaaagggtggaggacgtgatcgcggagctgcggcttaggcagtgcgctgacacccgcgtgggcaacatgtacgtgcgggggttgtcggggggtgagcgcaggagagtcagcattggggtgcagctcctgtggaacccaggaatccttattctcgacgaacccacctctgggctcgacagcttcacagcccacaacctggtgaagaccttgtccaggctggccaaaggcaaccggctggtgctcatctccctccaccagcctcgctctgacatcttcaggctgtttgatctggtcctcctgatgacgtctggcacccccatctacttaggggcggcccagcacatggtccagtatttcacagccatcggctacccctgtcctcgctacagcaatcctgctgacttctatgtggacctgaccagcattgacaggcgcagcagagagcaggaattggccaccagggagaaggctcagtcactcgcagccctgtttctagaaaaagtgcgtgacttagatgactttctatggaaagcagagacgaaggatcttgacgaggacacctgtgtggaaagcagcgtgaccccactagacaccaactgcctcccgagtcctacgaagatgcctggggcggtgcagcagtttacgacgctgatccgtcgtcagatttccaacgacttccgagacctgcccaccctcctcatccatggggcggaggcctgtctgatgtcaatgaccatcggcttcctctattttggccatgggagcatccagctctccttcatggatacagccgccctcttgttcatgatcggtgctctcatccctttcaacgtcattctggatgtcatctccaaatgttactcagagagggcaatgctttactatgaactggaagacgggctgtacaccactggtccatatttctttgccaagatcctcggggagcttccggagcactgtgcctacatcatcatctacgggatgcccacctactggctggccaacctgaggccaggcctccagcccttcctgctgcacttcctgctggtgtggctggtggtcttctgttgcaggattatggccctggccgccgcggccctgctccccaccttccacatggcctccttcttcagcaatgccctctacaactccttctacctcgccgggggcttcatgataaacttgagcagcctgtggacagtgcccgcgtggatttccaaagtgtccttcctgcggtggtgttttgaagggctgatgaagattcagttcagcagaagaacttataaaatgcctctcgggaacctcaccatcgcggtctcaggagataaaatcctcagtgtcatggagctggactcgtaccctctctacgccatctacctcatcgtcattggcctcagcggtggcttcatggtcctgtactacgtgtccttaaggttcatcaaacagaaaccaagtcaagactggtgattcacgccagacgtctgcccgctggtgggggacctgagcagacccttcaactgcactccctcctcaggagccccttcctggggacagtgaggacaatgaccctacagatgctcagctacatccggcccagggtgctgcagtggcacagaccagccacaggatggcagtagaataaagacagtcgaaagggatttctgctcactggcaggagactgcgatgactgggagaaaacctgcactcggtggcacctacaacgttgctaatttatttccttttgatatgcatttatataggcaactcgatataggatgggagcaaactaggaatgaattgggtagctagactgtgcaggaattgttggaacctggagggaacaataacagtagctagcagatttggcttcatcttccaggggccccacactccgtggtgagccaccatcaatacagaaagtgacctaagatgtaccagcaagatgccatcccttctttttgtgtggggtcatgggctccaaaagccaacgtgaacaattaaaaatgtattgagcatcta

SEQ ID NO: 3058 - DNA, 2590 bp, Homo sapiens
  source 1..2590: mol_type = unassigned DNA
gggcactcgcggcggaggcaagcggcggcgcgcggacggttggtccagttctccggcctggcggcaggcaagtctagctcggcgctgtcggatacttggggtgagcggaaagcatggcggggacctccgcgccaggcagcaagaggcggagcgagcccccggcgcctcgccccggcccgccgccgggcaccgggcaccccccgagcaagcgggcccggggcttctccgcagccgctgccccggaccctgacgacccgttcggcgcgcatggggacttcactgccgacgacctggaggagcttgacaccctcgcgtcacaggccctgagccaatgtccggccgcggctcgggacgtgtccagtgatcataaggtccacagattattagatggcatgtcaaaaaatccttcagggaaaaacagagaaactgttccaattaaagataatttcgaattagaggtacttcaggcacaatacaaagaacttaaagaaaagatgaaagtaatggaagaagaagttctcattaagaatggagaaattaaaattttgcgagactcactacatcagacggaatccgttctagaggaacagagaagatcacattttcttcttgagcaagagaaaacccaagcactcagtgacaaggaaaaggaattctccaaaaagctccaatcattgcagtctgaactccagtttaaagatgcagagatgaatgaattaaggacaaagctccagaccagtgaacgagcaaataaactggctgctccctctgtttcccatgtcagtcctaggaaaaacccttctgtggttataaagccagaagcatgttctccacaatttggaaaaacatcttttcctacaaaggagtcttttagtgctaacatgtcccttccccacccctgccagacggagtcaggatacaagcctctggtgggcagagaggatagtaagccccacagtctgagaggtgactccataaaacaagaagaggcccagaaaagctttgttgacagctggagacagagatcaaacactcaaggttccattttgataaacctgctcctgaagcagcctttgatcccagggtcatccctaagcctttgccacctcctgagtagtagttctgagtctcctgctggcacccccctgcagccaccagggtttggcagtaccttggctggaatgtcaggcctcaggaccacaggttcttatgatgggtcattttccctctcagccctgagagaagcacagaacctggcattcactggactgaatctggttgcccggaatgagtgctcacgtgatggagacccagcagagggaggcagaagggccttcccactctgccagcttcctggagccgtgcatttcctcccccttgtacagttcttcatcggcttacactgccaggccctgcaggacttggcagctgctaagagaagcggagcacctggggactcaccgacacattcctcctgcgtgagctctggggtagagaccaaccctgaggactcagtgtgcatcctggaaggcttctctgtgactgcacttagcattcttcagcacctggtgtgccacagcggagcagtcgtctccctattactgtcaggagtgggggcagattctgctgctggggaaggaaacaggagcctggttcacaggcttagtgatggagatatgacctcagccctaaggggggttgctgatgaccaaggacagcacccactgttgaagatgcttcttcacctgttggctttctcttctgcagcaacaggtcaccttcaagccagtgtcctgacccagtgccttaaggttttggtgaaattagccgaaaacacttcctgtgatttcttgcccaggttccagtgtgtgttccaagtgctgccaaagtgcctcagcccagagacacccctgcctagcgtgctgctggctgttgagctcctctccctgctggcggaccacgaccagctggcacctcagctctgttcccactcagaaggctgcctcctgctgctgctgtacatgtacatcacatcacggcctgacagagtggccttggagacacaatggctccagctggaacaagaggtggtgtggctcctggctaagcttggtgtgcagagccccttgcccccagtcactggctccaactgccagtgtaatgtggaggtggtcagagcgctcacggtgatgttgcacagacagtggctgacagtgcggagggcagggggacccccaaggaccgaccagcagaggcggacagtgcgctgtctgcgggacacggtgctgctgctgcacggcctatcgcagaaggacaagctcttcatgatgcactgcgtggaggtcctgcatcagtttgaccaggtgatgccgggggtcagcatgctcatccgagggcttcctgatgtgacggactgtgaagaggcagccctggatgacctctgtgccgcggaaaccgatgtggaagaccccgaggtggagtgtggctgaggccctgagtgtccagccacatggtggcaccagcaccactcctttccttaccacatcaactgattaaagcagtgaccagcaggaactgcccagagaactgg

SEQ ID NO: 3059 - DNA, 2509 bp, Homo sapiens
  source 1..2509: mol_type = unassigned DNA
gggcactcgcggcggaggcaagcggcggcgcgcggacggttggtccagttctccggcctggcggcaggcaagtctagctcggcgctgtcggatacttggggtgagcggaaagcatggcggggacctccgcgccaggcagcaagaggcggagcgagcccccggcgcctcgccccggcccgccgccgggcaccgggcaccccccgagcaagcgggcccggggcttctccgcagccgctgccccggaccctgacgacccgttcggcgcgcatggggacttcactgccgacgacctggaggagcttgacaccctcgcgtcacaggccctgagccaatgtccggccgcggctcgggacgtgtccagtgatcataaggtccacagattattagatggcatgtcaaaaaatccttcagggaaaaacagagaaactgttccaattaaagataatttcgaattagaggtacttcaggcacaatacaaagaacttaaagaaaagatgaaagtaatggaagaagaagttctcattaagaatggagaaattaaaattttgcgagactcactacatcagacggaatccgttctagaggaacagagaagatcacattttcttcttgagcaagagaaaacccaagcactcagtgacaaggaaaaggaattctccaaaaagctccaatcattgcagtctgaactccagtttaaagatgcagagatgaatgaattaaggacaaagctccagaccagtgaacgagcaaataaactggctgctccctctgtttcccatgtcagtcctaggaaaaacccttctgtggttataaagccagaagcatgttctccacaatttggaaaaacatcttttcctacaaaggagtcttttagtgctaacatgtcccttccccacccctgccagacggagtcaggatacaagcctctggtgggcagagaggatagtaagccccacagtctgagaggtgactccataaaacaagaagaggcccagaaaagctttgttgacagctggagacagagatcaaacactcaaggttccattttgataaacctgctcctgaagcagcctttgatcccagggtcatccctaagcctttgccacctcctgagtagtagttctgagtctcctgctggcacccccctgcagccaccagggtttggcagtaccttggctggaatgtcaggcctcaggaccacaggttcttatgatgggtcattttccctctcagccctgagagaagcacagaacctggcattcactggactgaatctggttgcccggaatgagtgctcacgtgatggagacccagcagagggaggcagaagggccttcccactctgccagcttcctggagccgtgcatttcctcccccttgtacagttcttcatcggcttacactgccaggccctgcaggacttggcagctgctaagagaagcggagcacctggggactcaccgacacattcctcctgcgtgagctctggggtagagaccaaccctgaggactcagtgtgcatcctggaaggcttctctgtgactgcacttagcattcttcagcacctggtgtgccacagcggagcagtcgtctccctattactgtcaggagtgggggcagattctgctgctggggaaggaaacaggagcctggttcacaggcttagtgatggagatatgacctcagccctaaggggggttgctgatgaccaaggacagcacccactgttgaagatgcttcttcacctgttggctttctcttctgcagcaacaggtcaccttcaagccagtgtcctgacccagtgccttaaggttttggtgaaattagccgaaaacacttcctgtgatttcttgcccaggttccagtgtgtgttccaagtgctgccaaagtgcctcagcccagagacacccctgcctagcgtgctgctggctgttgagctcctctccctgctggcggaccacgaccagctggcacctcagctctgttcccactcagaaggctgcctcctgctgctgctgtacatgtacatcacatcacggcctgacagagtggccttggagacacaatggctccagctggaacaagaggtggtcagagcgctcacggtgatgttgcacagacagtggctgacagtgcggagggcagggggacccccaaggaccgaccagcagaggcggacagtgcgctgtctgcgggacacggtgctgctgctgcacggcctatcgcagaaggacaagctcttcatgatgcactgcgtggaggtcctgcatcagtttgaccaggtgatgccgggggtcagcatgctcatccgagggcttcctgatgtgacggactgtgaagaggcagccctggatgacctctgtgccgcggaaaccgatgtggaagaccccgaggtggagtgtggctgaggccctgagtgtccagccacatggtggcaccagcaccactcctttccttaccacatcaactgattaaagcagtgaccagcaggaactgcccagagaactgg

SEQ ID NO: 3060 - DNA, 2376 bp, Homo sapiens
  source 1..2376: mol_type = unassigned DNA
actcgcggcggaggcaagcggcggcgcgcggacggttggtccagttctccggcctggcggcaggtgatcataaggtccacagattattagatggcatgtcaaaaaatccttcagggaaaaacagagaaactgttccaattaaagataatttcgaattagaggtacttcaggcacaatacaaagaacttaaagaaaagctttgcaagaaagcagacacttcatatcaccatctgtaggtccctaagaaaaccaggaatatgtggaattttagttgtgcaagatgaaagtaatggaagaagaagttctcattaagaatggagaaattaaaattttgcgagactcactacatcagacggaatccgttctagaggaacagagaagatcacattttcttcttgagcaagagaaaacccaagcactcagtgacaaggaaaaggaattctccaaaaagctccaatcattgcagtctgaactccagtttaaagatgcagagatgaatgaattaaggacaaagctccagaccagtgaacgagcaaataaactggctgctccctctgtttcccatgtcagtcctaggaaaaacccttctgtggttataaagccagaagcatgttctccacaatttggaaaaacatcttttcctacaaaggagtcttttagtgctaacatgtcccttccccacccctgccagacggagtcaggatacaagcctctggtgggcagagaggatagtaagccccacagtctgagaggtgactccataaaacaagaagaggcccagaaaagctttgttgacagctggagacagagatcaaacactcaaggttccattttgataaacctgctcctgaagcagcctttgatcccagggtcatccctaagcctttgccacctcctgagtagtagttctgagtctcctgctggcacccccctgcagccaccagggtttggcagtaccttggctggaatgtcaggcctcaggaccacaggttcttatgatgggtcattttccctctcagccctgagagaagcacagaacctggcattcactggactgaatctggttgcccggaatgagtgctcacgtgatggagacccagcagagggaggcagaagggccttcccactctgccagcttcctggagccgtgcatttcctcccccttgtacagttcttcatcggcttacactgccaggccctgcaggacttggcagctgctaagagaagcggagcacctggggactcaccgacacattcctcctgcgtgagctctggggtagagaccaaccctgaggactcagtgtgcatcctggaaggcttctctgtgactgcacttagcattcttcagcacctggtgtgccacagcggagcagtcgtctccctattactgtcaggagtgggggcagattctgctgctggggaaggaaacaggagcctggttcacaggcttagtgatggagatatgacctcagccctaaggggggttgctgatgaccaaggacagcacccactgttgaagatgcttcttcacctgttggctttctcttctgcagcaacaggtcaccttcaagccagtgtcctgacccagtgccttaaggttttggtgaaattagccgaaaacacttcctgtgatttcttgcccaggttccagtgtgtgttccaagtgctgccaaagtgcctcagcccagagacacccctgcctagcgtgctgctggctgttgagctcctctccctgctggcggaccacgaccagctggcacctcagctctgttcccactcagaaggctgcctcctgctgctgctgtacatgtacatcacatcacggcctgacagagtggccttggagacacaatggctccagctggaacaagaggtggtgtggctcctggctaagcttggtgtgcagagccccttgcccccagtcactggctccaactgccagtgtaatgtggaggtggtcagagcgctcacggtgatgttgcacagacagtggctgacagtgcggagggcagggggacccccaaggaccgaccagcagaggcggacagtgcgctgtctgcgggacacggtgctgctgctgcacggcctatcgcagaaggacaagctcttcatgatgcactgcgtggaggtcctgcatcagtttgaccaggtgatgccgggggtcagcatgctcatccgagggcttcctgatgtgacggactgtgaagaggcagccctggatgacctctgtgccgcggaaaccgatgtggaagaccccgaggtggagtgtggctgaggccctgagtgtccagccacatggtggcaccagcaccactcctttccttaccacatcaactgattaaagcagtgaccagcaggaactgcccagagaactgg

SEQ ID NO: 3061 - DNA, 2721 bp, Homo sapiens
  source 1..2721: mol_type = unassigned DNA
gtgagtgctcctcgcggccttttgctcggagggagttgtcaaccgcgccagatccccttgatggctgtggcttcggaacctcgcggccagcactgccttttcgcctttttaaaatatgggaacaccctgatttaagcagcggttgtcttccagaaggtcctttgattttagggggaaatgcattagccaggtcaaacagccgatttgaaacacagaaggctaagttgacattttacgttattttctaaagtttaggccacttggttcttggttctaagcagagatccttggaacacacctaccaccaccatcagaaccatcactacccatgcatggggacccattcttgtgacaagtttgagcggctttagatcttatgaagcccactgtctcccttgggcagtgtgagcatgggaggagccagacacaggtgatcataaggtccacagattattagatggcatgtcaaaaaatccttcagggaaaaacagagaaactgttccaattaaagataatttcgaattagaggtacttcaggcacaatacaaagaacttaaagaaaagatgaaagtaatggaagaagaagttctcattaagaatggagaaattaaaattttgcgagactcactacatcagacggaatccgttctagaggaacagagaagatcacattttcttcttgagcaagagaaaacccaagcactcagtgacaaggaaaaggaattctccaaaaagctccaatcattgcagtctgaactccagtttaaagatgcagagatgaatgaattaaggacaaagctccagaccagtgaacgagcaaataaactggctgctccctctgtttcccatgtcagtcctaggaaaaacccttctgtggttataaagccagaagcatgttctccacaatttggaaaaacatcttttcctacaaaggagtcttttagtgctaacatgtcccttccccacccctgccagacggagtcaggatacaagcctctggtgggcagagaggatagtaagccccacagtctgagaggtgactccataaaacaagaagaggcccagaaaagctttgttgacagctggagacagagatcaaacactcaaggttccattttgataaacctgctcctgaagcagcctttgatcccagggtcatccctaagcctttgccacctcctgagtagtagttctgagtctcctgctggcacccccctgcagccaccagggtttggcagtaccttggctggaatgtcaggcctcaggaccacaggttcttatgatgggtcattttccctctcagccctgagagaagcacagaacctggcattcactggactgaatctggttgcccggaatgagtgctcacgtgatggagacccagcagagggaggcagaagggccttcccactctgccagcttcctggagccgtgcatttcctcccccttgtacagttcttcatcggcttacactgccaggccctgcaggacttggcagctgctaagagaagcggagcacctggggactcaccgacacattcctcctgcgtgagctctggggtagagaccaaccctgaggactcagtgtgcatcctggaaggcttctctgtgactgcacttagcattcttcagcacctggtgtgccacagcggagcagtcgtctccctattactgtcaggagtgggggcagattctgctgctggggaaggaaacaggagcctggttcacaggcttagtgatggagatatgacctcagccctaaggggggttgctgatgaccaaggacagcacccactgttgaagatgcttcttcacctgttggctttctcttctgcagcaacaggtcaccttcaagccagtgtcctgacccagtgccttaaggttttggtgaaattagccgaaaacacttcctgtgatttcttgcccaggttccagtgtgtgttccaagtgctgccaaagtgcctcagcccagagacacccctgcctagcgtgctgctggctgttgagctcctctccctgctggcggaccacgaccagctggcacctcagctctgttcccactcagaaggctgcctcctgctgctgctgtacatgtacatcacatcacggcctgacagagtggccttggagacacaatggctccagctggaacaagaggtggtgtggctcctggctaagcttggtgtgcagagccccttgcccccagtcactggctccaactgccagtgtaatgtggaggtggtcagagcgctcacggtgatgttgcacagacagtggctgacagtgcggagggcagggggacccccaaggaccgaccagcagaggcggacagtgcgctgtctgcgggacacggtgctgctgctgcacggcctatcgcagaaggacaagctcttcatgatgcactgcgtggaggtcctgcatcagtttgaccaggtgatgccgggggtcagcatgctcatccgagggcttcctgatgtgacggactgtgaagaggcagccctggatgacctctgtgccgcggaaaccgatgtggaagaccccgaggtggagtgtggctgaggccctgagtgtccagccacatggtggcaccagcaccactcctttccttaccacatcaactgattaaagcagtgaccagcaggaactgcccagagaactggctggccttgtttcctgagtctgatctgtttggcggagtgggaggggtggagcaggacccgg

SEQ ID NO: 3062 - DNA, 711 bp, Homo sapiens
  source 1..711: mol_type = unassigned DNA
gattggcccctgggccaggggcggggcactcgcggcggaggcaagcggcggcgcgcggacggttggtccagttctccggcctggcggcaggtgatcataaggtccacagattattagatggcatgtcaaaaaatccttcagggaaaaacagagaaactgttccaattaaagataatttcgaattagaggtacttcaggcacaatacaaagaacttaaagaaaagatgaaagtaatggaagaagaagttctcattaagaatggagaaattaaaattttgcgagactcactacatcagacggaatccgttctagaggaacagagaagatcacattttcttcttgagcaagagaaaacccaagcactcagtgacaaggaaaaggaattctccaaaaagctccaatcattgcagtctgaactccagtttaaagatgcagagatgaatgaattaaggacaaagctccagaccagtgaacgagcaaataaactggctgctccctctgtttcccatgtcagtcctaggaaaaacccttctgtggttataaagccagaagcatgttctccacaatttggaaaaacatcttttcctacaaaggagtcttttagtgctaacatgtcccttccccacccctgccagacggagtcaggatacaagcctctggtgggcagagaggatagtaagccccacagtctgagaggtgactccataaaac

SEQ ID NO: 3063 - DNA, 2376 bp, Homo sapiens; identical to SEQ ID NO: 3060
  source 1..2376: mol_type = unassigned DNA

SEQ ID NO: 3064 - DNA, 2867 bp, Homo sapiens
  source 1..2867: mol_type = unassigned DNA
ggtttccttattcatcctctagtagtagctctgcagcagcctcctcttccagttcttcctcctcttcctctgcctccccccccaccacctcctccctatggccgcctcttagccaacagcaatgcccatccaggccccttccctccctctactggggcccagtccaccgcccacccaccagtctcaacacatcaccatcaccaccagcaacagcaacagcagcagcagcagcagcagcagcagcagcagcagcagcagcagcatcacggaaactctgggccccctcctcctggagcatttccccacccactggagggcggtagctcccaccacgcacacccttacgccatgtctccctccctggggtctctgaggccctacccaccagggccagcacacctgcccccacctcacagccaggtgtcctacagccaagcaggccccaatggccctccagtctcttcctcttccaactcttcctcttccacttctcaagggtcctacccatgttcacacccctccccttcccagggccctcaaggggcgccctaccctttcccaccggtgcctacggtcaccacctcttcggctaccctttccacggtcattgccaccgtggcttcctcgccagcaggctacaaaacggcctccccacctgggcccccaccgtacggaaagagagccccgtccccgggggcctacaagacagccaccccacccggatacaaacccgggtcgcctccctccttccgaacggggaccccaccgggctatcgaggaacctcgccacctgcaggcccagggaccttcaagccgggctcgcccaccgtgggacctgggcccctgccacctgcggggccctcaggcctgccatcgctgccaccaccacctgcggcccctgcctcagggccgcccctgagcgccacgcagatcaaacaggagccggctgaggagtatgagacccccgagagcccggtgcccccagcccgcagcccctcgccccctcccaaggtggtagatgtacccagccatgccagtcagtctgccaggttcaacaaacacctggatcgcggcttcaactcgtgcgcgcgcagcgacctgtacttcgtgccactggagggctccaagctggccaagaagcgggccgacctggtggagaaggtgcggcgcgaggccgagcagcgcgcgcgcgaagaaaaggagcgcgagcgcgagcgggaacgcgagaaagagcgcgagcgcgagaaggagcgcgagcttgaacgcagcgtgaagttggctcaggagggccgtgctccggtggaatgcccatctctgggcccagtgccccatcgccctccatttgaaccgggcagtgcggtggctacagtgcccccctacctgggtcctgacactccagccttgcgcactctcagtgaatatgcccggcctcatgtcatgtctcctggcaatcgcaaccatccattctacgtgcccctgggggcagtggacccggggctcctgggttacaatgtcccggccctgtacagcagtgatccagctgcccgggagagggaacgggaagcccgtgaacgagacctccgtgaccgcctcaagcctggctttgaggtgaagcctagtgagctggaacccctacatggggtccctgggccgggcttggatccctttccccgacatgggggcctggctctgcagcctggcccacctggcctgcaccctttcccctttcatccgagcctggggcccctggagcgagaacgtctagcgctggcagctgggccagccctgcggcctgacatgtcctatgctgagcggctggcagctgagaggcagcacgcagaaagggtggcggccctgggcaatgacccactggcccggctgcagatgctcaatgtgactccccatcaccaccagcactcccacatccactcgcacctgcacctgcaccagcaagatgctatccatgcagcctctgcctcggtgcaccctctcattgaccccctggcctcagggtctcaccttacccggatcccctacccagctggaactctccctaaccccctgcttcctcaccctctgcacgagaacgaagttcttcgtcaccagctctttgctgccccttaccgggacctgccggcctccctttctgccccgatgtcagcagctcatcagctgcaggccatgcacgcacagtcagctgagctgcagcgcttggcgctggaacagcagcagtggctgcatgcccatcacccgctgcacagtgtgccgctgcctgcccaggaggactactacagtcacctgaagaaggaaagcgacaagccactgtagaacctgcgatcaagagagcaccatggctcctacattggaccttggagcacccccaccctccccccaccgtgcccttggcctgccacccagagccaagagggtgctgctcagttgcagggcctccgcagctggacagagagtgggggagggagggacagacagaaggccaaggcccgatgtggtgtgcagaggtggggaggtggcgaggatggggacagaaagcgcacagaatcttggaccaggtctctcttccttgtcccccctgcttttctcctcccccatgcccaacccctgtggccgccgcccctcccctgccccgttggtgtgattatttcatctgttagatgtggctgttttgcgtagcatcgtgtgccacccctgcccctccccgatccctgtgtgcgcgccccctctgcaatgtatgccccttgccccttccccacactaataatttatatatataaatatctatatgacgctcttaaaaaaacatcccaaccaaaaccaaccaaacaaaaacatcctcacaactccccagg

SEQ ID NO: 3065 - DNA, 4293 bp, Homo sapiens
  source 1..4293: mol_type = unassigned DNA
gacgccatactggacgccaagtgggaggaacttcaaggctgtcccctgcgggcctcccgctctgcttctgcgaaggtttcattgaaaacagatcctgcaaaagttccaggtgcccacactggaaacttggagatcctgcttcccagaccacagctgtggggaacttggggtggagcagagaagtttctgtattcagctgcccaggcagaggagaatggggtctccacagcctgaagaatgaagacacgacagaataaagactcgatgtcaatgaggagtggacggaagaaagaggcccctgggccccgggaagaactgagatcgaggggccgggcctcccctggaggggtcagcacgtccagcagtgatggcaaagctgagaagtccaggcagacagccaagaaggcccgagtagaggaagcctccaccccaaaggtcaacaagcagggtcggagtgaggagatctcagagagtgaaagtgaggagaccaatgcaccaaaaaagaccaaaactgagcaggaactccctcggccacagtctccctccgatctggatagcttggacgggcggagccttaatgatgatggcagcagcgaccctagggatatcgaccaggacaaccgaagcacgtcccccagtatctacagccctggaagtgtggagaatgactctgactcatcttctggcctgtcccagggcccagcccgcccctaccacccacctccactctttcctccttcccctcaaccgccagacagcacccctcgacagccagaggctagctttgaaccccatccttctgtgacacccactggatatcatgctcccatggagccccccacatctcgaatgttccaggctcctcctggggcccctccccctcacccacagctctatcctgggggcactggtggagttttgtctggacccccaatgggtcccaaggggggaggggctgcctcatcagtggggggccctaatgggggtaagcagcaccccccacccactactcccatttcagtatcaagctctggggctagtggtgctcccccaacaaagccgcctaccactccagtgggtggtgggaacctaccttctgctccaccaccagccaacttcccccatgtgacaccgaacctgcctcccccacctgccctgagacccctcaacaatgcatcagcctctccccctggcctgggggcccaaccactacctggtcatctgccctctccccacgccatgggacagggtatgggtggacttcctcctggcccagagaagggcccaactctggctccttcaccccactctctgcctcctgcttcctcttctgctccagcgccccccatgaggtttccttattcatcctctagtagtagctctgcagcagcctcctcttccagttcttcctcctcttcctctgcctcccccttcccagcttcccaggcattgcccagctacccccactctttccctcccccaacaagcctctctgtctccaatcagccccccaagtatactcagccttctctcccatcccaggctgtgtggagccagggtcccccaccacctcctccctatggccgcctcttagccaacagcaatgcccatccaggccccttccctccctctactggggcccagtccaccgcccacccaccagtctcaacacatcaccatcaccaccagcaacagcaacagcagcagcagcagcagcagcagcagcagcagcagcagcagcagcatcacggaaactctgggccccctcctcctggagcatttccccacccactggagggcggtagctcccaccacgcacacccttacgccatgtctccctccctggggtctctgaggccctacccaccagggccagcacacctgcccccacctcacagccaggtgtcctacagccaagcaggccccaatggccctccagtctcttcctcttccaactcttcctcttccacttctcaagggtcctacccatgttcacacccctccccttcccagggccctcaaggggcgccctaccctttcccaccggtgcctacggtcaccacctcttcggctaccctttccacggtcattgccaccgtggcttcctcgccagcaggctacaaaacggcctccccacctgggcccccaccgtacggaaagagagccccgtccccgggggcctacaagacagccaccccacccggatacaaacccgggtcgcctccctccttccgaacggggaccccaccgggctatcgaggaacctcgccacctgcaggcccagggaccttcaagccgggctcgcccaccgtgggacctgggcccctgccacctgcggggccctcaggcctgccatcgctgccaccaccacctgcggcccctgcctcagggccgcccctgagcgccacgcagatcaaacaggagccggctgaggagtatgagacccccgagagcccggtgcccccagcccgcagcccctcgccccctcccaaggtggtagatgtacccagccatgccagtcagtctgccaggttcaacaaacacctggatcgcggcttcaactcgtgcgcgcgcagcgacctgtacttcgtgccactggagggctccaagctggccaagaagcgggccgacctggtggagaaggtgcggcgcgaggccgagcagcgcgcgcgcgaagaaaaggagcgcgagcgcgagcgggaacgcgagaaagagcgcgagcgcgagaaggagcgcgagcttgaacgcagcgtgaagttggctcaggagggccgtgctccggtggaatgcccatctctgggcccagtgccccatcgccctccatttgaaccgggcagtgcggtggctacagtgcccccctacctgggtcctgacactccagccttgcgcactctcagtgaatatgcccggcctcatgtcatgtctcctggcaatcgcaaccatccattctacgtgcccctgggggcagtggacccggggctcctgggttacaatgtcccggccctgtacagcagtgatccagctgcccgggagagggaacgggaagcccgtgaacgagacctccgtgaccgcctcaagcctggctttgaggtgaagcctagtgagctggaacccctacatggggtccctgggccgggcttggatccctttccccgacatgggggcctggctctgcagcctggcccacctggcctgcaccctttcccctttcatccgagcctggggcccctggagcgagaacgtctagcgctggcagctgggccagccctgcggcctgacatgtcctatgctgagcggctggcagctgagaggcagcacgcagaaagggtggcggccctgggcaatgacccactggcccggctgcagatgctcaatgtgactccccatcaccaccagcactcccacatccactcgcacctgcacctgcaccagcaagatgctatccatgcagcctctgcctcggtgcaccctctcattgaccccctggcctcagggtctcaccttacccggatcccctacccagctggaactctccctaaccccctgcttcctcaccctctgcacgagaacgaagttcttcgtcaccagctctttgctgccccttaccgggacctgccggcctccctttctgccccgatgtcagcagctcatcagctgcaggccatgcacgcacagtcagctgagctgcagcgcttggcgctggaacagcagcagtggctgcatgcccatcacccgctgcacagtgtgccgctgcctgcccaggaggactactacagtcacctgaagaaggaaagcgacaagccactgtagaacctgcgatcaagagagcaccatggctcctacattggaccttggagcacccccaccctccccccaccgtgcccttggcctgccacccagagccaagagggtgctgctcagttgcagggcctccgcagctggacagagagtgggggagggagggacagacagaaggccaaggcccgatgtggtgtgcagaggtggggaggtggcgaggatggggacagaaagcgcacagaatcttggaccaggtctctcttccttgtcccccctgcttttctcctcccccatgcccaacccctgtggccgccgcccctcccctgccccgttggtgtgattatttcatctgttagatgtggctgttttgcgtagcatcgtgtgccacccctgcccctccccgatccctgtgtgcgcgccccctctgcaatgtatgccccttgccccttccccacactaataatttatatatataaatatctatatgacgctctt

SEQ ID NO: 3066 - DNA, 4290 bp, Homo sapiens
  source 1..4290: mol_type = unassigned DNA
ccgccgccccccagaggcgccggagcccggaatcccgctcggagccagccagccgtcccgagctaccagcaggtttcattgaaaacagatcctgcaaaagttccaggtgcccacactggaaacttggagatcctgcttcccagaccacagctgtggggaacttggggtggagcagagaagtttctgtattcagctgcccaggcagaggagaatggggtctccacagcctgaagaatgaagacacgacagaataaagactcgatgtcaatgaggagtggacggaagaaagaggcccctgggccccgggaagaactgagatcgaggggccgggcctcccctggaggggtcagcacgtccagcagtgatggcaaagctgagaagtccaggcagacagccaagaaggcccgagtagaggaagcctccaccccaaaggtcaacaagcagggtcggagtgaggagatctcagagagtgaaagtgaggagaccaatgcaccaaaaaagaccaaaactgagcaggaactccctcggccacagtctccctccgatctggatagcttggacgggcggagccttaatgatgatggcagcagcgaccctagggatatcgaccaggacaaccgaagcacgtcccccagtatctacagccctggaagtgtggagaatgactctgactcatcttctggcctgtcccagggcccagcccgcccctaccacccacctccactctttcctccttcccctcaaccgccagacagcacccctcgacagccagaggctagctttgaaccccatccttctgtgacacccactggatatcatgctcccatggagccccccacatctcgaatgttccaggctcctcctggggcccctccccctcacccacagctctatcctgggggcactggtggagttttgtctggacccccaatgggtcccaaggggggaggggctgcctcatcagtggggggccctaatgggggtaagcagcaccccccacccactactcccatttcagtatcaagctctggggctagtggtgctcccccaacaaagccgcctaccactccagtgggtggtgggaacctaccttctgctccaccaccagccaacttcccccatgtgacaccgaacctgcctcccccacctgccctgagacccctcaacaatgcatcagcctctccccctggcctgggggcccaaccactacctggtcatctgccctctccccacgccatgggacagggtatgggtggacttcctcctggcccagagaagggcccaactctggctccttcaccccactctctgcctcctgcttcctcttctgctccagcgccccccatgaggtttccttattcatcctctagtagtagctctgcagcagcctcctcttccagttcttcctcctcttcctctgcctcccccttcccagcttcccaggcattgcccagctacccccactctttccctcccccaacaagcctctctgtctccaatcagccccccaagtatactcagccttctctcccatcccaggctgtgtggagccagggtcccccaccacctcctccctatggccgcctcttagccaacagcaatgcccatccaggccccttccctccctctactggggcccagtccaccgcccacccaccagtctcaacacatcaccatcaccaccagcaacagcaacagcagcagcagcagcagcagcagcagcagcagcagcagcagcagcatcacggaaactctgggccccctcctcctggagcatttccccacccactggagggcggtagctcccaccacgcacacccttacgccatgtctccctccctggggtctctgaggccctacccaccagggccagcacacctgcccccacctcacagccaggtgtcctacagccaagcaggccccaatggccctccagtctcttcctcttccaactcttcctcttccacttctcaagggtcctacccatgttcacacccctccccttcccagggccctcaaggggcgccctaccctttcccaccggtgcctacggtcaccacctcttcggctaccctttccacggtcattgccaccgtggcttcctcgccagcaggctacaaaacggcctccccacctgggcccccaccgtacggaaagagagccccgtccccgggggcctacaagacagccaccccacccggatacaaacccgggtcgcctccctccttccgaacggggaccccaccgggctatcgaggaacctcgccacctgcaggcccagggaccttcaagccgggctcgcccaccgtgggacctgggcccctgccacctgcggggccctcaggcctgccatcgctgccaccaccacctgcggcccctgcctcagggccgcccctgagcgccacgcagatcaaacaggagccggctgaggagtatgagacccccgagagcccggtgcccccagcccgcagcccctcgccccctcccaaggtggtagatgtacccagccatgccagtcagtctgccaggttcaacaaacacctggatcgcggcttcaactcgtgcgcgcgcagcgacctgtacttcgtgccactggagggctccaagctggccaagaagcgggccgacctggtggagaaggtgcggcgcgaggccgagcagcgcgcgcgcgaagaaaaggagcgcgagcgcgagcgggaacgcgagaaagagcgcgagcgcgagaaggagcgcgagcttgaacgcagcgtgaagttggctcaggagggccgtgctccggtggaatgcccatctctgggcccagtgccccatcgccctccatttgaaccgggcagtgcggtggctacagtgcccccctacctgggtcctgacactccagccttgcgcactctcagtgaatatgcccggcctcatgtcatgtctcctggcaatcgcaaccatccattctacgtgcccctgggggcagtggacccggggctcctgggttacaatgtcccggccctgtacagcagtgatccagctgcccgggagagggaacgggaagcccgtgaacgagacctccgtgaccgcctcaagcctggctttgaggtgaagcctagtgagctggaacccctacatggggtccctgggccgggcttggatccctttccccgacatgggggcctggctctgcagcctggcccacctggcctgcaccctttcccctttcatccgagcctggggcccctggagcgagaacgtctagcgctggcagctgggccagccctgcggcctgacatgtcctatgctgagcggctggcagctgagaggcagcacgcagaaagggtggcggccctgggcaatgacccactggcccggctgcagatgctcaatgtgactccccatcaccaccagcactcccacatccactcgcacctgcacctgcaccagcaagatgctatccatgcagcctctgcctcggtgcaccctctcattgaccccctggcctcagggtctcaccttacccggatcccctacccagctggaactctccctaaccccctgcttcctcaccctctgcacgagaacgaagttcttcgtcaccagctctttgctgccccttaccgggacctgccggcctccctttctgccccgatgtcagcagctcatcagctgcaggccatgcacgcacagtcagctgagctgcagcgcttggcgctggaacagcagcagtggctgcatgcccatcacccgctgcacagtgtgccgctgcctgcccaggaggactactacagtcacctgaagaaggaaagcgacaagccactgtagaacctgcgatcaagagagcaccatggctcctacattggaccttggagcacccccaccctccccccaccgtgcccttggcctgccacccagagccaagagggtgctgctcagttgcagggcctccgcagctggacagagagtgggggagggagggacagacagaaggccaaggcccgatgtggtgtgcagaggtggggaggtggcgaggatggggacagaaagcgcacagaatcttggaccaggtctctcttccttgtcccccctgcttttctcctcccccatgcccaacccctgtggccgccgcccctcccctgccccgttggtgtgattatttcatctgttagatgtggctgttttgcgtagcatcgtgtgccacccctgcccctccccgatccctgtgtgcgcgccccctctgcaatgtatgccccttgccccttccccacactaataatttatatatataaatatctatatgacgctctt

SEQ ID NO: 3067 - DNA, 4279 bp, Homo sapiens
  source 1..4279: mol_type = unassigned DNA
caggtttcattgaaaacagatcctgcaaaagttccaggtgcccacactggaaacttggagatcctgcttcccagaccacagctgtggggaacttggggtggagcagagaagtttctgtattcagctgcccaggcagaggagaatggggtctccacagcctgaagaatgaagacacgacagaataaagactcgatgtcaatgaggagtggacggaagaaagaggcccctgggccccgggaagaactgagatcgaggggccgggcctcccctggaggggtcagcacgtccagcagtgatggcaaagctgagaagtccaggcagacagccaagaaggcccgagtagaggaagcctccaccccaaaggtcaacaagcagggtcggagtgaggagatctcagagagtgaaagtgaggagaccaatgcaccaaaaaagaccaaaactgagcaggaactccctcggccacagtctccctccgatctggatagcttggacgggcggagccttaatgatgatggcagcagcgaccctagggatatcgaccaggacaaccgaagcacgtcccccagtatctacagccctggaagtgtggagaatgactctgactcatcttctggcctgtcccagggcccagcccgcccctaccacccacctccactctttcctccttcccctcaaccgccagacagcacccctcgacagccagaggctagctttgaaccccatccttctgtgacacccactggatatcatgctcccatggagccccccacatctcgaatgttccaggctcctcctggggcccctccccctcacccacagctctatcctgggggcactggtggagttttgtctggacccccaatgggtcccaaggggggaggggctgcctcatcagtggggggccctaatgggggtaagcagcaccccccacccactactcccatttcagtatcaagctctggggctagtggtgctcccccaacaaagccgcctaccactccagtgggtggtgggaacctaccttctgctccaccaccagccaacttcccccatgtgacaccgaacctgcctcccccacctgccctgagacccctcaacaatgcatcagcctctccccctggcctgggggcccaaccactacctggtcatctgccctctccccacgccatgggacagggtatgggtggacttcctcctggcccagagaagggcccaactctggctccttcaccccactctctgcctcctgcttcctcttctgctccagcgccccccatgaggtttccttattcatcctctagtagtagctctgcagcagcctcctcttccagttcttcctcctcttcctctgcctcccccttcccagcttcccaggcattgcccagctacccccactctttccctcccccaacaagcctctctgtctccaatcagccccccaagtatactcagccttctctcccatcccaggctgtgtggagccagggtcccccaccacctcctccctatggccgcctcttagccaacagcaatgcccatccaggccccttccctccctctactggggcccagtccaccgcccacccaccagtctcaacacatcaccatcaccaccagcaacagcaacagcagcagcagcagcagcagcagcagcagcagcagcagcagcagcatcacggaaactctgggccccctcctcctggagcatttccccacccactggagggcggtagctcccaccacgcacacccttacgccatgtctccctccctggggtctctgaggccctacccaccagggccagcacacctgcccccacctcacagccaggtgtcctacagccaagcaggccccaatggccctccagtctcttcctcttccaactcttcctcttccacttctcaagggtcctacccatgttcacacccctccccttcccagggccctcaaggggcgccctaccctttcccaccggtgcctacggtcaccacctcttcggctaccctttccacggtcattgccaccgtggcttcctcgccagcaggctacaaaacggcctccccacctgggcccccaccgtacggaaagagagccccgtccccgggggcctacaagacagccaccccacccggatacaaacccgggtcgcctccctccttccgaacggggaccccaccgggctatcgaggaacctcgccacctgcaggcccagggaccttcaagccgggctcgcccaccgtgggacctgggcccctgccacctgcggggccctcaggcctgccatcgctgccaccaccacctgcggcccctgcctcagggccgcccctgagcgccacgcagatcaaacaggagccggctgaggagtatgagacccccgagagcccggtgcccccagcccgcagcccctcgccccctcccaaggtggtagatgtacccagccatgccagtcagtctgccaggttcaacaaacacctggatcgcggcttcaactcgtgcgcgcgcagcgacctgtacttcgtgccactggagggctccaagctggccaagaagcgggccgacctggtggagaaggtgcggcgcgaggccgagcagcgcgcgcgcgaagaaaaggagcgcgagcgcgagcgggaacgcgagaaagagcgcgagcgcgagaaggagcgcgagcttgaacgcagcgtgaagttggctcaggagggccgtgctccggtggaatgcccatctctgggcccagtgccccatcgccctccatttgaaccgggcagtgcggtggctacagtgcccccctacctgggtcctgacactccagccttgcgcactctcagtgaatatgcccggcctcatgtcatgtctcctggcaatcgcaaccatccattctacgtgcccctgggggcagtggacccggggctcctgggttacaatgtcccggccctgtacagcagtgatccagctgcccgggagagggaacgggaagcccgtgaacgagacctccgtgaccgcctcaagcctggctttgaggtgaagcctagtgagctggaacccctacatggggtccctgggccgggcttggatccctttccccgacatgggggcctggctctgcagcctggcccacctggcctgcaccctttcccctttcatccgagcctggggcccctggagcgagaacgtctagcgctggcagctgggccagccctgcggcctgacatgtcctatgctgagcggctggcagctgagaggcagcacgcagaaagggtggcggccctgggcaatgacccactggcccggctgcagatgctcaatgtgactccccatcaccaccagcactcccacatccactcgcacctgcacctgcaccagcaagatgctatccatgcagcctctgcctcggtgcaccctctcattgaccccctggcctcagggtctcaccttacccggatcccctacccagctggaactctccctaaccccctgcttcctcaccctctgcacgagaacgaagttcttcgtcaccagctctttgctgccccttaccgggacctgccggcctccctttctgccccgatgtcagcagctcatcagctgcaggccatgcacgcacagtcagctgagctgcagcgcttggcgctggaacagcagcagtggctgcatgcccatcacccgctgcacagtgtgccgctgcctgcccaggaggactactacagtcacctgaagaaggaaagcgacaagccactgtagaacctgcgatcaagagagcaccatggctcctacattggaccttggagcacccccaccctccccccaccgtgcccttggcctgccacccagagccaagagggtgctgctcagttgcagggcctccgcagctggacagagagtgggggagggagggacagacagaaggccaaggcccgatgtggtgtgcagaggtggggaggtggcgaggatggggacagaaagcgcacagaatcttggaccaggtctctcttccttgtcccccctgcttttctcctcccccatgcccaacccctgtggccgccgcccctcccctgccccgttggtgtgattatttcatctgttagatgtggctgttttgcgtagcatcgtgtgccacccctgcccctccccgatccctgtgtgcgcgccccctctgcaatgtatgccccttgccccttccccacactaataatttatatatataaatatctatatgacgctcttaaaaaaacatcccaaccaaaaccaaccaaacaaaaacatcctcacaactccccaggaa

SEQ ID NO: 3068 - DNA, 1330 bp, Homo sapiens
  source 1..1330: mol_type = unassigned DNA
tgactctaatgcctatatcatctcttttccatatggacaatgtctagagtggcaaactgccacctgctcccctcaaaattgttctggattgagaacctgtggacagtgtttggaacagcctggatgtggctggtgcaatgatcctagtaatacaggaagaggacattgcattgaaggttcttcacggggaccaatgaagcttattggaatgcaccacagtgagatggttcttgacaccaatctttgccccaaagaaaagaactatgagtggtcctttatccagtgtccagcttgtacatgcagtggccatgcaaatatctgtcatctgcacacaggaaaatgtttctgcacaactaaaggaataaaaggtgaccaatgccaattatgtgactctgaaaatcgctatgttggtaatccacttagaggaacatgttattattgcattctcacaacacaatacaatcatggaccttgtgcagttttttgtcaccttcttcagttgtttcctatccttattgctggtggctgctgtggtatggaagatcaaacaaacttgttgggcttctcgacggagagagcaactgcttcgagaacgacagcagatggccagccgtccctttgcttctgttgatgtagctctggaagtgggagctgaacaaacagagtttctgcgagggccattagagggggcacccaagccaattgccattgaaccatgtgctgggaacagagctgctgttctgactgtgtttctttgtctaccacgaggatcatcaggtgcccctccccctgggcagtcaggccttgcaattgccagtgccctaatagatatttcacaacagaaagcttcagatagtaaagataagacttctggagtccggaatcgaaaacacctttcaacacgtcaaggaacttgtgtctgagaaatggaaaccgctcctgtatattctgtactgttttacttcgggcttctgttaaagctgttctatggccttggattttatggaggcagatctctgtatcatccagagcctgagtacagtttccttccaaatggacaatgacccaggtggccaaagaatgttcatgagttttataaaagtattgatggtcacaggtgataaagtcagtttttaccactatcttaggcttattatagctaacattaaattactctggaaaaagatgtatattgtttcttaatgaagatgaaaaatatgtaattcatataaatcaactgtttatatcccaagacttgaaagaaagacattttttaatgcctgaatgatgagaattgtacagtttttgcctcataagcaaacttgaatca

SEQ ID NO: 3069 - DNA, 8479 bp, Homo sapiens
  source 1..8479: mol_type = unassigned DNA
ggacgggcgccggtgaggaggaggagaagcggcggcggagaggttttctgcggccggaattcccttcaacagcatccctgtcggcgcccgcgagcgcagtctcgccgggcaggggcgccggggaagatggagactgggggccgggcccgcactggtaccccgcagccagcggccccgggggtgtggagggctcggccggcgggcggcggcggcgggggcgcctcctcctggctgctggacgggaacagctggctgctgtgctatggcttcctctacctggcgctctacgcgcaggtgtcccagtccaagccgtgcgagaggaccggctcctgcttctcgggccgctgtgtcaactccacctgcctctgcgacccgggctgggtgggggaccagtgccagcactgccagggcaggttcaagttaacagaaccttctggatatttaacagatggcccaattaactataaatataaaactaaatgtacttggctcattgaaggctatccaaatgcagtgttaagattaagattcaatcattttgctacagaatgtagctgggatcatatgtatgtttatgatggagattcaatatatgcacctttaatagctgtacttagtggtttgatagtccctgaaataaggggcaatgaaactgtgcctgaagttgttactacatctggctatgcactgttacatttttttagtgatgctgcgtataatctaactggtttcaacattttctattcaatcaattcttgtcctaacaattgctctggtcatgggaagtgtacaactagtgtctctgttccaagtcaagtatattgtgaatgtgataaatactggaagggtgaagcttgtgatattccttactgtaaagccaattgcggcagtccagatcacggttactgtgacctgactggagaaaaattatgtgtctgcaatgatagttggcaaggtcctgattgttctttgaatgttccctctactgagtcttactggattctgccaaacgttaaacccttcagtccttctgtaggtcgggcttcacataaagcagttttacacgggaaatttatgtgggtgattggtggatatacttttaactacagttcttttcaaatggtcctaaattacaatttagaaagcagtatatggaatgtaggaactccatcaaggggacctctccagagatatggacactctcttgctttatatcaggaaaacatctttatgtatggaggcagaattgaaacaaatgatggcaatgtcacagatgaattatgggtttttaacatacatagtcagtcatggagtacaaaaactcctactgttcttggacatggtcagcagtatgctgtggagggacattcagcacatattatggagttggatagtagagatgttgtcatgatcataatatttggatattctgcaatatatggttatacaagcagcatacaggaataccatatctcatcaaacacttggcttgttccagaaactaaaggagctattgtacaaggtggatatggccatactagtgtgtatgatgaaataacaaagtccatttatgttcatggagggtataaagcattgccagggaacaaatatggattggttgatgatctttataaatatgaagttaacactaagacttggactattttgaaagaaagtgggtttgccagataccttcattcagctgttcttatcaatggagctatgcttatttttggaggaaatacccataatgacacttccttgagtaacggtgcaaaatgtttttctgccgatttcctggcatatgacatagcttgtgatgaatggaaaatactaccaaaaccaaatcttcatagagatgtcaacagatttggacactctgcagtagtcattaacgggtccatgtatatatttgggggattttctagtgtactccttaatgatatccttgtatacaagcctccaaattgcaaggctttcagagatgaagaactttgtaaaaatgctggtccagggataaaatgtgtttggaataaaaatcactgtgaatcttgggaatctgggaatactaataatattcttagagcaaagtgccctcctaaaacagctgcttctgatgacagatgttacagatatgcagattgtgccagctgtactgccaatacaaatgggtgccaatggtgtgatgacaagaaatgcatttcggcaaatagtaactgcagtatgtctgtcaagaactacaccaaatgtcatgtgagaaatgagcagatttgtaacaaacttaccagctgtaaaagctgttcactaaacttgaattgccagtgggatcagagacagcaagaatgccaggctttaccagctcatctttgtggagaaggatggagtcatattggggatgcttgtcttagagtcaattccagtagagaaaactatgacaatgcaaaactttattgctataatcttagtggaaatcttgcttcattaacaacctcaaaagaagtagaatttgttctggatgaaatacagaagtatacacaacagaaagtatcaccttgggtaggcttgcgcaagatcaatatatcctattggggatgggaagacatgtctccttttacaaacacaacactacagtggcttcctggcgaacccaatgattctgggttttgtgcatatctggaaagggctgcagtggcaggcttaaaagctaatccttgtacatctatggcaaatggccttgtctgtgaaaaacctgttgttagtccaaatcaaaatgcgaggccgtgcaaaaagccatgctctctgaggacatcatgttccaactgtacaagcaatggcatggagtgtatgtggtgcagcagtacgaaacgatgtgttgactctaatgcctatatcatctcttttccatatggacaatgtctagagtggcaaactgccacctgctcccctcaaaattgttctggattgagaacctgtggacagtgtttggaacagcctggatgtggctggtgcaatgatcctagtaatacaggaagaggacattgcattgaaggttcttcacggggaccaatgaagcttattggaatgcaccacagtgagatggttcttgacaccaatctttgccccaaagaaaagaactatgagtggtcctttatccagtgtccagcttgccagtgtaatggacatagcacttgcatcaataataatgtgtgcgaacagtgtaaaaatctcaccacaggaaagcagtgtcaagattgtatgccaggttattatggagatccaaccaatggtggacagtgcacagcttgtacatgcagtggccatgcaaatatctgtcatctgcacacaggaaaatgtttctgcacaactaaaggaataaaaggtgaccaatgccaattatgtgactctgaaaatcgctatgttggtaatccacttagaggaacatgttattacagccttttgattgattatcaatttaccttcagcttattacaggaagatgatcgccaccatactgccataaactttatagcaaacccagaacagtcgaacaaaaatctggatatatcaattaatgcatcaaacaactttaatctcaacattacgtggtctgtcggttcaacagctggaacaatatctggggaagagacttctatagtttccaagaataatataaaggaatacagagatagtttttcctatgaaaaatttaactttagaagcaatcctaacattacattctatgtgtacgtcagcaacttttcctggcctattaaaatacagattgcattctcacaacacaatacaatcatggaccttgtgcagttttttgtcaccttcttcagttgtttcctatccttattgctggtggctgctgtggtatggaagatcaaacaaacttgttgggcttctcgacggagagagcaactgcttcgagaacgacagcagatggccagccgtccctttgcttctgttgatgtagctctggaagtgggagctgaacaaacagagtttctgcgagggccattagagggggcacccaagccaattgccattgaaccatgtgctgggaacagagctgctgttctgactgtgtttctttgtctaccacgaggatcatcaggtgcccctccccctgggcagtcaggccttgcaattgccagtgccctaatagatatttcacaacagaaagcttcagatagtaaagataagacttctggagtccggaatcgaaaacacctttcaacacgtcaaggaacttgtgtctgagaaatggaaaccgctcctgtatattctgtactgttttacttcgggcttctgttaaagctgttctatggccttggattttatggaggcagatctctgtatcatccagagcctgagtacagtttccttccaaatggacaatgacccaggtggccaaagaatgttcatgagttttataaaagtattgatggtcacaggtgataaagtcagtttttaccactatcttaggcttattatagctaacattaaattactctggaaaaagatgtatattgtttcttaatgaagatgaaaaatatgtaattcatataaatcaactgtttatatcccaagacttgaaagaaagacattttttaatgcctgaatgatgagaattgtacagtttttgcctcataagcaaacttgaatcacctgtgtatgaacagggaatgaacacattgcaatggctttaaatgctcttttatctcgttgtaaaggtaaggcaagattttgatgtagtaggatgtaggtaatgtatttaaatatttcatatgaccatatcgtgtccaaactcagtctgagaatgtgacagctttccgcctaactagaatgcagaccagaatgagttcaactcattctgtgcaacttcacagggggtttattagaatgctcagtgtagaggacattcctgtcatccatgccaactacctaactcgttatcagagctgatagagcatggaaaagtctgtccagcgatcagttgttcccctccttccaaaaacagcctccaataccacaacctgaaaagagccgaaatggttattttacagcatacaagcttctgctccagtatgataatttttaattgcctaagaatcattggatcagacctaaatgatccatctgcatttttataagaatggatctttctttgcccttcctctcctagctgctagattttaactaccttttacaaatgttacaaaatgtattttagaggcgacatctctcaagatgacctgagttccttcctgccaactgttccacctagaatacaagtagagaagagcactggctggcaagcatcaacaggagtcttcttcccaacacgagcgcatccatgtcctgagaaaaagtctgtggtttagaaaatatgtccatggttgcccacagtcagcacactcttagtgactcaaaattctgaattatggcagaaaggaaaaataaaacatacttcacattagaacacagaatcatttacatcctaatactgaccacagttcactaaagctcagtagcattaacagatatagtttggaattgcagtttcctcacttcagggtgacaagatatgtataacagtgacagaaatctccaaagctgctgtatatgatatagctttgttaaatatgaaggtcctttaaatacaattgatgtttagtactatatatgtacttttcacattctttggatttctggaaggttatgacactttactgtttacagctaatgcatagttacttgcatgccatggttgtacagtagcagactatgaccctattgtgatattaagtgtttatttcataatgccatttatacatagctgaatttgatgaggattgaatgtcatatataagaggaatgatcatacaatatgtagttgcatcttatataagatttctaggttgcatctaaccatgactatgtcattattttgataattaggcatttatgaattatagtatatattcctcatgttggcatgataattttgctattttccatgcattaaaaataagacaaattcttagagtaattttagtaattttatctataatctgtggggtttttttggagggggaggccactggttgtttctacttccctgtgatattttctctctcattaaaggaatgagctaagtttgtaaatatctcctaaaaacaatcaagtaattttattagcttcttttggaccctctaaatattgacttctctcatgaaaaaataaattgatgaaactaatgattacaaagatataatcattttttaaaaagtgattgcccaatgtatttctctaacaattgtcacaagagaaagcataacaataaaaatacaaaaacatacagatttagatgtaaaatctatataagctatatttttagggaggctaagcagatagtattactgtggaagaattatcaagttttattcacctcaaatcccactgggttcttaaaacttgaaaattcaaattgtagagaattatgagacacaatgtgatgtttagttaaagtcatgctatacctttctgggccacatattgctaactctgtggctaattatgcaattaattctcaacgtatcaaagcttttcactggcagtaaattctttgccctcaggtgaagtggattgaaaagacatcaaggatcaaggataatcactttgaatctgttggtttttccccctacattccagacactttaaatttggatgctttcattttttttaaatcaaaccacacaaatatgcagatactttcccagaatttcgcagttaaatggctgatcctcttgaaaactaaccttaatggaattctaaacatttcagtttagaatgactttgaaaaattccttagatttttaggatgttttattctgccaagtatgaaaaaaaaatggttaaatacaatggagttttaaaaattaacctggggattctatttgaactagaaaattcctattggaaaagaatttgcacatacttacagattcagctaataaattttaagaggattaggattctcataattctttaaatgaaaatttgttttagtgatacacagagatgccgtatactatagtgttatgttcagtaggaaaacttcaaatagttcgtatttaaaaaggtaattgatccttgctgtacttcccaacatctcatcttcttttagctgcagtaagatagaggtgactgtatggctacagttcatggtataaggtcatttagggtgcacactggcacacaggctggaaaacgggcactggacccagctttcaggtgtgtggtgctgggtaagtttcacctttgaagcctcagccttccatctgtaaagggcggtaatggtgcccacctttcgaggcattgcgaggctagatggtaacacacagaaagctcccacagtgggaccttgatgcagcgtagctggtattaacaaccgtggggacaccaggccactctttttctaccagttgttttatgaatccacctattaattttcatccatcttttggtcgtaggtaaaggtcaatcaggtttttcaaaaagactccctgaataacttaagttcctgtatttctaagatatagggatttctacaaaacgactttgacatttagtcaataaagacttaaactcttcttaaatctatagttttaggagagtttttcttaaaattactgactgatgacattgagacaagagcatcaatgatcacctttcacgtacaaactaggcaagacagggtcagtgcttacattttgtggttatacatgatacatcttttctcagtgaacataaaactatgatttgaaaggtgtcttatatttaaaaaagattgtaaaatgaaaactgaccaaatgaactaattctacccacctatggtctttttaaatgtcgagtttcaaaacccatttgccgtatactagagtgagcttggaaacttacctgattacaggaattgcttgggttcaggcagattcccactttcacctctagagatttagattcagaaacactggggtaggccctggagagcagtactcttaacaagctcctcagtgcttcttaccattaggcaaattagggaaacactgcattgggtcaaagtgctgcctttaatcgaccattagagggagttctctaaataacaaagttattactctaattcaaaatgctttaaagaattttccaaggaatacaagccatctggttggtgttagttatagcagtgatttcattagagtgtacatttaacattttagttttatcaaaattttttgaaattaagaattagaaccagagctcctatcagtatatatgtacacaggtgtgcatgccagtgttcaaaagattgtgtaaaagttcaagcccgttttagaaagccaacattttatgttataatatgctgttaatcaggactttattaaataaaaacattggctcttccaacccccac

SEQ ID NO: 3070 - DNA, 1646 bp, Homo sapiens
  source 1..1646: mol_type = unassigned DNA
ctgtgaaaaacctgttgttagtccaaatcaaaatgcgaggccgtgcaaaaagccatgctctctgaggacatcatgttccaactgtacaagcaatggcatggagtgtatgtggtgcagcagtacgaaacgatgtgttgactctaatgcctatatcatctcttttccatatggacaatgtctagagtggcaaactgccacctgctcccctcaaaattgttctggattgagaacctgtggacagtgtttggaacagcctggatgtggctggtgcaatgatcctagtaatacaggaagaggacattgcattgaaggttcttcacggggaccaatgaagcttattggaatgcaccacagtgagatggttcttgacaccaatctttgccccaaagaaaagaactatgagtggtcctttatccagtgtccagcttgtacatgcagtggccatgcaaatatctgtcatctgcacacaggaaaatgtttctgcacaactaaaggaataaaaggtgaccaatgccaattatgtgactctgaaaatcgctatgttggtaatccacttagaggaacatgttattacagccttttgattgattatcaatttaccttcagcttattacaggaagatgatcgccaccatactgccataaactttatagcaaacccagaacagtcgaacaaaaatctggatatatcaattaatgcatcaaacaactttaatctcaacattacgtggtctgtcggttcaacagctggaacaatatctggggaagagacttctatagtttccaagaataatataaaggaatacagagatagtttttcctatgaaaaatttaactttagaagcaatcctaacattacattctatgtgtacgtcagcaacttttcctggcctattaaaatacagattgcattctcacaacacaatacaatcatggaccttgtgcagttttttgtcaccttcttcagttgtttcctatccttattgctggtggctgctgtggtatggaagatcaaacaaacttgttgggcttctcgacggagagagcaactgcttcgagaacgacagcagatggccagccgtccctttgcttctgttgatgtagctctggaagtgggagctgaacaaacagagtttctgcgagggccattagagggggcacccaagccaattgccattgaaccatgtgctgggaacagagctgctgttctgactgtgtttctttgtctaccacgaggatcatcaggtgcccctccccctgggcagtcaggccttgcaattgccagtgccctaatagatatttcacaacagaaagcttcagatagtaaagataagacttctggagtccggaatcgaaaacacctttcaacacgtcaaggaacttgtgtctgagaaatggaaaccgctcctgtatattctgtactgttttacttcgggcttctgttaaagctgttctatggccttggattttatggaggcagatctctgtatcatccagagcctgagtacagtttccttccaaatggacaatgacccaggtggccaaagaatgttcatgagttttataaaagtattgatggtcacaggtgataaagtcagtttttaccactatcttaggcttattatagctaacattaaattactctgg

SEQ ID NO: 3071 - DNA, 488 bp, Homo sapiens
  source 1..488: mol_type = unassigned DNA
gcgcactctcggaagcgcagccgaacccgccctccgaatccagagaggcgctgctgacaccgccgccacaccgccgccacaccgccgctgcctcagtcatgccgaagcacgagttctctgtggacatgacctgtggaggctgtgctgaagctgtctctcgggtcctcaataagcttggaggagttaagtatgacattgacctgcccaacaagaaggtctgcattgaatctgagcacagcatggacactctgcttgcaaccctgaagaaaacaggaaagactgtttcctaccttggccttgagtagcaggggcctggtccccacagcccacaggatggaccaaagggggcaggatgctgatcctcccgctggcttccagacagacctgggacttggcagtcatgccgggtgatggtgttcctgcggagaccctcagttgtcctattccttcctagcttccctgcaataaaatcaagctgcttttgttgg

SEQ ID NO: 3072 - DNA, 591 bp, Homo sapiens
  source 1..591: mol_type = unassigned DNA
ctctagtgcgcactctcggaagcgcagccgaacccgccctccgaatccagagaggcgctgctgacaccgccgccacaccgccgccacaccgccgctgcctcagtcatgccgaagcacgagttctctgtggacatgacctgtggaggctgtgctgaagctgtctctcgggtcctcaataagcttggaggagttaagtatgacattgacctgcccaacaagaaggtctgcattgaatctgagcacagcatggacactctgcttgcaaccctgaagaaaacaggaaagactgtttcctaccttggccttgagtagcaggggcctggtccccacagcccacaggatggaccaaagggggcaggtgggtaaggccccagcacttgctgaacaaacctacagctcacacctctcatcagagcgaacaccttggcctttgagagcttgagtggagcgggagagccctctgggttcttttcaatccactgtccaccttctttggagtggttacaaatattttattattgtctaatgcaaatcacaagttcagggaattcttacagaccctgtgagtggacagagcactgtgtaatgtct

SEQ ID NO: 3073 - DNA, 749 bp, Homo sapiens
  source 1..749: mol_type = unassigned DNA
gcaaaaccgaaggcgcttctgcgacgcgcggaccgcaagactccaatcagactttagtgctgcccccaccctaaacgaaagcctccttctggtccgaaccgactggatcccttggccaggggaggaaaaggccgggtgaccacgggcccggcccgcagaaaggaggcggcgcggccggcagggatcaggactggagggggcggagcctccctcgcggccgggcccggagtgggaggggcctccgggaccaggcctctagtgcgcactctcggaagcgcagccgaacccgccctccgaatccagagaggcgctgctgacaccgccgccacaccgccgccacaccgccgctgcctcagtcatgccgaagcacgagttctctgtggacatgacctgtggaggctgtgctgaagctgtctctcgggtcctcaataagcttggaggagttaagtatgacattgacctgcccaacaagaaggtctgcattgaatctgagcacagcatggacactctgcttgcaaccctgaagaaaacaggaaagactgtttcctaccttggccttgagtagcaggggcctggtccccacagcccacaggatggaccaaagggggcaggatgctgatcctcccgctggcttccagacagacctgggacttggcagtcatgccgggtgatggtgttcctgcggagaccctcagttgtcctattccttcctagcttccctgcaataaaatcaagctgcttttgttgga

SEQ ID NO: 3074 - DNA, 1490 bp, Homo sapiens
  source 1..1490: mol_type = unassigned DNA
aggtccacgccgtaaacagacaacatggcggccgcggtggcggcggcacctggggccttgggatccctgcatgctggcggcgcccgcctggtggccgcttgcagtgcgtggctctgcccggggttgaggctgcccggctcgttggcaggccggcgagcgggcccggcgatctgggcccagggctgggtacctgcggccgggggtcccgccccgaaaaggggctacagctctgagatgaagacggaggacgagctgcgggtgcggcacctggaggaggagaaccgaggaattgtggtgcttggaataaacagagcttatggcaaaaattcactcagtaaaaatcttataaaaatgctatcaaaagctgtggatgctttgaaatctgataagaaagtacggaccataataatcaggagtgaagtcccagggatattctgtgctgctaatcttccagtaccaacaattgcagcaatagatggactcgctttaggtggtggtcttgaactggctttagcctgtgatatacgagtagcagcttcctctgcaaaaatgggcctggttgaaacaaaattggcgattattcctggtggaggggggacacagcgattgccacgcgccattggaatgtccctggccaaggagctcatattctctgcgcgagtcctcgatggcaaagaagccaaagcagtgggcttaatcagccacgttctggaacagaaccaggagggagacgcggcctacaggaaggccttggacctggcgagagagtttttacctcagggacctgttgcaatgagagtggcaaaattagcaattaatcaagggatggaggtcgatttagtaacagggttagccatagaagaagcttgttatgctcagaccattccaacaaaagacagacttgaaggtcttcttgcttttaaagagaaaaggccccctcgctataaaggagaataaaaggaacagaaattcttaagatgccaatgtaataaatgtacttcctggaagtgtctttcggatccactatatgcctcagcacatggaaccttaatgaccaaagtgaagagcagattattcatacggtgtaataagcatctggaatggacccatccgtgtacttcattcaaatgtgtaaatgtcatattcattcagatttataaagctagtagtgtatagtcagaaacagaatcaaagttagatatacatttttaaatatttactgcatatgaggctttctgttaattttttaatgtgaataatttatatattgcacattctagggaataatattgattgtatgtctactgtgctgcattaagaaaataaaatttctatataccaaaaatgtgaagttataccaaataaagtttctaagtgattaatgcatacgaacagctacatatacatatatctaaacctgaaaaatgaattgatattctgagtgaaaactacctaatataaataaaattagtgaaaagaaaacatgggaa

SEQ ID NO: 3075 - DNA, 1577 bp, Homo sapiens
  source 1..1577: mol_type = unassigned DNA
aggtccacgccgtaaacagacaacatggcggccgcggtggcggcggcacctggggccttgggatccctgcatgctggcggcgcccgcctggtggccgcttgcagtgcgtggctctgcccggggttgaggctgcccggctcgttggcaggccggcgagcgggcccggcgatctgggcccagggctgggtacctgcggccgggggtcccgccccgaaaaggggctacagctctgagatgaagacggaggacgagctgcgggtgcggcacctggaggaggagaaccgaggaattgtggtgcttggaataaacagagcttatggcaaaaattcactcagtaaaaatcttataaaaatgctatcaaaagctgtggatgctttgaaatctgataagaaagtacggaccataataatcaggagtgaagtcccagggatattctgtgctggtgctgaccttaaggaaagagccaaaatgagttccagtgaagttggtccttttgtctccaaaataagagcagtgattaacgatattgctaatcttccagtaccaacaattgcagcaatagatggactcgctttaggtggtggtcttgaactggctttagcctgtgatatacgagtagcagcttcctctgcaaaaatgggcctggttgaaacaaaattggcgattattcctggtggaggggggacacagcgattgccacgcgccattggaatgtccctggccaaggagctcatattctctgcgcgagtcctcgatggcaaagaagccaaagcagtgggcttaatcagccacgttctggaacagaaccaggagggagacgcggcctacaggaaggccttggacctggcgagagagtttttacctcagggacctgttgcaatgagagtggcaaaattagcaattaatcaagggatggaggtcgatttagtaacagggttagccatagaagaagcttgttatgctcagaccattccaacaaaagacagacttgaaggtcttcttgcttttaaagagaaaaggccccctcgctataaaggagaataaaaggaacagaaattcttaagatgccaatgtaataaatgtacttcctggaagtgtctttcggatccactatatgcctcagcacatggaaccttaatgaccaaagtgaagagcagattattcatacggtgtaataagcatctggaatggacccatccgtgtacttcattcaaatgtgtaaatgtcatattcattcagatttataaagctagtagtgtatagtcagaaacagaatcaaagttagatatacatttttaaatatttactgcatatgaggctttctgttaattttttaatgtgaataatttatatattgcacattctagggaataatattgattgtatgtctactgtgctgcattaagaaaataaaatttctatataccaaaaatgtgaagttataccaaataaagtttctaagtgattaatgcatacgaacagctacatatacatatatctaaacctgaaaaatgaattgatattctgagtgaaaactacctaatataaataaaattagtgaaaagaaaacatgggaa

SEQ ID NO: 3076 - DNA, 1076 bp, Homo sapiens
  source 1..1076: mol_type = unassigned DNA
gacaacatggcggccgcggtggcggcggcacctggggccttgggatccctgcatgctggcggcgcccgcctggtggccgcttgcagtgcgtggctctgcccggggttgaggctgcccggctcgttggcaggccggcgagcgggcccggcgatctgggcccagggctgggtacctgcggccgggggtcccgccccgaaaaggggctacagctctgagatgaagacggaggacgagctgcgggtgcggcacctggaggaggagaaccgaggaattgtggtgcttggaataaacagagcttatggcaaaaattcactcagtaaaaatcttataaaaatgctatcaaaagctgtggatgctttgaaatctgataagaaagtacggaccataataatcaggagtgaagtcccagggatattctgtgctggtgctgaccttaaggaaagagccaaaatgagttccagtgaagttggtccttttgtctccaaaataagagcagtgattaacgatattgctaatcttccagtaccaacaattgcagcaatagatggactcgctttaggtggtggtcttgaactggctttagcctgtgatatacgagtagcagcttcctctgcaaaaatgggcctggttgaaacaaaattggcgattattcctggtggagtgacttcctccactgaagtcttgaatccctccaagtcatccatgaagattggaatcatcatcttccaaactcctgttaatattgatattctggcctcttcccatgaatcatgaatgttcttaaagggatctagaatggcagatcctttccagaaggttttcaatttaatttgcccagatccataagaggaatcactgtctatggcagctatagccttatgaaatgtggtttttgttttgttttgtttttttgagacggagtctcgctctgttgccaggttggagtgcagtggtgtgatctcggctcactgcaacccctgcctccccggttcaagggattctcctgcctcagcctcctgagtagctgggactacaggtgcacaccaccgtgcccagctaatttttgtattttttgt

SEQ ID NO: 3077 - DNA, 3598 bp, Homo sapiens
  source 1..3598: mol_type = unassigned DNA
cttccgcgccggcaggggcagcagcgggagcagcgcggggcggagcggcgccagcagccaggagcggcccggcccggcccggcgcggcggcggcggcggcagcggcagcggcagcgacgccagagcccgtgggcgccgttcgcgaggccgccgcagaggcccggccgcagcgcagggaagcctgggggccagaggtcgccgctgccgccatgccgctgctcttcctcgagcgcttcccctggcccagcctccgcacctacacgggcctcagcggcctggccctgctgggcaccatcatcagcgcctaccgcgcgctcagccagcccgaggccggccccggcgagccggaccagctaacggcctcgctgcagcctgagccgccggcgcccgcccggccgagcgccgggggaccccgggcccgcgatgtggcccagtacctgctctcagacagcctcttcgtgtgggttctagtaaataccgcttgctgtgttttgatgttggtggctaagctcatccagtgtattgtgtttggccctcttcgagtgagtgagagacagcatctcaaagacaaattttggaattttattttctacaagttcattttcatctttggtgtgctgaatgtccagacagtggaagaggtggtcatgtggtgcctctggtttgccggacttgtctttctgcacctgatggttcagctctgcaaggatcgatttgaatatctttccttctcgcccaccacgccgatgagcagccacggtcgagtcctgtccctgttggttgccatgctgctttcctgctgtggactggcggccgtctgctccatcaccggctacacccacggaatgcacaccttggctttcatggctgcagagtctcttcttgtgacagtgaggactgctcatgtgattttacgatacgtaattcacctctgggacctcaaccacgaagggacgtgggaaggaaaggggacgtatgtctattacacagactttgtcatggagctcactctcctgtccctggacctcatgcaccatattcacatgttgttatttggcaacatctggttatccatggccagcctggtcatctttatgcagctgcgttacctgtttcatgaggtgcaacgtcgaattcgtcggcacaagaactatctacgtgtggttggaaacatggaggccaggtttgcagttgcaactccagaggagctggctgtcaacaatgacgactgtgccatctgttgggactccatgcaggctgcgcggaaactgccctgtggacatcttttccacaactcctgtcttcgttcctggctagaacaagacacctcctgtccaacatgcagaatgtctcttaatattgccgacaataatcgtgtcagggaagaacatcaaggagagaacttggatgagaatttggttcctgtagcagcagccgaagggagacctcgcttaaaccaacacaatcacttcttccatttcgatgggtctcggattgcgagctggctgccgagtttttcggttgaagtgatgcacaccaccaacattcttggcattacgcaggccagcaactcccagctcaatgcaatggctcatcagattcaagagatgtttccccaggttccataccatctggtactgcaggacctccagctgacacgctcagttgaaataacaacagacaatattttagaaggacggattcaagtaccttttcctacacagcggtcagatagcatcagacctgcattgaacagtcctgtggaaaggccaagcagtgaccaggaagagggagaaacttctgctcagaccgagcgtgtgccactggacctcagtcctcgcctggaggagacgctggacttcggcgaggtggaagtggagcccagtgaggtggaagacttcgaggctcgtgggagccgcttctccaagtctgctgatgagagacagcgcatgctggtgcagcgtaaggacgaactcctccagcaagctcgcaaacgtttcttgaacaaaagttctgaagatgatgcggcctcagagagcttcctcccctcggaaggtgcgtcctctgaccccgtgaccctgcgtcgaaggatgctggctgccgccgcggaacggaggcttcagaagcagcagacctcctagcgctcccttgccttcctcagctgcctcctgcgccctgtgcccgactgactggaggaggcctgtcccaattctgcccgctccatggaaaagcgggcttgactgcattgccgctgtataaagcatgtggtcttatagtgtttggacagctgataaatttaatccttctttgtaatactttctatgtgacatttctcttccccttagaaacactgcaaattttaactgtaggtatgatctcttctggtgttgactggactgcttggggtgggggacgatcaggaggaagtgagcagtcgcctgcctgcagcaggcagcttctactcctgcctcatgcgtacgtcccacaaatgcaggtgtcctgagcaccacacccagtgggaagagtgtgggggaggcgcacagtgtgagcccgcccccacgtcgtggggtaacatctgttatcaaactgctgtcgttgttgtggaagcatgtagactgtgccagaggccagacccacgggctcatgcacccctgagccagcagggcatcttggaaaaggaactcttggttcgatacctggagcagaggaggggaaagtccagggctatagggtgtgatgaagtcacccctttctgtcccactacatctgggactgactttccgagcctccagtccaaagccggcttgatttccgtgaactctggtgctcctgcatctcatgagtgtgccccatgggtcccctcccctctcagcatttccttgtcccgtctggacctggggagtggttaggcagcaagctttggtttatggttttcattcattggtgaagtaaattaggcagtgctaaagcctgtgggtttggtccttgaacaagatgtgggccttgcaagatgggagagtaaaccttgaagggctttattaaagaaataaaaaagaacttttgtatcttttatcctgggagcactgcgttttcctagctgtgttattcctggtttaattcagcagagaaggtaaggtgtgaacctacctgccttggagagggcccaggtcccaaatctcttcaaattcttcacatgtttaactttaaggatttgaaccatgaagtcataggttacagacctcagttttatgccccattggattactttttttttttttttttttttttttttttttactctttgaaagctttgttttgtggtagtccttttgggaagaatccagtattatccacaattattggcaaagtttaaatgtattttacataacggaaagtttttagaatgttgaaaagtaattgaaaaaggtgataggtaaatttttaggcaaagataatttatttcaataaatctttcaaaagccttaccttgaaatgctgttagtaaatttctgtgatttttttttttaatttgttttgctgagagcatagctatttgtttttattgtaaaacaataataataataaaaagcaaactcta

SEQ ID NO: 3078 - DNA, 954 bp, Homo sapiens
  source 1..954: mol_type = unassigned DNA
atgagagacagcgcatgctggcagcgtaaggacgaactcctccagcaagctcgcaaacgtttcttgaacaaaagttctgaagatgatgcggcctcagagagcttcctcccctcggaaggtgcgtcctctgaccccgtgaccctgcgtcgaaggatgctggctgcccggaacggaggcttcagaagcagcagacctcctagcgctcccttgccttcctcagctgcctcctgcgccctgtgcccgactgactggaggaggcctgtcccaattccgctccatggaaaagcgggcttgactgcattgccgctgtataaagcatgtggtcttatagtgtttggacagctgataaatttaatccttctttgtaatactttctatgtgacatttctcttccccttagaaacactgcaaattttaactgtaggtatgatctcttctggtgttgactggactgcttggggtgggggacgatcaggaggaagtgaggtcgcctgcctgcagcaggcagcttctactcctgcctcatgcgtacgtcccacaaatgcaggtgtcctgagcaccacacccagtgggaagagtgtgggggaggcgcacagtgtgagcccgcccccacgtcgtggggtaacatctgttatcaaactgctgtcgttgttgtggaagcatgtagactgtgccagaagacccacgggctcatgcacccctcagcagggcatcttggaaaaggaactcttggttcgatacctggagcagaggaggggaaagtccagggctatagggtgtgatgaagtcacccctttctgtcccactacatctgggactgactttccgagcctccagtccaaagccggcttgatttccgtgaactctggtgctcctgcatctcatgagtgtgccccatgggtcccctcccctctcagcatttccttgtcccgtctggacctggggagtggttag

SEQ ID NO: 3079 - DNA, 2257 bp, Homo sapiens
  source 1..2257: mol_type = unassigned DNA
agacgggcgggcgcacagccggcgcggaggccccacagccccgccgggacccgaggccaagcgaggggctgccagtgtcccgggacccaccgcgtccgccccagccccgggtccccgcgcccaccccatggcgacggacgcggcgctacgccggcttctgaggctgcaccgcacggagatcgcggtggccgtggacagcgccttcccactgctgcacgcgctggctgaccacgacgtggtccccgaggacaagtttcaggagacgcttcatctgaaggaaaaggagggctgcccccaggccttccacgccctcctgtcctggctgctgacccaggactccacagccatcctggacttctggagggtgctgttcaaggactacaacctggagcgctatggccggctgcagcccatcctggacagcttccccaaagatgtggacctcagccagccccggaaggggaggaagcccccggccgtccccaaggctttggtaccgccacccagactccccaccaagaggaaggcctcagaagaggctcgagctgccgcgccagcagccctgactccaaggggcaccgccagcccaggctctcaactgaaggccaagccccccaagaagccggagagcagcgcagagcagcagcgccttccactcgggaacgggattcagaccatgtcagcttcagtccagagagctgtggccatgtcctccggggacgtcccgggagcccgaggggccgtggaggggatcctcatccagcaggtgtttgagtcaggcggctccaagaagtgcatccaggttggcggggagttctacactcccagcaagttcgaagactccggcagtgggaagaacaaggcccgcagcagcagtggcccgaagcctctggttcgagccaagggagcccagggcgctgcccccggtggaggtgaggctaggctgggccagcagggcagcgttcccgcccctctggccctccccagtgacccccagctccaccagaagaatgaggacgagtgtgccgtgtgtcgggacggcggggagctcatctgctgtgacggctgccctcgggccttccacctggcctgcctgtcccctccgctccgggagatccccagtgggacctggaggtgctccagctgcctgcaggcaacagtccaggaggtgcagccccgggcagaggagccccggccccaggagccacccgtggagaccccgctccccccggggcttaggtcggcgggagaggaggtaagaggtccacctggggaacccctagccggcatggacacgactcttgtctacaagcacctgccggctccgccttctgcagccccgctgccagggctggactcctcggccctgcaccccctactgtgtgtgggtcctgagggtcagcagaacctggctcctggtgcgcgttgcggggtgtgcggagatggtacggacgtgctgcggtgtactcactgcgccgctgccttccactggcgctgccacttcccagccggcacctcccggcccgggacgggcctgcgctgcagatcctgctcaggagacgtgaccccagcccctgtggagggggtgctggcccccagccccgcccgcctggcccctgggcctgccaaggatgacactgccagtcacgagcccgctctgcacagggatgacctggagtcccttctgagcgagcacaccttcgatggcatcctgcagtgggccatccagagcatggcccgtccggcggcccccttcccctcctgaccccagatggccgggacatgcagctctgatgagagagtgctgagaaggacacctccttcctcagtcctggaagccggccggctgggatcaagaaggggacagcgccacctcttgtcagtgctcggctgtaaacagctctgtgtttctggggacaccagccatcatgtgcctggaaattaaaccctgccccacttctctactctggaagtccccgggagcctctccttgcctggtgacctactaaaaatataaaaattagctgggtgtggtggtgggtgcctgtaatcccagctacatgggagcctgaggcatgagaatcacttgaactcgggaggtggaggttgcagtgagctgagattgcgccactgcactccagtctggtcggcaagagtgagactccgtctcaaaaacaaaacaaaacaaaaaaaccacataacataaatttatcatctcgaccacttttcagttcagtggcattcacatctcatgtaa

SEQ ID NO: 3080 - DNA, 1427 bp, Homo sapiens
  source 1..1427: mol_type = unassigned DNA
atgtggttggtgtacagttccggggcccctggaacgcagcagcctgcaagaaaccgggttttcttcccaatagggatggccccggggggtgtctgttggagaccagatggatggggaacaggtggtcagggcagaatttcaggccctggcagcatgggagcagggcagagactggggagttcaggtacccagagatgctgctgggggagctgttttgggaaggaggtggctctcaggagggtgctgcaccccagcccaaagaatgaggacgagtgtgccgtgtgtcgggacggcggggagctcatctgctgtgacggctgccctcgggccttccacctggcctgcctgtcccctccgctccgggagatccccagtgggacctggaggtgctccagctgcctgcaggcaacagtccaggaggtgcagccccgggcagaggagccccggccccaggagccacccgtggagaccccgctccccccggggcttaggtcggcgggagaggagccccgctgccagggctggactcctcggccctgcaccccctactgtgtgtgggtcctgagggtcagcagaacctggctcctggtgcgcgttgcggggtgtgcggagatggtacggacgtgctgcggtgtactcactgcgccgctgccttccactggcgctgccacttcccagccggcacctcccggcccgggacgggcctgcgctgcagatcctgctcaggagacgtgaccccagcccctgtggagggggtgctggcccccagccccgcccgcctggcccctgggcctgccaaggatgacactgccagtcacgagcccgctctgcacagggatgacctggagtcccttctgagcgagcacaccttcgatggcatcctgcagtgggccatccagagcatggcccgtccggcggcccccttcccctcctgaccccagatggccgggacatgcagctctgatgagagagtgctgagaaggacacctccttcctcagtcctggaagccggccggctgggatcaagaaggggacagcgccacctcttgtcagtgctcggctgtaaacagctctgtgtttctggggacaccagccatcatgtgcctggaaattaaaccctgccccacttctctactctggaagtccccgggagcctctccttgcctggtgacctactaaaaatataaaaattagctgggtgtggtggtgggtgcctgtaatcccagctacatgggagcctgaggcatgagaatcacttgaactcgggaggtggaggttgcagtgagctgagattgcgccactgcactccagtctggtcggcaagagtgagactccgtctcaaaaacaaaacaaaacaaaaaaaccacataacataaatttatcatctcgaccacttttcagttcagtggcattcacatctcatgtaa

SEQ ID NO: 3081 - DNA, 1542 bp, Homo sapiens
  source 1..1542: mol_type = unassigned DNA
agaaagtgaggtcttctcaggctcttaagagcatggcgtttggtccaggctgtacccgctgctctcagctgggcccgtgggtgggccgggcgcccctgctatagccaggaggtcaaggatccactgggaatgccatgctcatctttcgtccccagcatggtttcttaatggggtagaagcagtcgggagagacctccctgggcctggccccactgccctgtgaggaagggttcatgtggttggtgtacagttccggggcccctggaacgcagcagcctgcaagaaaccgggttttcttcccaatagggatggccccggggggtgtctgttggagaccagatggatggggaacaggtggtcagggcagaatttcaggccctggcagcatgggagcagggcagagactggggagttcaggtacccagagatgctgctgggggagctgttttgggaaggaggtggctctcaggagggtgctgcaccccagcccagtctgcatgggcgtctcttgcctgtgccagaagaatgaggacgagtgtgccgtgtgtcgggacggcggggagctcatctgctgtgacggctgccctcgggccttccacctggcctgcctgtcccctccgctccgggagatccccagtgggacctggaggtgctccagctgcctgcaggcaacagtccaggaggtgcagccccgggcagaggagccccggccccaggagccacccgtggagaccccgctccccccggggcttaggtcggcgggagaggaggtaagaggtccacctggggaacccctagccggcatggacacgactcttgtctacaagcacctgccggctccgccttctgcagccccgctgccagggctggactcctcggccctgcaccccctactgtgtgtgggtcctgagggtcagcagaacctggctcctggtgcgcgttgcggggtgtgcggagatggtacggacgtgctgcggtgtactcactgcgccgctgccttccactggcgctgccacttcccagccggcacctcccggcccgggacgggcctgcgctgcagatcctgctcaggagacgtgaccccagcccctgtggagggggtgctggcccccagccccgcccgcctggcccctgggcctgccaaggatgacactgccagtcacgagcccgctctgcacagggatgacctggagtcccttctgagcgagcacaccttcgatggcatcctgcagtgggccatccagagcatggcccgtccggcggcccccttcccctcctgaccccagatggccgggacatgcagctctgatgagagagtgctgagaaggacacctccttcctcagtcctggaagccggccggctgggatcaagaaggggacagcgccacctcttgtcagtgctcggctgtaaacagctctgtgtttctggggacaccagccatcatgtgcctggaaattaaaccctgccccacttctctactctggaagtccccgggagcctctccttgcctggtgacctactaaaaatataaaaattagctg

SEQ ID NO: 3082 - DNA, 1509 bp, Homo sapiens
  source 1..1509: mol_type = unassigned DNA
atgtggttggtgtacagttccggggcccctggaacgcagcagcctgcaagaaaccgggttttcttcccaatagggatggccccggggggtgtctgttggagaccagatggatggggaacaggtggtcagggcagaatttcaggccctggcagcatgggagcagggcagagactggggagttcaggtacccagagatgctgctgggggagctgttttgggaaggaggtggctctcaggagggtgctgcaccccagcccaaagaatgaggacgagtgtgccgtgtgtcgggacggcggggagctcatctgctgtgacggctgccctcgggccttccacctggcctgcctgtcccctccgctccgggagatccccagtgggacctggaggtgctccagctgcctgcaggcaacagtccaggaggtgcagccccgggcagaggagccccggccccaggagccacccgtggagaccccgctccccccggggcttaggtcggcgggagaggaggtaagaggtccacctggggaacccctagccggcatggacacgactcttgtctacaagcacctgccggctccgccttctgcagccccgctgccagggctggactcctcggccctgcaccccctactgtgtgtgggtcctgagggtcagcagaacctggctcctggtgcgcgttgcggggtgtgcggagatggtacggacgtgctgcggtgtactcactgcgccgctgccttccactggcgctgccacttcccagccggcacctcccggcccgggacgggcctgcgctgcagatcctgctcaggagacgtgaccccagcccctgtggagggggtgctggcccccagccccgcccgcctggcccctgggcctgccaaggatgacactgccagtcacgagcccgctctgcacagggatgacctggagtcccttctgagcgagcacaccttcgatggcatcctgcagtgggccatccagagcatggcccgtccggcggcccccttcccctcctgaccccagatggccgggacatgcagctctgatgagagagtgctgagaaggacacctccttcctcagtcctggaagccggccggctgggatcaagaaggggacagcgccacctcttgtcagtgctcggctgtaaacagctctgtgtttctggggacaccagccatcatgtgcctggaaattaaaccctgccccacttctctactctggaagtccccgggagcctctccttgcctggtgacctactaaaaatataaaaattagctgggtgtggtggtgggtgcctgtaatcccagctacatgggagcctgaggcatgagaatcacttgaactcgggaggtggaggttgcagtgagctgagattgcgccactgcactccagtctggtcggcaagagtgagactccgtctcaaaaacaaaacaaaacaaaaaaaccacataacataaatttatcatctcgaccacttttcagttcagtggcattcacatctcatgtaa

SEQ ID NO: 3083 - DNA, 1963 bp, Homo sapiens
  source 1..1963: mol_type = unassigned DNA
tgggaatgccatgctcatctttcgtccccagcatggtttcttaatggggtagaagcagtgtggggggtgcctgccgtggtgggttacagatcttgaccacttggcaccaggggctctgtggggccctggcacttagcagtgacaggagccagtcctgccctgcaggagcacccgggctggtgggcgtctgggggattgttagaatgagtgaggtcattgccgtgcaggaccagcctagcctggctgtctggggggattctggaggaagtggtacctgggagacccctgaaggcacagcaggcaccatccaggcagggcacaaggacggtgggggctgcaggtggaggattcagcaggcgctgaggtcgggagagacctccctgggcctggccccactgccctgtgaggaagggttcatgtggttggtgtacagttccggggcccctggaacgcagcagcctgcaagaaaccgggttttcttcccaatagggatggccccggggggtgtctgttggagaccagatggatggggaacaggtggtcagggcagaatttcaggccctggcagcatgggagcagggcagagactggggagttcaggtacccagagatgctgctgggggagctgttttgggaaggaggtggctctcaggagggtgctgcaccccagcccagtctgcatgggcgtctcttgcctgtgccagaagaatgaggacgagtgtgccgtgtgtcgggacggcggggagctcatctgctgtgacggctgccctcgggccttccacctggcctgcctgtcccctccgctccgggagatccccagtgggacctggaggtgctccagctgcctgcaggcaacagtccaggaggtgcagccccgggcagaggagccccggccccaggagccacccgtggagaccccgctccccccggggcttaggtcggcgggagaggaggtaagaggtccacctggggaacccctagccggcatggacacgactcttgtctacaagcacctgccggctccgccttctgcagccccgctgccagggctggactcctcggccctgcaccccctactgtgtgtgggtcctgagggtcagcagaacctggctcctggtgcgcgttgcggggtgtgcggagatggtacggacgtgctgcggtgtactcactgcgccgctgccttccactggcgctgccacttcccagccggcacctcccggcccgggacgggcctgcgctgcagatcctgctcaggagacgtgaccccagcccctgtggagggggtgctggcccccagccccgcccgcctggcccctgggcctgccaaggatgacactgccagtcacgagcccgctctgcacagggatgacctggagtcccttctgagcgagcacaccttcgatggcatcctgcagtgggccatccagagcatggcccgtccggcggcccccttcccctcctgaccccagatggccgggacatgcagctctgatgagagagtgctgagaaggacacctccttcctcagtcctggaagccggccggctgggatcaagaaggggacagcgccacctcttgtcagtgctcggctgtaaacagctctgtgtttctggggacaccagccatcatgtgcctggaaattaaaccctgccccacttctctactctggaagtccccgggagcctctccttgcctggtgacctactaaaaatataaaaattagctgggtgtggtggtgggtgcctgtaatcccagctacatgggagcctgaggcatgagaatcacttgaactcgggaggtggaggttgcagtgagctgagattgcgccactgcactccagtctggtcggcaagagtgagactccgtctcaaaaacaaaacaaaacaaaaaaaccacataacataaatttatcatctcgaccacttttcagttcagtggcattcacatctcatgtaaccattgcc

SEQ ID NO: 3084 - DNA, 5113 bp, Homo sapiens
  source 1..5113: mol_type = unassigned DNA
aggggattaatgaagagccaccagactatctttatggagaatctagattgggaagttaagctaagaatgtgcatttttgaaaaagtttttatggtagaagagaatgtatatcagaggaaagaatgtagagaagaaagcaacattgtccactgggaattgataagttctgcgtagaatttagagttataaggactatctcattggctcctaatgaatgctaaataacaaatggaaattgctatttccatgaggacaacttacaaggacctgtatggcctcattttagctgcttcagtgtgttggagctgttacttgctccttcatttcctgggcctggtgtgacagtggctactgagcgccatgaaggttgtcccagaaaagaatgctgtccggatactctgggggcgagaacggggtgctcgggccatgggagctcagcggcttctgcaggagctggtagaagataaaacccggtggatgaaatgggagggcaagagagtagaactgccggatagtccacgctctaccttcttattggccttcagcccagacaggactctcttagcctccacccatgtgaaccataatatctatattacggaggtgaagactggcaagtgtgttcattccctgattggacaccgccgtactccatggtgtgtcacttttcatcccaccatctcaggccttattgcttctggctgcctagatggggaggttaggatttgggatttacacggtggcagtgaaagctggttcacagatagcaacaatgccattgcctccctggctttccaccctacggctcagctcctgctgattgccactgccaatgagatccacttctgggactggagtcgacgggaaccctttgctgtggtgaagacagctagtgagatggaacgggtccgtctggtgagatttgatccacttggacactacttactcacagcaattgttaacccctctaatcaacagggtgatgacgaaccagagatccccatagatggaacagaattatcccactaccgtcagcgtgccctcctgcaatcacagccagttcgccggacgcctctcctccacaatttcctgcacatgctgtcctcccgctcttctggcatccaggtgggagagcaaagcacagtgcaagattctgctaccccctcacccccaccgcctccccctcagccctccacggagcgccccaggacttccgcttacatcaggctccgacagcgggtcagttaccccacagctgagtgctgccagcaccttgggatcctgtgcctttgcagccgctgctctggcactcgagttccttccctcttgccacaccaggacagtgtcccccctgcttctgccagagctactaccccttccttttcttttgtacagaccgagcccttccatcccccggagcaggcctcgtcaacgcagcaggaccagggcctcctgaaccggccgtctgccttcagtacagtccagagcagcactgccggcaacacgctccgcaacctcagtctgggtcctacccgccgctctttgggagggcctctgtctagccacccttctaggtatcaccgagaaatagctcctgggttgacaggatctgagtggacccggacagtactcagtctgaactcccgctctgaggcggaatccatgcccccgcccagaaccagtgcctcttcggtgagtttgctgtctgtgctgagacagcaggaaggtggctctcaggcatctgtgtacacttcagccacagaagggaggggttttccggcatcagggttggcaactgagtcagatggagggaatggctccagccaaaacaactcgggcagcattcgccatgagcttcagtgtgacctgagacgcttctttctggagtatgaccggcttcaggagctggatcagagcctgagtggggaagctccccagacccaacaggcccaggaaatgctcaacaataacattgaatctgagaggccaggcccttcccaccagcccaccccacacagcagtgagaacaactccaacctgtcccgtggccacctgaatcgctgtcgtgcttgccacaatctcctgaccttcaacaacgataccctgcgctgggaaagaaccacacctaactactcctctggcgaggctagttcctcttggcaggtccccagctcctttgagagtgtgccatcaagtggcagccagttgccacctctcgagcggactgagggccaaacgcccagctccagcaggctggagttgagcagctctgctagtccgcaggaggagaggactgtgggggtggcctttaaccaggagacaggccactgggaaagaatttacacccagtccagcagatctggaactgtgtcacaggaggccttacatcaggatatgcctgaggagagctctgaggaggattcactcaggaggaggctgctggaatcttccctcatttcattatcccgttatgatggagcaggatccagagagcacccaatttacccagacccagcgagggacaatggtgacagatccaggcaccgagctccacgcaatgcccggatgtctgcaccttcgcttggacgctttgtcccaaggcgtttcttgctgcctgagtacttgccttatgctgggatttttcatgaacgtggacagcctggcttggctactcactcttctgttaacagggtcctggcaggggcagtgatcggtgatggacagtctgctgtggccagtaacattgccaatactacctaccggctccagtggtgggacttcactaagtttgacctccctgaaatcagtaatgcttccgtgaatgtgctggtgcagaactgcaagatctacaatgatgccagctgtgacatttctgcagatggccagctcctggcagctttcatccccagcagccagaggggctttcctgatgaaggcatcctggcagtgtactccctggccccccataacctgggcgaaatgctctacaccaagcgatttggtcccaatgccatttcggtgagcctgtccccaatgggcagatatgtaatggtgggcttggcctcacgaaggatcctgctgcacccctccacagagcacatggtggcccaggtcttcaggctgcaacaggcccatggtggagagacctccatgaggagagttttcaacgtcctttatcccatgcctgccgaccagcggagacatgtcagtatcaactctgcccgttggctgcctgagccagggcttggcttggcctatggtactaacaaaggagacctggtgatctgccgaccagaggccttaaactctggtgttgagtactactgggaccagctgaacgagacggtcttcactgtccattccaacagcaggagcagcgagcggcctggaaccagcagagccacatggaggacagacagagacatggggctgatgaatgccattgggcttcagccccggaaccctgccacctcagtgacatctcagggcacccagactctggcccttcagctgcagaatgccgaaacacagactgagagggaggtgccggagccagggacagccgcctcaggtcctggtgaaggtgagggttcagagtatggtgccagtggagaagatgcgctcagcaggatccagaggctgatggcggagggcggcatgacagccgtggtgcagcgggagcagagcaccaccatggcctccatgggcggcttcggcaacaacatcatcgtcagccaccgcattcaccgcagctctcagacgggcactgaacctggtgccgcccacacctcctcaccccagccctccacctctcggggactgctcccagaggccgggcaactggcagagcgaggcctaagcccccggacagcttcctgggaccagcctggtacccctgggcgggagccaacccagccaaccctgccctcttcctcccctgtccccattcctgtttcccttcccagcgctgagggaccaaccctccactgcgagttgaccaataacaaccaccttctggatggtggcagcagcaggggggacgctgcaggccctaggggagaaccacggaacaggtagagacaaacgttgcactggtgcctcccctcgaaccgccaagcagaaaccggacctcacagctgactgggaactggacatgtggaagagctgctggctgcatcagggaacaggaggaggaagagggtcagggtggagaggaagatcagtcagtgggcacaagacagtcaaatgggcaaggcctgcctcggggaactagaaccttccaggatctggagcccgggagagccacactgtgggcttaatgtgaatagaggaacaagtgggtatctctgccaggcaccccactttctcctagtaacatgggctcaggggactcagccctggacagagagcctccagagagtgaacagtcttccagatctgggccaatcatcctggacagaggcccgcgaggcagctttgccctgtccacctgttgggtgggcagagccaccaggaacccagacaccacctccaactctgagccttccagagcttcagcctctcttcgtcgtcttaccccactgaaaccaacagggatcgggccaggctcccagattcttgaggacagggacttcggcatttactaatgggggactactgtggggtaagggggcgcctgcttgcctgatacaggatggggtcaagggacagtgggcaggtcctcactcaggagtggggggtgtaggctggccagcccccagggcttgtccaccagtcttctccccgcaaggccctcagagcagcgcctgtgggtgtcagtattacctgagcctaggccaaagctagcccaaggctggggaaggggaggagactccaggtcagaatgtgaggtctcagtctgtgatttaaggtgttgcatgtggactcttaactgtacgtgtagtttctagtggagaaatcaaggctctgatcattttgtttttagtatgaaaatgtgatttcctttctgtttgtaactcatcatagaaacattgtggtgggaggagaggggatagtctacagctaatgagggaaacaccaaagatcacatcattaaaatgatgacatgcccctc

SEQ ID NO: 3085 - DNA, 5302 bp, Homo sapiens
  source 1..5302: mol_type = unassigned DNA
aggggattaatgaagagccaccagactatctttatggagaatctagattgggaagttaagctaagaatgtgcatttttgaaaaagtttttatggtagaagagaatgtatatcagaggaaagaatgtagagaagaaagcaacattgtccactgggaattgataagttctgcgtagaatttagagttataaggactatctcattggctcctaatgaatgctaaataacaaatggaaattgctatttccatgaggacaacttacaaggacctgtatggcctcattttagctgcttcagtgtgttggagctgttacttgctccttcatttcctgggcctggtgtgacagtggctactgagcgccatgaaggttgtcccagaaaagaatgctgtccggatactctgggggcgagaacggggtgctcgggccatgggagctcagcggcttctgcaggagctggtagaagataaaacccggtggatgaaatgggagggcaagagagtagaactgccggatagtccacgctctaccttcttattggccttcagcccagacaggactctcttagcctccacccatgtgaaccataatatctatattacggaggtgaagactggcaagtgtgttcattccctgattggacaccgccgtactccatggtgtgtcacttttcatcccaccatctcaggccttattgcttctggctgcctagatggggaggttaggatttgggatttacacggtggcagtgaaagctggttcacagatagcaacaatgccattgcctccctggctttccaccctacggctcagctcctgctgattgccactgccaatgagatccacttctgggactggagtcgacgggaaccctttgctgtggtgaagacagctagtgagatggaacgggtccgtctggtgagatttgatccacttggacactacttactcacagcaattgttaacccctctaatcaacagggtgatgacgaaccagagatccccatagatggaacagaattatcccactaccgtcagcgtgccctcctgcaatcacagccagttcgccggacgcctctcctccacaatttcctgcacatgctgtcctcccgctcttctggcatccagaccgagcccttccatcccccggagcaggcctcgtcaacgcagcaggaccagggcctcctgaaccggccgtctgccttcagtacagtccagagcagcactgccggcaacacgctccgcaacctcagtctgggtcctacccgccgctctttgggagggcctctgtctagccacccttctaggtatcaccgagaaatagctcctgggttgacaggatctgagtggacccggacagtactcagtctgaactcccgctctgaggcggaatccatgcccccgcccagaaccagtgcctcttcggtgagtttgctgtctgtgctgagacagcaggaaggtggctctcaggcatctgtgtacacttcagccacagaagggaggggttttccggcatcagggttggcaactgagtcagatggagggaatggctccagccaaaacaactcgggcagcattcgccatgagcttcagtgtgacctgagacgcttctttctggagtatgaccggcttcaggagctggatcagagcctgagtggggaagctccccagacccaacaggcccaggaaatgctcaacaataacattgaatctgagaggccaggcccttcccaccagcccaccccacacagcagtgagaacaactccaacctgtcccgtggccacctgaatcgctgtcgtgcttgccacaatctcctgaccttcaacaacgataccctgcgctgggaaagaaccacacctaactactcctctggcgaggctagttcctcttggcaggtccccagctcctttgagagtgtgccatcaagtggcagccagttgccacctctcgagcggactgagggccaaacgcccagctccagcaggctggagttgagcagctctgctagtccgcaggaggagaggactgtgggggtggcctttaaccaggagacaggccactgggaaagaatttacacccagtccagcagatctggaactgtgtcacaggaggccttacatcaggatatgcctgaggagagctctgaggaggattcactcaggagacggagtcttgctctgtcacctaggctggagtacagcggcgctatcttggctcactgcaagctccgcctcccaggttcatgccattctcctgcctcagcttcccaagtagctgggactacgggagcccaccaccacgcccggctaatttttgcatttttagtagagatggagtttcaccatgttagccaggctggtctcgaactcctgacctcaggtgatctgcccacctcggcctcccaaagtgctgggattacaggcgtgagccaccgcgcctggccgaggctgctggaatcttccctcatttcattatcccgttatgatggagcaggatccagagagcacccaatttacccagacccagcgagattatctcctgctgcatactacgcccagaggatgatccagtatctctcacggagagacagtattcgccagcgctccatgcgctaccaacagaaccgtctccgttcttccacctcctcctcttcctcagacaaccagggtccatcagtagagggaaccgacttggaatttgaggactttgaggacaatggtgacagatccaggcaccgagctccacgcaatgcccggatgtctgcaccttcgcttggacgctttgtcccaaggcgtttcttgctgcctgagtacttgccttatgctgggatttttcatgaacgtggacagcctggcttggctactcactcttctgttaacagggtcctggcaggggcagtgatcggtgatggacagtctgctgtggccagtaacattgccaatactacctaccggctccagtggtgggacttcactaagtttgacctccctgaaatcagtaatgcttccgtgaatgtgctggtgcagaactgcaagatctacaatgatgccagctgtgacatttctgcagatggccagctcctggcagctttcatccccagcagccagaggggctttcctgatgaaggcatcctggcagtgtactccctggccccccataacctgggcgaaatgctctacaccaagcgatttggtcccaatgccatttcggtgagcctgtccccaatgggcagatatgtaatggtgggcttggcctcacgaaggatcctgctgcacccctccacagagcacatggtggcccaggtcttcaggctgcaacaggcccatggtggagagacctccatgaggagagttttcaacgtcctttatcccatgcctgccgaccagcggagacatgtcagtatcaactctgcccgttggctgcctgagccagggcttggcttggcctatggtactaacaaaggagacctggtgatctgccgaccagaggccttaaactctggtgttgagtactactgggaccagctgaacgagacggtcttcactgtccattccaacagcaggagcagcgagcggcctggaaccagcagagccacatggaggacagacagagacatggggctgatgaatgccattgggcttcagccccggaaccctgccacctcagtgacatctcagggcacccagactctggcccttcagctgcagaatgccgaaacacagactgagagggaggtgccggagccagggacagccgcctcaggtcctggtgaaggtgagggttcagagtatggtgccagtggagaagatgcgctcagcaggatccagaggctgatggcggagggcggcatgacagccgtggtgcagcgggagcagagcaccaccatggcctccatgggcggcttcggcaacaacatcatcgtcagccaccgcattcaccgcagctctcagacgggcactgaacctggtgccgcccacacctcctcaccccagccctccacctctcggggactgctcccagaggccgggcaactggcagagcgaggcctaagcccccggacagcttcctgggaccagcctggtacccctgggcgggagccaacccagccaaccctgccctcttcctcccctgtccccattcctgtttcccttcccagcgctgagggaccaaccctccactgcgagttgaccaataacaaccaccttctggatggtggcagcagcaggggggacgctgcaggccctaggggagaaccacggaacaggtagagacaaacgttgcactggtgcctcccctcgaaccgccaagcagaaaccggacctcacagctgactgggaactggacatgtggaagagctgctggctgcatcagggaacaggaggaggaagagggtcagggtggagaggaagatcagtcagtgggcacaagacagtcaaatgggcaaggcctgcctcggggaactagaaccttccaggatctggagcccgggagagccacactgtgggcttaatgtgaatagaggaacaagtgggtatctctgccaggcaccccactttctcctagtaacatgggctcaggggactcagccctggacagagagcctccagagagtgaacagtcttccagatctgggccaatcatcctggacagaggcccgcgaggcagctttgccctgtccacctgttgggtgggcagagccaccaggaacccagacaccacctccaactctgagccttccagagcttcagcctctcttcgtcgtcttaccccactgaaaccaacagggatcgggccaggctcccagattcttgaggacagggacttcggcatttactaatgggggactactgtggggtaagggggcgcctgcttgcctgatacaggatggggtcaagggacagtgggcaggtcctcactcaggagtggggggtgtaggctggccagcccccagggcttgtccaccagtcttctccccgcaaggccctcagagcagcgcctgtgggtgtcagtattacctgagcctaggccaaagctagcccaaggctggggaaggggaggagactccaggtcagaatgtgaggtctcagtctgtgatttaaggtgttgcatgtggactcttaactgtacgtgtagtttctagtggagaaatcaaggctctgatcattttgtttttagtatgaaaatgtgatttcctttctgtttgtaactcatcatagaaacattgtggtgggaggagaggggatagtctacagctaatgagggaaacaccaaagatcacatcattaaaatgatgacatgcccctc

SEQ ID NO: 3086 - DNA, 5023 bp, Homo sapiens
  source 1..5023: mol_type = unassigned DNA
aggggattaatgaagagccaccagactatctttatggagaatctagattgggaagttaagctaagaatgtgcatttttgaaaaagtttttatggtagaagagaatgtatatcagaggaaagaatgtagagaagaaagcaacattgtccactgggaattgataagttctgcgtagaatttagagttataaggactatctcattggctcctaatgaatgctaaataacaaatggaaattgctatttccatgaggacaacttacaaggacctgtatggcctcattttagctgcttcagtgtgttggagctgttacttgctccttcatttcctgggcctggtgtgacagtggctactgagcgccatgaaggttgtcccagaaaagaatgctgtccggatactctgggggcgagaacggggtgctcgggccatgggagctcagcggcttctgcaggagctggtagaagataaaacccggtggatgaaatgggagggcaagagagtagaactgccggatagtccacgctctaccttcttattggccttcagcccagacaggactctcttagcctccacccatgtgaaccataatatctatattacggaggtgaagactggcaagtgtgttcattccctgattggacaccgccgtactccatggtgtgtcacttttcatcccaccatctcaggccttattgcttctggctgcctagatggggaggttaggatttgggatttacacggtggcagtgaaagctggttcacagatagcaacaatgccattgcctccctggctttccaccctacggctcagctcctgctgattgccactgccaatgagatccacttctgggactggagtcgacgggaaccctttgctgtggtgaagacagctagtgagatggaacgggtccgtctggtgagatttgatccacttggacactacttactcacagcaattgttaacccctctaatcaacagggtgatgacgaaccagagatccccatagatggaacagaattatcccactaccgtcagcgtgccctcctgcaatcacagccagttcgccggacgcctctcctccacaatttcctgcacatgctgtcctcccgctcttctggcatccagaccgagcccttccatcccccggagcaggcctcgtcaacgcagcaggaccagggcctcctgaaccggccgtctgccttcagtacagtccagagcagcactgccggcaacacgctccgcaacctcagtctgggtcctacccgccgctctttgggagggcctctgtctagccacccttctaggtatcaccgagaaatagctcctgggttgacaggatctgagtggacccggacagtactcagtctgaactcccgctctgaggcggaatccatgcccccgcccagaaccagtgcctcttcggtgagtttgctgtctgtgctgagacagcaggaaggtggctctcaggcatctgtgtacacttcagccacagaagggaggggttttccggcatcagggttggcaactgagtcagatggagggaatggctccagccaaaacaactcgggcagcattcgccatgagcttcagtgtgacctgagacgcttctttctggagtatgaccggcttcaggagctggatcagagcctgagtggggaagctccccagacccaacaggcccaggaaatgctcaacaataacattgaatctgagaggccaggcccttcccaccagcccaccccacacagcagtgagaacaactccaacctgtcccgtggccacctgaatcgctgtcgtgcttgccacaatctcctgaccttcaacaacgataccctgcgctgggaaagaaccacacctaactactcctctggcgaggctagttcctcttggcaggtccccagctcctttgagagtgtgccatcaagtggcagccagttgccacctctcgagcggactgagggccaaacgcccagctccagcaggctggagttgagcagctctgctagtccgcaggaggagaggactgtgggggtggcctttaaccaggagacaggccactgggaaagaatttacacccagtccagcagatctggaactgtgtcacaggaggccttacatcaggatatgcctgaggagagctctgaggaggattcactcaggaggaggctgctggaatcttccctcatttcattatcccgttatgatggagcaggatccagagagcacccaatttacccagacccagcgagattatctcctgctgcatactacgcccagaggatgatccagtatctctcacggagagacagtattcgccagcgctccatgcgctaccaacagaaccgtctccgttcttccacctcctcctcttcctcagacaaccagggtccatcagtagagggaaccgacttggaatttgaggactttgaggacaatggtgacagatccaggcaccgagctccacgcaatgcccggatgtctgcaccttcgcttggacgctttgtcccaaggcgtttcttgctgcctgagtacttgccttatgctgggatttttcatgaacgtggacagcctggcttggctactcactcttctgttaacagggtcctggcaggggcagtgatcggtgatggacagtctgctgtggccagtaacattgccaatactacctaccggctccagtggtgggacttcactaagtttgacctccctgaaatcagtaatgcttccgtgaatgtgctggtgcagaactgcaagatctacaatgatgccagctgtgacatttctgcagatggccagctcctggcagctttcatccccagcagccagaggggctttcctgatgaaggcatcctggcagtgtactccctggccccccataacctgggcgaaatgctctacaccaagcgatttggtcccaatgccatttcggtgagcctgtccccaatgggcagatatgtaatggtgggcttggcctcacgaaggatcctgctgcacccctccacagagcacatggtggcccaggtcttcaggctgcaacaggcccatggtggagagacctccatgaggagagttttcaacgtcctttatcccatgcctgccgaccagcggagacatgtcagtatcaactctgcccgttggctgcctgagccagggcttggcttggcctatggtactaacaaaggagacctggtgatctgccgaccagaggccttaaactctggtgttgagtactactgggaccagctgaacgagacggtcttcactgtccattccaacagcaggagcagcgagcggcctggaaccagcagagccacatggaggacagacagagacatggggctgatgaatgccattgggcttcagccccggaaccctgccacctcagtgacatctcagggcacccagactctggcccttcagctgcagaatgccgaaacacagactgagagggaggtgccggagccagggacagccgcctcaggtcctggtgaaggtgagggttcagagtatggtgccagtggagaagatgcgctcagcaggatccagaggctgatggcggagggcggcatgacagccgtggtgcagcgggagcagagcaccaccatggcctccatgggcggcttcggcaacaacatcatcgtcagccaccgcattcaccgcagctctcagacgggcactgaacctggtgccgcccacacctcctcaccccagccctccacctctcggggactgctcccagaggccgggcaactggcagagcgaggcctaagcccccggacagcttcctgggaccagcctggtacccctgggcgggagccaacccagccaaccctgccctcttcctcccctgtccccattcctgtttcccttcccagcgctgagggaccaaccctccactgcgagttgaccaataacaaccaccttctggatggtggcagcagcaggggggacgctgcaggccctaggggagaaccacggaacaggtagagacaaacgttgcactggtgcctcccctcgaaccgccaagcagaaaccggacctcacagctgactgggaactggacatgtggaagagctgctggctgcatcagggaacaggaggaggaagagggtcagggtggagaggaagatcagtcagtgggcacaagacagtcaaatgggcaaggcctgcctcggggaactagaaccttccaggatctggagcccgggagagccacactgtgggcttaatgtgaatagaggaacaagtgggtatctctgccaggcaccccactttctcctagtaacatgggctcaggggactcagccctggacagagagcctccagagagtgaacagtcttccagatctgggccaatcatcctggacagaggcccgcgaggcagctttgccctgtccacctgttgggtgggcagagccaccaggaacccagacaccacctccaactctgagccttccagagcttcagcctctcttcgtcgtcttaccccactgaaaccaacagggatcgggccaggctcccagattcttgaggacagggacttcggcatttactaatgggggactactgtggggtaagggggcgcctgcttgcctgatacaggatggggtcaagggacagtgggcaggtcctcactcaggagtggggggtgtaggctggccagcccccagggcttgtccaccagtcttctccccgcaaggccctcagagcagcgcctgtgggtgtcagtattacctgagcctaggccaaagctagcccaaggctggggaaggggaggagactccaggtcagaatgtgaggtctcagtctgtgatttaaggtgttgcatgtggactcttaactgtacgtgtagtttctagtggagaaatcaaggctctgatcattttgtttttagtatgaaaatgtgatttcctttctgtttgtaactcatcatagaaacattgtggtgggaggagaggggatagtctacagctaatgagggaaacaccaaagatcacatcattaaaatgatgacatgcccctc

SEQ ID NO: 3087 - DNA, 5206 bp, Homo sapiens
  source 1..5206: mol_type = unassigned DNA
aggggattaatgaagagccaccagactatctttatggagaatctagattgggaagttaagctaagaatgtgcatttttgaaaaagtttttatggtagaagagaatgtatatcagaggaaagaatgtagagaagaaagcaacattgtccactgggaattgataagttctgcgtagaatttagagttataaggactatctcattggctcctaatgaatgctaaataacaaatggaaattgctatttccatgaggacaacttacaaggacctgtatggcctcattttagctgcttcagtgtgttggagctgttacttgctccttcatttcctgggcctggtgtgacagtggctactgagcgccatgaaggttgtcccagaaaagaatgctgtccggatactctgggggcgagaacggggtgctcgggccatgggagctcagcggcttctgcaggagctggtagaagataaaacccggtggatgaaatgggagggcaagagagtagaactgccggatagtccacgctctaccttcttattggccttcagcccagacaggactctcttagcctccacccatgtgaaccataatatctatattacggaggtgaagactggcaagtgtgttcattccctgattggacaccgccgtactccatggtgtgtcacttttcatcccaccatctcaggccttattgcttctggctgcctagatggggaggttaggatttgggatttacacggtggcagtgaaagctggttcacagatagcaacaatgccattgcctccctggctttccaccctacggctcagctcctgctgattgccactgccaatgagatccacttctgggactggagtcgacgggaaccctttgctgtggtgaagacagctagtgagatggaacgggtccgtctggtgagatttgatccacttggacactacttactcacagcaattgttaacccctctaatcaacagggtgatgacgaaccagagatccccatagatggaacagaattatcccactaccgtcagcgtgccctcctgcaatcacagccagttcgccggacgcctctcctccacaatttcctgcacatgctgtcctcccgctcttctggcatccaggtgggagagcaaagcacagtgcaagattctgctaccccctcacccccaccgcctccccctcagccctccacggagcgccccaggacttccgcttacatcaggctccgacagcgggtcagttaccccacagctgagtgctgccagcaccttgggatcctgtgcctttgcagccgctgctctggcactcgagttccttccctcttgccacaccaggacagtgtcccccctgcttctgccagagctactaccccttccttttcttttgtacagaccgagcccttccatcccccggagcaggcctcgtcaacgcagcaggaccagggcctcctgaaccggccgtctgccttcagtacagtccagagcagcactgccggcaacacgctccgcaacctcagtctgggtcctacccgccgctctttgggagggcctctgtctagccacccttctaggtatcaccgagaaatagctcctgggttgacaggatctgagtggacccggacagtactcagtctgaactcccgctctgaggcggaatccatgcccccgcccagaaccagtgcctcttcggtgagtttgctgtctgtgctgagacagcaggaaggtggctctcaggcatctgtgtacacttcagccacagaagggaggggttttccggcatcagggttggcaactgagtcagatggagggaatggctccagccaaaacaactcgggcagcattcgccatgagcttcagtgtgacctgagacgcttctttctggagtatgaccggcttcaggagctggatcagagcctgagtggggaagctccccagacccaacaggcccaggaaatgctcaacaataacattgaatctgagaggccaggcccttcccaccagcccaccccacacagcagtgagaacaactccaacctgtcccgtggccacctgaatcgctgtcgtgcttgccacaatctcctgaccttcaacaacgataccctgcgctgggaaagaaccacacctaactactcctctggcgaggctagttcctcttggcaggtccccagctcctttgagagtgtgccatcaagtggcagccagttgccacctctcgagcggactgagggccaaacgcccagctccagcaggctggagttgagcagctctgctagtccgcaggaggagaggactgtgggggtggcctttaaccaggagacaggccactgggaaagaatttacacccagtccagcagatctggaactgtgtcacaggaggccttacatcaggatatgcctgaggagagctctgaggaggattcactcaggagattatctcctgctgcatactacgcccagaggatgatccagtatctctcacggagagacagtattcgccagcgctccatgcgctaccaacagaaccgtctccgttcttccacctcctcctcttcctcagacaaccagggtccatcagtagagggaaccgacttggaatttgaggactttgaggacaatggtgacagatccaggcaccgagctccacgcaatgcccggatgtctgcaccttcgcttggacgctttgtcccaaggcgtttcttgctgcctgagtacttgccttatgctgggatttttcatgaacgtggacagcctggcttggctactcactcttctgttaacagggtcctggcaggggcagtgatcggtgatggacagtctgctgtggccagtaacattgccaatactacctaccggctccagtggtgggacttcactaagtttgacctccctgaaatcagtaatgcttccgtgaatgtgctggtgcagaactgcaagatctacaatgatgccagctgtgacatttctgcagatggccagctcctggcagctttcatccccagcagccagaggggctttcctgatgaaggcatcctggcagtgtactccctggccccccataacctgggcgaaatgctctacaccaagcgatttggtcccaatgccatttcggtgagcctgtccccaatgggcagatatgtaatggtgggcttggcctcacgaaggatcctgctgcacccctccacagagcacatggtggcccaggtcttcaggctgcaacaggcccatggtggagagacctccatgaggagagttttcaacgtcctttatcccatgcctgccgaccagcggagacatgtcagtatcaactctgcccgttggctgcctgagccagggcttggcttggcctatggtactaacaaaggagacctggtgatctgccgaccagaggccttaaactctggtgttgagtactactgggaccagctgaacgagacggtcttcactgtccattccaacagcaggagcagcgagcggcctggaaccagcagagccacatggaggacagacagagacatggggctgatgaatgccattgggcttcagccccggaaccctgccacctcagtgacatctcagggcacccagactctggcccttcagctgcagaatgccgaaacacagactgagagggaggtgccggagccagggacagccgcctcaggtcctggtgaaggtgagggttcagagtatggtgccagtggagaagatgcgctcagcaggatccagaggctgatggcggagggcggcatgacagccgtggtgcagcgggagcagagcaccaccatggcctccatgggcggcttcggcaacaacatcatcgtcagccaccgcattcaccgcagctctcagacgggcactgaacctggtgccgcccacacctcctcaccccagccctccacctctcggggactgctcccagaggccgggcaactggcagagcgaggcctaagcccccggacagcttcctgggaccagcctggtacccctgggcgggagccaacccagccaaccctgccctcttcctcccctgtccccattcctgtttcccttcccagcgctgagggaccaaccctccactgcgagttgaccaataacaaccaccttctggatggtggcagcagcaggggggacgctgcaggccctaggggagaaccacggaacaggtagagacaaacgttgcactggtgcctcccctcgaaccgccaagcagaaaccggacctcacagctgactgggaactggacatgtggaagagctgctggctgcatcagggaacaggaggaggaagagggtcagggtggagaggaagatcagtcagtgggcacaagacagtcaaatgggcaaggcctgcctcggggaactagaaccttccaggatctggagcccgggagagccacactgtgggcttaatgtgaatagaggaacaagtgggtatctctgccaggcaccccactttctcctagtaacatgggctcaggggactcagccctggacagagagcctccagagagtgaacagtcttccagatctgggccaatcatcctggacagaggcccgcgaggcagctttgccctgtccacctgttgggtgggcagagccaccaggaacccagacaccacctccaactctgagccttccagagcttcagcctctcttcgtcgtcttaccccactgaaaccaacagggatcgggccaggctcccagattcttgaggacagggacttcggcatttactaatgggggactactgtggggtaagggggcgcctgcttgcctgatacaggatggggtcaagggacagtgggcaggtcctcactcaggagtggggggtgtaggctggccagcccccagggcttgtccaccagtcttctccccgcaaggccctcagagcagcgcctgtgggtgtcagtattacctgagcctaggccaaagctagcccaaggctggggaaggggaggagactccaggtcagaatgtgaggtctcagtctgtgatttaaggtgttgcatgtggactcttaactgtacgtgtagtttctagtggagaaatcaaggctctgatcattttgtttttagtatgaaaatgtgatttcctttctgtttgtaactcatcatagaaacattgtggtgggaggagaggggatagtctacagctaatgagggaaacaccaaagatcacatcattaaaatgatgacatgcccctc

SEQ ID NO: 3088 - DNA, 5351 bp, Homo sapiens
  source 1..5351: mol_type = unassigned DNA
aaatgaagggcccttaatcataagcaatttcctagttacacgacctcagtgctcccagaaggggattaatgaagagccaccagactatctttatggagaatctagattgggaagttaagctaagaatgtgcatttttgaaaaagtttttatggtagaagagaatgtatatcagaggaaagaatgtagagaagaaagcaacattgtccactgggaattgataagttctgcgtagaatttagagttataaggactatctcattggctcctaatgaatgctaaataacaaatggaaattgctatttccatgaggacaacttacaaggacctgtatggcctcattttagctgcttcagtgtgttggagctgttacttgctccttcatttcctgggcctggtgtgacagtggctactgagcgccatgaaggttgtcccagaaaagaatgctgtccggatactctgggggcgagaacggggtgctcgggccatgggagctcagcggcttctgcaggagctggtagaagataaaacccggtggatgaaatgggagggcaagagagtagaactgccggatagtccacgctctaccttcttattggccttcagcccagacaggactctcttagcctccacccatgtgaaccataatatctatattacggaggtgaagactggcaagtgtgttcattccctgattggacaccgccgtactccatggtgtgtcacttttcatcccaccatctcaggccttattgcttctggctgcctagatggggaggttaggatttgggatttacacggtggcagtgaaagctggttcacagatagcaacaatgccattgcctccctggctttccaccctacggctcagctcctgctgattgccactgccaatgagatccacttctgggactggagtcgacgggaaccctttgctgtggtgaagacagctagtgagatggaacgggtccgtctggtgagatttgatccacttggacactacttactcacagcaattgttaacccctctaatcaacagggtgatgacgaaccagagatccccatagatggaacagaattatcccactaccgtcagcgtgccctcctgcaatcacagccagttcgccggacgcctctcctccacaatttcctgcacatgctgtcctcccgctcttctggcatccaggtgggagagcaaagcacagtgcaagattctgctaccccctcacccccaccgcctccccctcagccctccacggagcgccccaggacttccgcttacatcaggctccgacagcgggtcagttaccccacagctgagtgctgccagcaccttgggatcctgtgcctttgcagccgctgctctggcactcgagttccttccctcttgccacaccaggacagtgtcccccctgcttctgccagagctactaccccttccttttcttttgtacagaccgagcccttccatcccccggagcaggcctcgtcaacgcagcaggaccagggcctcctgaaccggccgtctgccttcagtacagtccagagcagcactgccggcaacacgctccgcaacctcagtctgggtcctacccgccgctctttgggagggcctctgtctagccacccttctaggtatcaccgagaaatagctcctgggttgacaggatctgagtggacccggacagtactcagtctgaactcccgctctgaggcggaatccatgcccccgcccagaaccagtgcctcttcggtgagtttgctgtctgtgctgagacagcaggaaggtggctctcaggcatctgtgtacacttcagccacagaagggaggggttttccggcatcagggttggcaactgagtcagatggagggaatggctccagccaaaacaactcgggcagcattcgccatgagcttcagtgtgacctgagacgcttctttctggagtatgaccggcttcaggagctggatcagagcctgagtggggaagctccccagacccaacaggcccaggaaatgctcaacaataacattgaatctgagaggccaggcccttcccaccagcccaccccacacagcagtgagaacaactccaacctgtcccgtggccacctgaatcgctgtcgtgcttgccacaatctcctgaccttcaacaacgataccctgcgctgggaaagaaccacacctaactactcctctggcgaggctagttcctcttggcaggtccccagctcctttgagagtgtgccatcaagtggcagccagttgccacctctcgagcggactgagggccaaacgcccagctccagcaggctggagttgagcagctctgctagtccgcaggaggagaggactgtgggggtggcctttaaccaggagacaggccactgggaaagaatttacacccagtccagcagatctggaactgtgtcacaggaggccttacatcaggatatgcctgaggagagctctgaggaggattcactcaggaggaggctgctggaatcttccctcatttcattatcccgttatgatggagcaggatccagagagcacccaatttacccagacccagcgagattatctcctgctgcatactacgcccagaggatgatccagtatctctcacggagagacagtattcgccagcgctccatgcgctaccaacagaaccgtctccgttcttccacctcctcctcttcctcagacaaccagggtccatcagtagagggaaccgacttggaatttgaggactttgaggacaatggtgacagatccaggcaccgagctccacgcaatgcccggatgtctgcaccttcgcttggacgctttgtcccaaggcgtttcttgctgcctgagtacttgccttatgctgggatttttcatgaacgtggacagcctggcttggctactcactcttctgttaacagggtcctggcaggggcagtgatcggtgatggacagtctgctgtggccagtaacattgccaatactacctaccggctccagtggtgggacttcactaagtttgacctccctgaaatcagtaatgcttccgtgaatgtgctggtgcagaactgcaagatctacaatgatgccagctgtgacatttctgcagatggccagctcctggcagctttcatccccagcagccagaggggctttcctgatgaaggcatcctggcagtgtactccctggccccccataacctgggcgaaatgctctacaccaagcgatttggtcccaatgccatttcggtgagcctgtccccaatgggcagatatgtaatggtgggcttggcctcacgaaggatcctgctgcacccctccacagagcacatggtggcccaggtcttcaggctgcaacaggcccatggtggagagacctccatgaggagagttttcaacgtcctttatcccatgcctgccgaccagcggagacatgtcagtatcaactctgcccgttggctgcctgagccagggcttggcttggcctatggtactaacaaaggagacctggtgatctgccgaccagaggccttaaactctggtgttgagtactactgggaccagctgaacgagacggtcttcactgtccattccaacagcaggagcagcgagcggcctggaaccagcagagccacatggaggacagacagagacatggggctgatgaatgccattgggcttcagccccggaaccctgccacctcagtgacatctcagggcacccagactctggcccttcagctgcagaatgccgaaacacagactgagagggaggtgccggagccagggacagccgcctcaggtcctggtgaaggtgagggttcagagtatggtgccagtggagaagatgcgctcagcaggatccagaggctgatggcggagggcggcatgacagccgtggtgcagcgggagcagagcaccaccatggcctccatgggcggcttcggcaacaacatcatcgtcagccaccgcattcaccgcagctctcagacgggcactgaacctggtgccgcccacacctcctcaccccagccctccacctctcggggactgctcccagaggccgggcaactggcagagcgaggcctaagcccccggacagcttcctgggaccagcctggtacccctgggcgggagccaacccagccaaccctgccctcttcctcccctgtccccattcctgtttcccttcccagcgctgagggaccaaccctccactgcgagttgaccaataacaaccaccttctggatggtggcagcagcaggggggacgctgcaggccctaggggagaaccacggaacaggtagagacaaacgttgcactggtgcctcccctcgaaccgccaagcagaaaccggacctcacagctgactgggaactggacatgtggaagagctgctggctgcatcagggaacaggaggaggaagagggtcagggtggagaggaagatcagtcagtgggcacaagacagtcaaatgggcaaggcctgcctcggggaactagaaccttccaggatctggagcccgggagagccacactgtgggcttaatgtgaatagaggaacaagtgggtatctctgccaggcaccccactttctcctagtaacatgggctcaggggactcagccctggacagagagcctccagagagtgaacagtcttccagatctgggccaatcatcctggacagaggcccgcgaggcagctttgccctgtccacctgttgggtgggcagagccaccaggaacccagacaccacctccaactctgagccttccagagcttcagcctctcttcgtcgtcttaccccactgaaaccaacagggatcgggccaggctcccagattcttgaggacagggacttcggcatttactaatgggggactactgtggggtaagggggcgcctgcttgcctgatacaggatggggtcaagggacagtgggcaggtcctcactcaggagtggggggtgtaggctggccagcccccagggcttgtccaccagtcttctccccgcaaggccctcagagcagcgcctgtgggtgtcagtattacctgagcctaggccaaagctagcccaaggctggggaaggggaggagactccaggtcagaatgtgaggtctcagtctgtgatttaaggtgttgcatgtggactcttaactgtacgtgtagtttctagtggagaaatcaaggctctgatcattttgtttttagtatgaaaatgtgatttcctttctgtttgtaactcatcatagaaacattgtggtgggaggagaggggatagtctacagctaatgagggaaacaccaaagatcacatcattaaaatgatgacatgcccct

SEQ ID NO: 3089 - DNA, 522 bp, Homo sapiens
  source 1..522: mol_type = unassigned DNA
gagctgtttttcggcgctcggctgtggttccttgaacgattgcttgggcgttcctcctttgatgtctggggcgttcttgtattcggtgatcttttgcgccgtcttcttgcttgatgtctcctgagcggcggcggcgccgggtcgagggctgagttgtccgcgaggccccgcgctcaagccgccttctcctgccggtcggtagaacggaccccttcctttattcctgtctcctctttctttttccctgtggctcagcccgttcgctggactgcaaaccgagctcccgtctgccttgcagtggagaagagaaagagaaaatgagtgagaaagatttccatgaggacaacttacaaggacctgtatggcctcattttagctgcttcagtgtgttggagctgttacttgctccttcatttcctgggcctggtgtgacagtggctactgagcgccatgaaggttgtcccagaaaagaatgctgtccggatactctgggggcgagaacggggtgctcgggccatggga

SEQ ID NO: 3090 - DNA, 4102 bp, Homo sapiens
  source 1..4102: mol_type = unassigned DNA
attcggtgatcttttgcgccgtcttcttgcttgatgtctcctgagcggcggcggcgccgggtcgagggctgagttgtccgcgaggccccgcgctcaagccgccttctcctgccggtcggtagaacggaccccttcctttattcctgtctcctctttctttttccctgtggctcagcccgttcgctggactgcaaaccgagctcccgtctgccttgcagctgcttcagtgtgttggagctgttacttgctccttcatttcctgggcctggtgtgacagtggctactgagcgccatgaaggttgtcccagaaaagaatgctgtccggatactctgggggcgagaacggggtgctcgggccatgggagctcagcggcttctgcaggagctggtagaagataaaacccggtggatgaaatgggagggcaagagagtagaactgccggatagtccacgctctaccttcttattggccttcagcccagacaggactctcttagcctccacccatgtgaaccataatatctatattacggaggtgaagactggcaagtgtgttcattccctgattggacaccgccgtactccatggtgtgtcacttttcatcccaccatctcaggccttattgcttctggctgcctagatggggaggttaggatttgggatttacacggtggcagtgaaagctggttcacagatagcaacaatgccattgcctccctggctttccaccctacggctcagctcctgctgattgccactgccaatgagatccacttctgggactggagtcgacgggaaccctttgctgtggtgaagacagctagtgagatggaacgggtccgtctggtgagatttgatccacttggacactacttactcacagcaattgttaacccctctaatcaacagggtgatgacgaaccagagatccccatagatggaacagaattatcccactaccgtcagcgtgccctcctgcaatcacagccagttcgccggacgcctctcctccacaatttcctgcacatgctgtcctcccgctcttctggcatccaggtgggagagcaaagcacagtgcaagattctgctaccccctcacccccaccgcctccccctcagccctccacggagcgccccaggacttccgcttacatcaggctccgacagcgggtcagttaccccacagctgagtgctgccagcaccttgggatcctgtgcctttgcagccgctgctctggcactcgagttccttccctcttgccacaccaggacagtgtcccccctgcttctgccagagctactaccccttccttttcttttgtacagaccgagcccttccatcccccggagcaggcctcgtcaacgcagcaggaccagggcctcctgaaccggccgtctgccttcagtacagtccagagcagcactgccggcaacacgctccgcaacctcagtctgggtcctacccgccgctctttgggagggcctctgtctagccacccttctaggtatcaccgagaaatagctcctgggttgacaggatctgagtggacccggacagtactcagtctgaactcccgctctgaggcggaatccatgcccccgcccagaaccagtgcctcttcggtgagtttgctgtctgtgctgagacagcaggaaggtggctctcaggcatctgtgtacacttcagccacagaagggaggggttttccggcatcagggttggcaactgagtcagatggagggaatggctccagccaaaacaactcgggcagcattcgccatgagcttcagtgtgacctgagacgcttctttctggagtatgaccggcttcaggagctggatcagagcctgagtggggaagctccccagacccaacaggcccaggaaatgctcaacaataacattgaatctgagaggccaggcccttcccaccagcccaccccacacagcagtgagaacaactccaacctgtcccgtggccacctgaatcgctgtcgtgcttgccacaatctcctgaccttcaacaacgataccctgcgctgggaaagaaccacacctaactactcctctggcgaggctagttcctcttggcaggtccccagctcctttgagagtgtgccatcaagtggcagccagttgccacctctcgagcggactgagggccaaacgcccagctccagcaggctggagttgagcagctctgctagtccgcaggaggagaggactgtgggggtggcctttaaccaggagacaggccactgggaaagaatttacacccagtccagcagatctggaactgtgtcacaggaggccttacatcaggatatgcctgaggagagctctgaggaggattcactcaggagattatctcctgctgcatactacgcccagaggatgatccagtatctctcacggagagacagtattcgccagcgctccatgcgctaccaacagaaccgtctccgttcttccacctcctcctcttcctcagacaaccagggtccatcagtagagggaaccgacttggaatttgaggactttgaggacaatggtgacagatccaggcaccgagctccacgcaatgcccggatgtctgcaccttcgcttggacgctttgtcccaaggcgtttcttgctgcctgagtacttgccttatgctgggatttttcatgaacgtggacagcctggcttggctactcactcttctgttaacagggtcctggcaggggcagtgatcggtgatggacagtctgctgtggccagtaacattgccaatactacctaccggctccagtggtgggacttcactaagtttgacctccctgaaatcagtaatgcttccgtgaatgtgctggtgcagaactgcaagatctacaatgatgccagctgtgacatttctgcagatggccagctcctggcagctttcatccccagcagccagaggggctttcctgatgaaggcatcctggcagtgtactccctggccccccataacctgggcgaaatgctctacaccaagcgatttggtcccaatgccatttcggtgagcctgtccccaatgggcagatatgtaatggtgggcttggcctcacgaaggatcctgctgcacccctccacagagcacatggtggcccaggtcttcaggctgcaacaggcccatggtggagagacctccatgaggagagttttcaacgtcctttatcccatgcctgccgaccagcggagacatgtcagtatcaactctgcccgttggctgcctgagccagggcttggcttggcctatggtactaacaaaggagacctggtgatctgccgaccagaggccttaaactctggtgttgagtactactgggaccagctgaacgagacggtcttcactgtccattccaacagcaggagcagcgagcggcctggaaccagcagagccacatggaggacagacagagacatggggctgatgaatgccattgggcttcagccccggaaccctgccacctcagtgacatctcagggcacccagactctggcccttcagctgcagaatgccgaaacacagactgagagggaggtgccggagccagggacagccgcctcaggtcctggtgaaggtgagggttcagagtatggtgccagtggagaagatgcgctcagcaggatccagaggctgatggcggagggcggcatgacagccgtggtgcagcgggagcagagcaccaccatggcctccatgggcggcttcggcaacaacatcatcgtcagccaccgcattcaccgcagctctcagacgggcactgaacctggtgccgcccacacctcctcaccccagccctccacctctcggggactgctcccagaggccgggcaactggcagagcgaggcctaagcccccggacagcttcctgggaccagcctggtacccctgggcgggagccaacccagccaaccctgccctcttcctcccctgtccccattcctgtttcccttcccagcgctgagggaccaaccctccactgcgagttgaccaataacaaccaccttctggatggtggcagcagcaggggggacgctgcaggccctaggggagaaccacggaacaggtag

SEQ ID NO: 3091 - DNA, 5067 bp, Homo sapiens
  source 1..5067: mol_type = unassigned DNA
tcttgcttgatgtctcctgagcggcggcggcgccgggtcgagggctgagttgtccgcgaggccccgcgctcaagccgccttctcctgccggtcggtagaacggaccccttcctttattcctgtctcctctttctttttccctgtggctcagcccgttcgctggactgcaaaccgagctcccgtctgccttgcagatttccatgaggacaacttacaaggacctgtatggcctcattttagctgcttcagtgtgttggagctgttacttgctccttcatttcctgggcctggtgtgacagtggctactgagcgccatgaaggttgtcccagaaaagaatgctgtccggatactctgggggcgagaacggggtgctcgggccatgggagctcagcggcttctgcaggagctggtagaagataaaacccggtggatgaaatgggagggcaagagagtagaactgccggatagtccacgctctaccttcttattggccttcagcccagacaggactctcttagcctccacccatgtgaaccataatatctatattacggaggtgaagactggcaagtgtgttcattccctgattggacaccgccgtactccatggtgtgtcacttttcatcccaccatctcaggccttattgcttctggctgcctagatggggaggttaggatttgggatttacacggtggcagtgaaagctggttcacagatagcaacaatgccattgcctccctggctttccaccctacggctcagctcctgctgattgccactgccaatgagatccacttctgggactggagtcgacgggaaccctttgctgtggtgaagacagctagtgagatggaacgggtccgtctggtgagatttgatccacttggacactacttactcacagcaattgttaacccctctaatcaacagggtgatgacgaaccagagatccccatagatggaacagaattatcccactaccgtcagcgtgccctcctgcaatcacagccagttcgccggacgcctctcctccacaatttcctgcacatgctgtcctcccgctcttctggcatccaggtgggagagcaaagcacagtgcaagattctgctaccccctcacccccaccgcctccccctcagccctccacggagcgccccaggacttccgcttacatcaggctccgacagcgggtcagttaccccacagctgagtgctgccagcaccttgggatcctgtgcctttgcagccgctgctctggcactcgagttccttccctcttgccacaccaggacagtgtcccccctgcttctgccagagctactaccccttccttttcttttgtacagaccgagcccttccatcccccggagcaggcctcgtcaacgcagcaggaccagggcctcctgaaccggccgtctgccttcagtacagtccagagcagcactgccggcaacacgctccgcaacctcagtctgggtcctacccgccgctctttgggagggcctctgtctagccacccttctaggtatcaccgagaaatagctcctgggttgacaggatctgagtggacccggacagtactcagtctgaactcccgctctgaggcggaatccatgcccccgcccagaaccagtgcctcttcggtgagtttgctgtctgtgctgagacagcaggaaggtggctctcaggcatctgtgtacacttcagccacagaagggaggggttttccggcatcagggttggcaactgagtcagatggagggaatggctccagccaaaacaactcgggcagcattcgccatgagcttcagtgtgacctgagacgcttctttctggagtatgaccggcttcaggagctggatcagagcctgagtggggaagctccccagacccaacaggcccaggaaatgctcaacaataacattgaatctgagaggccaggcccttcccaccagcccaccccacacagcagtgagaacaactccaacctgtcccgtggccacctgaatcgctgtcgtgcttgccacaatctcctgaccttcaacaacgataccctgcgctgggaaagaaccacacctaactactcctctggcgaggctagttcctcttggcaggtccccagctcctttgagagtgtgccatcaagtggcagccagttgccacctctcgagcggactgagggccaaacgcccagctccagcaggctggagttgagcagctctgctagtccgcaggaggagaggactgtgggggtggcctttaaccaggagacaggccactgggaaagaatttacacccagtccagcagatctggaactgtgtcacaggaggccttacatcaggatatgcctgaggagagctctgaggaggattcactcaggaggaggctgctggaatcttccctcatttcattatcccgttatgatggagcaggatccagagagcacccaatttacccagacccagcgagggacaatggtgacagatccaggcaccgagctccacgcaatgcccggatgtctgcaccttcgcttggacgctttgtcccaaggcgtttcttgctgcctgagtacttgccttatgctgggatttttcatgaacgtggacagcctggcttggctactcactcttctgttaacagggtcctggcaggggcagtgatcggtgatggacagtctgctgtggccagtaacattgccaatactacctaccggctccagtggtgggacttcactaagtttgacctccctgaaatcagtaatgcttccgtgaatgtgctggtgcagaactgcaagatctacaatgatgccagctgtgacatttctgcagatggccagctcctggcagctttcatccccagcagccagaggggctttcctgatgaaggcatcctggcagtgtactccctggccccccataacctgggcgaaatgctctacaccaagcgatttggtcccaatgccatttcggtgagcctgtccccaatgggcagatatgtaatggtgggcttggcctcacgaaggatcctgctgcacccctccacagagcacatggtggcccaggtcttcaggctgcaacaggcccatggtggagagacctccatgaggagagttttcaacgtcctttatcccatgcctgccgaccagcggagacatgtcagtatcaactctgcccgttggctgcctgagccagggcttggcttggcctatggtactaacaaaggagacctggtgatctgccgaccagaggccttaaactctggtgttgagtactactgggaccagctgaacgagacggtcttcactgtccattccaacagcaggagcagcgagcggcctggaaccagcagagccacatggaggacagacagagacatggggctgatgaatgccattgggcttcagccccggaaccctgccacctcagtgacatctcagggcacccagactctggcccttcagctgcagaatgccgaaacacagactgagagggaggtgccggagccagggacagccgcctcaggtcctggtgaaggtgagggttcagagtatggtgccagtggagaagatgcgctcagcaggatccagaggctgatggcggagggcggcatgacagccgtggtgcagcgggagcagagcaccaccatggcctccatgggcggcttcggcaacaacatcatcgtcagccaccgcattcaccgcagctctcagacgggcactgaacctggtgccgcccacacctcctcaccccagccctccacctctcggggactgctcccagaggccgggcaactggcagagcgaggcctaagcccccggacagcttcctgggaccagcctggtacccctgggcgggagccaacccagccaaccctgccctcttcctcccctgtccccattcctgtttcccttcccagcgctgagggaccaaccctccactgcgagttgaccaataacaaccaccttctggatggtggcagcagcaggggggacgctgcaggccctaggggagaaccacggaacaggtagagacaaacgttgcactggtgcctcccctcgaaccgccaagcagaaaccggacctcacagctgactgggaactggacatgtggaagagctgctggctgcatcagggaacaggaggaggaagagggtcagggtggagaggaagatcagtcagtgggcacaagacagtcaaatgggcaaggcctgcctcggggaactagaaccttccaggatctggagcccgggagagccacactgtgggcttaatgtgaatagaggaacaagtgggtatctctgccaggcaccccactttctcctagtaacatgggctcaggggactcagccctggacagagagcctccagagagtgaacagtcttccagatctgggccaatcatcctggacagaggcccgcgaggcagctttgccctgtccacctgttgggtgggcagagccaccaggaacccagacaccacctccaactctgagccttccagagcttcagcctctcttcgtcgtcttaccccactgaaaccaacagggatcgggccaggctcccagattcttgaggacagggacttcggcatttactaatgggggactactgtggggtaagggggcgcctgcttgcctgatacaggatggggtcaagggacagtgggcaggtcctcactcaggagtggggggtgtaggctggccagcccccagggcttgtccaccagtcttctccccgcaaggccctcagagcagcgcctgtgggtgtcagtattacctgagcctaggccaaagctagcccaaggctggggaaggggaggagactccaggtcagaatgtgaggtctcagtctgtgatttaaggtgttgcatgtggactcttaactgtacgtgtagtttctagtggagaaatcaaggctctgatcattttgtttttagtatgaaaatgtgatttcctttctgtttgtaactcatcatagaaacattgtggtgggaggagaggggatagtctacagctaatgagggaaacaccaaagatcacatcattaaaatgatgacatgcccctc

SEQ ID NO: 3092 - DNA, 4817 bp, Homo sapiens
  source 1..4817: mol_type = unassigned DNA
gccgccttctcctgccggtcggtagaacggaccccttcctttattcctgtctcctctttctttttccctgtggctcagcccgttcgctggactgcaaaccgagctcccgtctgccttgcagatttccatgaggacaacttacaaggacctgtatggcctcattttagctgcttcagtgtgttggagctgttacttgctccttcatttcctgggcctggtgtgacagtggctactgagcgccatgaaggttgtcccagaaaagaatgctgtccggatactctgggggcgagaacggggtgctcgggccatgggagctcagcggcttctgcaggagctggtagaagataaaacccggtggatgaaatgggagggcaagagagtagaactgccggatagtccacgctctaccttcttattggccttcagcccagacaggactctcttagcctccacccatgtgaaccataatatctatattacggaggtgaagactggcaagtgtgttcattccctgattggacaccgccgtactccatggtgtgtcacttttcatcccaccatctcaggccttattgcttctggctgcctagatggggaggttaggatttgggatttacacggtggcagtgaaagctggttcacagatagcaacaatgccattgcctccctggctttccaccctacggctcagctcctgctgattgccactgccaatgagatccacttctgggactggagtcgacgggaaccctttgctgtggtgaagacagctagtgagatggaacgggtccgtctggtgagatttgatccacttggacactacttactcacagcaattgttaacccctctaatcaacagggtgatgacgaaccagagatccccatagatggaacagaattatcccactaccgtcagcgtgccctcctgcaatcacagccagttcgccggacgcctctcctccacaatttcctgcacatgctgtcctcccgctcttctggcatccagaccgagcccttccatcccccggagcaggcctcgtcaacgcagcaggaccagggcctcctgaaccggccgtctgccttcagtacagtccagagcagcactgccggcaacacgctccgcaacctcagtctgggtcctacccgccgctctttgggagggcctctgtctagccacccttctaggtatcaccgagaaatagctcctgggttgacaggatctgagtggacccggacagtactcagtctgaactcccgctctgaggcggaatccatgcccccgcccagaaccagtgcctcttcggtgagtttgctgtctgtgctgagacagcaggaaggtggctctcaggcatctgtgtacacttcagccacagaagggaggggttttccggcatcagggttggcaactgagtcagatggagggaatggctccagccaaaacaactcgggcagcattcgccatgagcttcagtgtgacctgagacgcttctttctggagtatgaccggcttcaggagctggatcagagcctgagtggggaagctccccagacccaacaggcccaggaaatgctcaacaataacattgaatctgagaggccaggcccttcccaccagcccaccccacacagcagtgagaacaactccaacctgtcccgtggccacctgaatcgctgtcgtgcttgccacaatctcctgaccttcaacaacgataccctgcgctgggaaagaaccacacctaactactcctctggcgaggctagttcctcttggcaggtccccagctcctttgagagtgtgccatcaagtggcagccagttgccacctctcgagcggactgagggccaaacgcccagctccagcaggctggagttgagcagctctgctagtccgcaggaggagaggactgtgggggtggcctttaaccaggagacaggccactgggaaagaatttacacccagtccagcagatctggaactgtgtcacaggaggccttacatcaggatatgcctgaggagagctctgaggaggattcactcaggagattatctcctgctgcatactacgcccagaggatgatccagtatctctcacggagagacagtattcgccagcgctccatgcgctaccaacagaaccgtctccgttcttccacctcctcctcttcctcagacaaccagggtccatcagtagagggaaccgacttggaatttgaggactttgaggacaatggtgacagatccaggcaccgagctccacgcaatgcccggatgtctgcaccttcgcttggacgctttgtcccaaggcgtttcttgctgcctgagtacttgccttatgctgggatttttcatgaacgtggacagcctggcttggctactcactcttctgttaacagggtcctggcaggggcagtgatcggtgatggacagtctgctgtggccagtaacattgccaatactacctaccggctccagtggtgggacttcactaagtttgacctccctgaaatcagtaatgcttccgtgaatgtgctggtgcagaactgcaagatctacaatgatgccagctgtgacatttctgcagatggccagctcctggcagctttcatccccagcagccagaggggctttcctgatgaaggcatcctggcagtgtactccctggccccccataacctgggcgaaatgctctacaccaagcgatttggtcccaatgccatttcggtgagcctgtccccaatgggcagatatgtaatggtgggcttggcctcacgaaggatcctgctgcacccctccacagagcacatggtggcccaggtcttcaggctgcaacaggcccatggtggagagacctccatgaggagagttttcaacgtcctttatcccatgcctgccgaccagcggagacatgtcagtatcaactctgcccgttggctgcctgagccagggcttggcttggcctatggtactaacaaaggagacctggtgatctgccgaccagaggccttaaactctggtgttgagtactactgggaccagctgaacgagacggtcttcactgtccattccaacagcaggagcagcgagcggcctggaaccagcagagccacatggaggacagacagagacatggggctgatgaatgccattgggcttcagccccggaaccctgccacctcagtgacatctcagggcacccagactctggcccttcagctgcagaatgccgaaacacagactgagagggaggtgccggagccagggacagccgcctcaggtcctggtgaaggtgagggttcagagtatggtgccagtggagaagatgcgctcagcaggatccagaggctgatggcggagggcggcatgacagccgtggtgcagcgggagcagagcaccaccatggcctccatgggcggcttcggcaacaacatcatcgtcagccaccgcattcaccgcagctctcagacgggcactgaacctggtgccgcccacacctcctcaccccagccctccacctctcggggactgctcccagaggccgggcaactggcagagcgaggcctaagcccccggacagcttcctgggaccagcctggtacccctgggcgggagccaacccagccaaccctgccctcttcctcccctgtccccattcctgtttcccttcccagcgctgagggaccaaccctccactgcgagttgaccaataacaaccaccttctggatggtggcagcagcaggggggacgctgcaggccctaggggagaaccacggaacaggtagagacaaacgttgcactggtgcctcccctcgaaccgccaagcagaaaccggacctcacagctgactgggaactggacatgtggaagagctgctggctgcatcagggaacaggaggaggaagagggtcagggtggagaggaagatcagtcagtgggcacaagacagtcaaatgggcaaggcctgcctcggggaactagaaccttccaggatctggagcccgggagagccacactgtgggcttaatgtgaatagaggaacaagtgggtatctctgccaggcaccccactttctcctagtaacatgggctcaggggactcagccctggacagagagcctccagagagtgaacagtcttccagatctgggccaatcatcctggacagaggcccgcgaggcagctttgccctgtccacctgttgggtgggcagagccaccaggaacccagacaccacctccaactctgagccttccagagcttcagcctctcttcgtcgtcttaccccactgaaaccaacagggatcgggccaggctcccagattcttgaggacagggacttcggcatttactaatgggggactactgtggggtaagggggcgcctgcttgcctgatacaggatggggtcaagggacagtgggcaggtcctcactcaggagtggggggtgtaggctggccagcccccagggcttgtccaccagtcttctccccgcaaggccctcagagcagcgcctgtgggtgtcagtattacctgagcctaggccaaagctagcccaaggctggggaaggggaggagactccaggtcagaatgtgaggtctcagtctgtgatttaaggtgttgcatgtggactcttaactgtacgtgtagtttctagtggagaaatcaaggctctgatcattttgtttttagtatgaaaatgtgatttcctttctgtttgtaactcatcatagaaacattgtggtgggaggagaggggatagtctacagctaatgagggaaacaccaaagatcacatcattaaaatgatgacatgcccctc

SEQ ID NO: 3093 - DNA, 6982 bp, Homo sapiens
  source 1..6982: mol_type = unassigned DNA
gtgtcaggtgacagcccggaagctgcggaagcggatgagggaagggcggccgtggccctgggggcggcgggagctgctttgcctccaccgatctccctgtgcggccctcatgtgctgtgctcgctgacacccgaagtccgcggctttccgcacacggtggggtcgtcagacccgctgcccttggcggtcgaagtcgtcgtgcgggcccgcggcggccgcccatggagaaggccaggagaggcggggatggcgtcccccgggggcccgtactgcacatcgtggtggtcggatttcaccacaagaagggctgccaggttgaattctcttacccgcccctgattccaggagatggacatgacagccacactttacctgaagaatggaagtatttgcccttccttgccttaccagatggcgcacacaactaccaggaagatactgtgttttttcacttgccacccagaaatggaaatggagccacagtatttggtatctcttgctatcgacaaattgaagccaaggcactgaaagtaaggcaagcagatatcaccagagagactgttcagaaaagtgtctgtgttctaagcaagctgcctctgtatggtttacttcaagcaaaacttcaactcattacacatgcatattttgaagagaaggatttttcccaaatttctattctaaaggagctttatgaacatatgaatagttccttgggaggtgcttcattagaaggatcccaagtatatcttggtctgtcacctcgagatcttgtccttcattttcgacacaaggtcttaatcctatttaagctaattcttcttgaaaaaaaggttcttttttatatttctccagtgaataaattggtgggtgcactgatgactgtgttatccctttttccaggcatgattgaacatggtctcagtgactgttctcagtatagaccccggaaaagtatgtctgaagatggtgggcttcaggaaagtaacccatgtgcagatgattttgtttctgcatccactgctgatgtttcacataccaacttgggaactatcaggaaagtcatggcaggaaaccatggagaagatgctgccatgaagactgaggagcctttgttccaagtggaagacagcagcaaagggcaggaacccaatgataccaatcaatatttgaaacctccatctcgcccatctccagattcttcagaaagtgactgggaaactttggatcctagtgtcttagaggaccccaacttgaaagaaagggaacagctgggatcagaccagacaaatttgtttccaaaggactctgtcccctcagagagtcttccaattactgtacaacctcaagctaatacgggacaggtagtcctgataccagggctcatttcgggtttggaagaggatcagtatggcatgcccctggccatcttcacaaagggatatctgtgtttgccttacatggcattgcagcagcatcatcttctctccgatgtcaccgttcgggggtttgttgctggagctactaacatcctttttcgacaacagaaacacctcagtgatgccattgtggaagtagaagaagctctgatccagatccatgatccagaactcaggaagctgcttaacccaaccactgcagacctaaggttcgcagactacctagtgaggcacgtgactgagaatcgggatgacgtcttcctagatggcacgggctgggagggaggtgacgaatggatccgggcccagtttgcggtctacattcatgccctgctggctgccacactgcaattagacaatgaaaagatattatcggactatgggacaacttttgttacagcatggaagaatactcacaactacagggtgtggaacagcaacaagcatccagcacttgcagaaataaatccaaaccatccatttcaaggccaatactcagtatcagacatgaagttaaggttctcacattctgttcagaatagtgaacgtggcaaaaaaattggaaacgtcatggtcacaactagccggaatgttgtacaaacaggaaaagctgttggccagtcagttggaggagctttttccagtgcaaagacagctatgtcttcatggctttccactttcaccacttccacctcccaaagtctcactgagccaccagatgagaagccttgagcaaggcgtcagaggctgctattgctttctgaggtttaagtgtcccctgtctgtctgctgctcccaggctgttactagccacagatccacagcaggggaccatatgtcgaactgtttacatggatgttgctctaagtgaatgtttcgggatgccgaaatgatgaaatcacagccatagcagggatggctttccaggttggggtttcaattgactacttttatttcagtctgagcctgattaaaacatacagtgaaccttctaatgaattttgagttctgatattgtacattggtttactttagaagagtttttacttatgtaaattttgttctgttttggtgtttgaatatctagatggtcactgtaatttatacttgctaaaattaatttatattaccattttctctaaagttggccttaaaacgtgcttataaagtgaaggggtcatacagttgggccttcattattttgctgaattatgtgatgatttttttgctttctacccacaaaacatttattaattcacttcctcccagaaacatgaaagttagaggtggtagttctgaggattgggtgttttgttttacgtttttagtttgttctttccacatccttaaaaacttggtttcagacatcaaggagtatcactgtgctttcctcctctttataactgtgcaggtgggtgtgcagagaaatagcagagtgatggttcgatgatactgaagcagtttaacatgaatgtgtctgtagggcaatactttcaaagaagacctatgtgtttatttttcaaccgcagtcatgttgcagtcttacaagcactttttttttattccagagtttgtgccatctgtttctctttttttttttggggggggggggggggcggggtctcactctatcgcccaggctggagtgcagtggtgccatctcggctcactgcaacctccatctcccgggttcaagcaattcttgtacctcagcctcccaagtagctgggattatggacatgcgccaccatgcccagctaattattgtatttttagtagagacggggttttgccatgttggccaggctggtcttgatctcctggcctcaagtgatctgcccgcctcagcctctcaaagtgctgggactacaggcatgagccactgcgcctggcctgtttcttttttaaacagttttctattgggtgtttgcagacctacagcttttctcgtagtcttattcataaagcttttcaaagcacttagtcttctacttccctaactgaaagtcctcctataatcaatccctacccccttctagaagtatcttaaaagaaaagcaaggtgattgtaagtattaaatagaaatctcatcttagtttatattcagcaaagtaagaggcaagagaagaaaactgcagccttgacatctgtcatctgagaaaggatatctggtttcatgttaggcacatacatgcatgtgtgtgccatctactgatgatttgtacacagctggacctcgtgtgtttgccatgctcagctctcatttgcttttcaaggatacctgggatggctgttctcagagagtacttacggggaacagactgccttttagtaacaagggatacttgggaaatacattgtgagtatgatctatcccagattgctggggaaataaaggagggccctgattatatttggtttattcctcactaaatgtttaagaagtaaatgctcccaaggcatttgaaatgaacatagaaacataatctaaatgtctctaaattttccactttgtgttttctaaacacaaattgtattactcatttgagcataactcaagaattcagcgatgataaattgaagggctgaatgtgagaactccattaattccacttcttccaagaaagttaacctcaggaaatgctgtttgaagagaagaaagtagtaccaaacaaaaaccttaaacagtacttgaatcttttttgcgctgagactataaagaattcattctaacatcttgtttcataagggccacatcattcgttggagcatgatagtgtgatttgtgtacaattgttacctctcagctgctgaagttcacacttcaaggatctaggagctctgtgaggggtcgtccagcaagatgctgatttgtctttcagttggtatggtttctgtgatcggggtaaactcccgtctcccactattcaaaagcagcccaactcatgctttggaatccactgaaataaaaatagttacatgaagtttaactttgctttaatatcacttgttcctcattgaatatacactttgatcggactttctattaacatttctagctaagagtttgactcttagtggtcactttactgactttccaacataaaacaagtatctcagaagatacaactttcatcatagaaatggtcaaaagaccatagctatatttccttcaggttctgggaggtggagtttttcaaggaacactggctgttgtattgttggcaggggccccaaggcagctcgcacaatcaaaggcaggaagcctcacccctggtcctgtgaccccccccccccacacacacacatacttcaggcttggattctaggctccaagtggccagcatagaagcagcagcctctctccaaaccctggctctgtgagccataggaaccagcactaggtcatcttctgacatagccctggtgaaggtgtgtgtgtgttggtggccacacttgctaaggcttttgtgtctaagaattgagtatttgtacctaggtgtgagggaaccagggtcagccagcctttttcagatggcgccaggcacacacactacatcaatggcttgctggtggcttcaccactatccaggtgacttaaaagagtgtttggaaaatgtccctggtatacttcaattcctactagacattgtaatgacaatggtgtaggtaaggaagagagagttaaaactaccagttgtggaatagaaatagttgcatgtccaaagaaggcttagaatgattgtgcatatgcagttggctcacataaccagcatgaacagtctctccccaaatccattagtgattcactaccccccgccaagcacagccctaaaacaattctcgtccactttcctgttaagaaacacagcagcaatatactttggcagcaaaccagagcatatgatgtaacttgctcaaccttatcttcctttccaaattctatactaagcatctgatgttttttagaataatttcctttggaaagccaacgagaaaacaaattaggaagagagagaagtgagaaattgttgcatggctgaggaacaagatgcttaaaatctgaatggaagtattttgagagcagtatttcatgtgctaagggttataagaattcttttagaaagggattagaattttactctgctagttacaagttttaaagtcacgctacggcattatcaccctggcaggtaggttttgttattgttttacattttgtgaaaaaaagttttgtagaagttacagctagtggtcttttccctccagagccagtgatgagtgtgggagcacttcagctctgtaaggggccagcgttctgacctttaaccacatgaactaacctgcgtcagcagttgcagaaagtagcctgttaggacagcagctgctaagcgttgcctggtattttagtggggagaaggctgggactcttcatggcatcaacacttgcatgctctgaatctttgatcagagatgaggtgccatttttggcatttccaccccgtctcgtggtagcctttaaaagtggtagaagatgctgccctaattccccgaggatgattgtcattccatgcagcataatgtgccgtgaggagttttctcattccagttctttggacttcgtaacattggaattgtttttccataatttccggcattccataaatatttgtcaaggacaaagaaaaggaatgtggatgtttattcttttcatatgaatgactttgtacacatgacttcctgctttcattatgaaggaggggaaactagttcccttgtatggtaactccaaagttaaaaaattgtgcatgtctgaggggttgaatatattttgtaaaactctaaatacatttgtatttctgtgctgttctaaagtttacctttttacttatatgaaagataactatatatttaaatcatgtaagtggaacacagtgtagggggtttttccaatcttatttttcatcaggttctcacacccacgtagtatgctgctcaaattttttcgtgtgtgcaaatgtgaacatttgaacatttcagttaggtactgagccagaaaaggtaattgaagttttcagaaagcttctgtgcttagaaaatattttgttgttttcttaaaatattagtattttgtagctggaagaataagatcaaggcttacatgtttcaggccacttggtcactggttcctgaatttagaaaacattggattaatgagttggtgaaggcatttagtggttacaaaaacagtttaaatatttatgattaaaggcttttcacaaacctttttaaagaaaatttagctgagaaaacttaaaaagttttctaaggaagtttaactgtggcacatgttttgatcagaaaggtagttctctttgctctggtagttttaaagtttgtactagttctttatttctgttgtttttttaaattgttaaaattataaatcacgtctaatcatactgaattgtaaaacttgaattgtatctttattttaagcataaatgagaataaaatgatcctgttcaccctgcctacagttgga

SEQ ID NO: 3094 - DNA, 2179 bp, Homo sapiens
  source 1..2179: mol_type = unassigned DNA
gctttgcctccaccgatctccctgtgcggccctcatgtgctgtgctcgctgacacccgaagtccgcggctttccgcacacggtggggtcgtcagacccgctgcccttggcggtcgaagtcgtcgtgcgggcccgcggcggccgcccatggagaaggccaggagaggcggggatggcgtcccccgggggcccgtactgcacatcgtggtggtcggatttcaccacaagaagggctgccaggttgaattctcttacccgcccctgattccaggagatggacatgacagccacactttacctgaagaatggaagtatttgcccttccttgccttaccagatggcgcacacaactaccaggaagatactgtgttttttcacttgccacccagaaatggaaatggagccacagtatttggtatctcttgctatcgacaaattgaagccaaggcactgaaagtaaggcaagcagatatcaccagagagactgttcagaaaagtgtctgtgttctaagcaagctgcctctgtatggtttacttcaagcaaaacttcaactcattacacatgcatattttgaagagaaggatttttcccaaatttctattctaaaggagctttatgaacatatgaatagttccttgggaggtgcttcattagaaggatcccaagtatatcttggtctgtcacctcgagatcttgtccttcattttcgacacaaggtcttaatcctatttaagctaattcttcttgaaaaaaaggttcttttttatatttctccagtgaataaattggtgggtgcactgatgactgtgttatccctttttccaggcatgattgaacatggtctcagtgactgttctcagtatagaccccggaaaagtatgtctgaagatggtgggcttcaggaaagtaacccatgtgcagatgattttgtttctgcatccactgctgatgtttcacataccaacttgggaactatcaggaaagtcatggcaggaaaccatggagaagatgctgccatgaagactgaggagcctttgttccaagtggaagacagcagcaaagggcaggaacccaatgataccaatcaatatttgaaacctccatctcgcccatctccagattcttcagaaagtgactgggaaactttggatcctagtgtcttagaggaccccaacttgaaagaaagggaacagctgggatcagaccagacaaatttgtttccaaaggactctgtcccctcagagagtcttccaattactgtacaacctcaagctaatacgggacaggtagtcctgataccagggctcatttcgggtttggaagaggatcagtatggcatgcccctggccatcttcacaaagggatatctgtgtttgccttacatggcattgcagcagcatcatcttctctccgatgtcaccgttcgggggtttgttgctggagctactaacatcctttttcgacaacagaaacacctcagtgatgccattgtggaagtagaagaagctctgatccagatccatgatccagaactcaggaagctgcttaacccaaccactgcagacctaaggttcgcagactacctagtgaggcacgtgactgagaatcgggatgacgtcttcctagatggcacgggctgggagggaggtgacgaatggatccgggcccagtttgcggtctacattcatgccctgctggctgccacactgcaattagttctgttcagaatagtgaacgtgaaaaaaattggaaacgtcatggtcacaactagccggaatgttgtacaaacaggaaaagctgttggccagtcagttggaggagctttttccagtgcaaagacagctatgtcttcatggctttccactttcaccacttccacctcccaaagtctcactgagccaccagatgagaagccttgagcaaggcgtcagaggctgctattgctttctgaggtttaagtgtcccctgtctgtctgctgctcccaggctgttactagccacagatccacagcaggggaccatatgtcgaactgtttacatggatgttgctctaagtgaatgtttcgggatgccgaaatgatgaaatcacagccatagcagggatggctttccaggttggggtttcaattgactacttttatttcagtctgagcctgattaaaacatacagtgaaccttc

SEQ ID NO: 3095 - DNA, 1392 bp, Homo sapiens
  source 1..1392: mol_type = unassigned DNA
atggagaaggccaggagaggcggggatggcgtcccccgggggcccgtactgcacatcgtggtggtcggatttcaccacaagaagggctgccaggttgaattctcttacccgcccctgattccaggagatggacatgacagccacactttacctgaagaatggaagtatttgcccttccttgccttaccagatggcgcacacaactaccaggaagatactgtgttttttcacttgccacccagaaatggaaatggagccacagtatttggtatctcttgctatcgacaaattgaagccaaggcactgaaagtaaggcaagcagatatcaccagagagactgttcagaaaagtgtctgtgttctaagcaagctgcctctgtatggtttacttcaagcaaaacttcaactcattacacatgcatattttgaagagaaggatttttcccaaatttctattctaaaggagctttatgaacatatgaatagttccttgggaggtgcttcattagaaggatcccaagtatatcttggtctgtcacctcgagatcttgtccttcattttcgacacaaggtcttaatcctatttaagctaattcttcttgaaaaaaaggttcttttttatatttctccagtgaataaattggtgggtgcactgatgactgtgttatccctttttccaggcatgattgaacatggtctcagtgactgttctcagtatagaccccggaaaagtatgtctgaagatggtgggcttcaggaaagtaacccatgtgcagatgattttgtttctgcatccactgctgatgtttcacataccaacttgggaactatcaggaaagtcatggcaggaaaccatggagaagatgctgccatgaagactgaggagcctttgttccaagtggaagacagcagcaaagggcaggaacccaatgataccaatcaatatttgaaacctccatctcgcccatctccagattcttcagaaagtgactgggaaactttggatcctagtgtcttagaggaccccaacttgaaagaaagggaacagctgggatcagaccagacaaatttgtttccaaaggactctgtcccctcagagagtcttccaattactgtacaacctcaagctaatacgggacaggtagtcctgataccagggctcatttcgggtttggaagaggatcagtatggcatgcccctggccatcttcacaaagtgtacccaagatgtcttacctcaggcaaatcacagcttcaagtttttgataacggataggagaatcacaccaagaccacttcgaagaaggctggtttctgctacactaacaaatatgcttcaagagaagagttgctggaaaaaacacatcaagtgtagaagacgtgttcaaaaatag

SEQ ID NO: 3096 - DNA, 4255 bp, Homo sapiens
  source 1..4255: mol_type = unassigned DNA
cggctgtgattggcgcggcgggatcactggctccgcgagcctggcccgggggagtcggctggagccggctgcgctttgataaggtcctggcaactcagtaacagcccgagagccgggaaataaaaataacccctcagagcgatggatttcggggccgcccggcggccgaggcgcccgccgaaggccctgctgtaaaagagaggaggttcagatgagcccctgctgacttgagagagacagagagaccacgccgattgctgagaggaactggaagaagaaaaattcccagactcagtgggaagagctccctcaccatgagtagcgctatgttggtgacttgcctcccggaccccagcagcagcttccgtgaggatgccccgcggcccccagtgccaggggaagaaggggagaccccaccgtgtcagccaggggtgggcaagggccaggtcaccaaacccatgcctgtctcttccaacaccaggcggaacgaagatgggttgggggagccggaggggcgggcatctccggattcccctctgacccggtggaccaagtccttacactccttattgggcgatcaagacggtgcttacctgttccgaactttcctggagagggagaaatgcgtggataccttagacttctggtttgcctgcaatggattcaggcagatgaacctgaaggataccaaaactttacgagtagccaaagcgatctacaaaaggtacattgagaacaacagcattgtctccaagcagctgaagcctgccaccaagacctacataagagatggcatcaagaagcagcagattgattccatcatgtttgaccaggcgcagaccgagatccagtcggtgatggaggaaaatgcctaccagatgtttttgacttctgatatatacctcgaatatgtgaggagtgggggagaaaacacagcttacatgagtaatgggggactcgggagcctaaaggtcgtgtgtggctatctccccaccttgaatgaagaagaggagtggacttgtgccgacttcaagtgcaaactttcgccaaccgtggttggcttgtccagcaaaactctgagggccacggcgagtgtgaggtccacggaaactgttgacagtggatacaggtccttcaagaggagcgatcctgttaatccttatcacataggttctggctatgtctttgcaccagccaccagcgccaacgacagtgagatatccagtgatgcgctgacggatgattccatgtccatgacggacagcagtgtagatggaattcctccttatcgtgtgggcagtaagaaacagctccagagagaaatgcatcgcagtgtgaaggccaatggccaagtgtctctacctcatttcccgagaacccaccgcctgcccaaggagatgacccccgtggaacccgccacctttgcagctgagctgatctcgaggctggaaaagctgaagctggagttggagagccgccacagcctggaggagcgcctgcagcagatccgagaggatgaagagagagagggctccgagctcacactcaattcgcgggagggggcgcccacgcagcaccccctctccctactgccctccggcagctacgaggaagacccgcagacgatactggacgatcacctgtccagggtcctcaagacccctggctgccagtctccaggcgtaggccgctatagcccccgctcccgctccccggaccaccaccaccaccaccattcgcagtaccactccctgctcccgcccggtggcaagctgcctcccgcggccgcctcgccgggcgcctgccccctcctcgggggcaaaggctttgtgaccaagcagacgacgaagcatgtccaccaccactacatccaccaccatgccgtccccaagaccaaggaggagatcgaggcggaggccacgcagcgggtgcactgcttctgccctgggggcagcgagtattactgctactcgaaatgcaaaagccactccaaggctccggaaaccatgcccagcgagcagtttggcggcagcagaggcagtaccttgcccaaacgcaatgggaaaggcacggagccgggcctggccctgcccgccagggaaggaggggcccccggcggagctggggccctgcagcttccccgggaggaaggagacaggtcgcaggatgtctggcagtggatgctggagagtgagcggcagagcaagcccaagccccatagtgcccaaagcacaaaaaaggcctaccccttggagtctgcccgctcgtctccaggcgaacgagccagccggcaccatctgtgggggggcaacagcgggcacccccgcaccaccccccgtgcccacctgttcacccaggaccctgcgatgcctcccctgaccccacccaacacgctggctcagctggaggaggcctgtcgcaggctagctgaggtgtcgaagcccccaaagcagcggtgctgtgtggccagtcagcagagggacaggaatcattcggccactgttcagacgggagccacacccttctccaatccaagcctggctccagaagatcacaaagagccaaagaaactggcaggtgtccacgcgctccaggccagtgagttggttgtcacttactttttctgtggggaagaaattccataccggaggatgctgaaggctcagagcttgaccctgggccactttaaagagcagctcagcaaaaagggaaattataggtattacttcaaaaaagcaagcgatgagtttgcctgtggagcggtgtttgaggagatctgggaggatgagacggtgctcccgatgtatgaaggccggattctgggcaaagtggagcggatcgattgagccctggggtctggctttggtgaactgttggagcccgaagctcttgtgaactgtcttggctgtgagcaactgcgacaaaacattttgaaggaaaattaaaccaatgaagaagacaaagtctaaggaagaatcggccagtgggccttcgggagggcggggggaggttgattttcatgattcatgagctgggtactgactgagataagaaaagcctgaactatttattaaaaacatgaccactcttggctattgaagatgctgcctgtatttgagagactgccatacataatatatgacttcctagggatctgaaatccataaactaagagaaactgtgtatagcttacctgaacaggaatccttactgatatttatagaacagttgatttcccccatccccagtttatggatatgctgctttaaacttggaagggggagacaggaagttttaattgttctgactaaacttaggagttgagctaggagtgcgttcatggtttcttcactaacagaggaattatgctttgcactacgtccctccaagtgaagacagactgttttagacagactttttaaaatggtgccctaccattgacacatgcagaaattggtgcgttttgtttttttttttcctatgctgctctgttttgtcttaaaggtcttgagggttgaccatgttgcgtcatcatcaacattttgggggttgtgttggatgggatgatctgttgcagagggagaggcagggaaccctgctccttcgggccccaggttgatcctgtgactgaggctccccctcatgtagcctccccaggcccagggccctgaggcctgctagaatcactgccgctgtgctttcgtggaaatgacagttccttgttttttttgtttctgtttttgttttacattagtcattggaccacagccattcaggaactaccccctgccccacaaagaaatgaacagttgtagggagacccagcagcacctttcctccacacaccttcattttgatgttcgggtttttgtgttaagttaatctgtacattctgtttgccattgttacttgtactatacatctgtatatagtgtacggcaaaagagtattaatccactatctctagtgcttgactttaaatcagtacagtacctgtacctgcacggtcacccgctccgtgtgtcgccctatattgagggctcaagctttcccttgttttttgaaaggggtttatgtataaatatattttatgcctttttattacaagtcttgtactcaatgacttttgtcatgacattttgttctacttatactgtaaattatgcattataaagagttcatttaaggaaaattacttggtacaataattattgtaattaagagatgtagcctttattaaaattttatatttttc

SEQ ID NO: 3097 - DNA, 2426 bp, Homo sapiens
  source 1..2426: mol_type = unassigned DNA
ccacgccgattgctgagaggaactggaagaagaaaaattcccagactcagtgggaagagctccctcaccatgagtagcgctatgttggtgacttgcctcccggaccccagcagcagcttccgtgaggatgccccgcggcccccagtgccaggggaagaaggggagaccccaccgtgtcagccaggggtgggcaagggccaggtcaccaaacccatgcctgtctcttccaacaccaggcggaacgaagatgggttgggggagccggaggggcgggcatctccggattcccctctgacccggtggaccaagtccttacactccttattgggcgatcaagacggtgcttacctgttccgaactttcctggagagggagaaatgcgtggataccttagacttctggtttgcctgcaatggattcaggcagatgaacctgaaggataccaaaactttacgagtagccaaagcgatctacaaaaggtacattgagaacaacagcattgtctccaagcagctgaagcctgccaccaagacctacataagagatggcatcaagaagcagcagattgattccatcatgtttgaccaggcgcagaccgagatccagtcggtgatggaggaaaatgcctaccagatgtttttgacttctgatatatacctcgaatatgtgaggagtgggggagaaaacacagcttacatgagtaatgggggactcgggagcctaaaggtcgtgtgtggctatctccccaccttgaatgaagaagaggagtggacttgtgccgacttcaagtgcaaactttcgccaaccgtggttggcttgtccagcaaaactctgagggccacggcgagtgtgaggtccacggaaactgttgacagtggatacaggtccttcaagaggagcgatcctgttaatccttatcacataggttctggctatgtctttgcaccagccaccagcgccaacgacagtgagatatccagtgatgcgctgacggatgattccatgtccatgacggacagcagtgtagatggaattcctccttatcgtgtgggcagtaagaaacagctccagagagaaatgcatcgcagtgtgaaggccaatggccaagtgtctctacctcatttcccgagaacccaccgcctgcccaaggagatgacccccgtggaacccgccacctttgcagctgagctgatctcgaggctggaaaagctgaagctggagttggagagccgccacagcctggaggagcgcctgcagcagatccgagaggatgaagagagagagggctccgagctcacactcaattcgcgggagggggcgcccacgcagcaccccctctccctactgccctccggcagctacgaggaagacccgcagacgatactggacgatcacctgtccagggtcctcaagacccctggctgccagtctccaggcgtaggccgctatagcccccgctcccgctccccggaccaccaccaccaccaccattcgcagtaccactccctgctcccgcccggtggcaagctgcctcccgcggccgcctcgccgggcgcctgccccctcctcgggggcaaaggctttgtgaccaagcagacgacgaagcatgtccaccaccactacatccaccaccatgccgtccccaagaccaaggaggagatcgaggcggaggccacgcagcgggtgcactgcttctgccctgggggcagcgagtattactgctactcgaaatgcaaaagccactccaaggctccggaaaccatgcccagcgagcagtttggtgcccaaagcacaaaaaaggcctaccccttggagtctgcccgctcgtctccaggcgaacgagccagccggcaccatctgtgggggggcaacagcgggcacccccgcaccaccccccgtgcccacctgttcacccaggaccctgcgatgcctcccctgaccccacccaacacgctggctcagctggaggaggcctgtcgcaggctagctgaggtgtcgaagcccccaaagcagcggtgctgtgtggccagtcagcagagggacaggaatcattcggccactgttcagacgggagccacacccttctccaatccaagcctggctccagaagatcacaaagagccaaagaaactggcaggtgtccacgcgctccaggccagtgagttggttgtcacttactttttctgtggggaagaaattccataccggaggatgctgaaggctcagagcttgaccctgggccactttaaagagcagctcagcaaaaagggaaattataggtattacttcaaaaaagcaagcgatgagtttgcctgtggagcggtgtttgaggagatctgggaggatgagacggtgctcccgatgtatgaaggccggattctgggcaaagtggagcggatcgattgagccctggggtctggctttgg

SEQ ID NO: 3098 - DNA, 483 bp, Homo sapiens
  source 1..483: mol_type = unassigned DNA
atgagtagcgctatgttggtgacttgcctcccggaccccagcagcagcttccgtgaggatgccccgcggcccccagtgccaggggaagaaggggagaccccaccgtgtcagccaggggtgggcaagggccaggtcaccaaacccatgcctgtctcttccaacaccaggcggaacgaagatgggttgggggagccggaggggcgggcatctccggattcccctctgacccggtggaccaagtccttacactccttattgggcgatcaagacggtgcttacctgttccgaactttcctggagagggagaaatgcgtggataccttagacttctggtttgcctgcaatggattcaggcagatgaacctgaaggataccaaaactttacgagtagtcaatgacttttgtcatgacattttgttctacttatactgtaaattatgcattataaagagttcatttaaggaaaattacttggtacaataa

SEQ ID NO: 3099 - DNA, 3008 bp, Homo sapiens
  source 1..3008: mol_type = unassigned DNA
cggggtctcggcggggcggtcgctttggagccgcaaagtttggctgtggcggcaaatgggcttgggcggctcctcggcgggtggcggtggtggccgtagcggttcctcctggccctgttaatgtcggggccaggccgggggaggatggcgccctagaacccggccttgctggggtaggggcgggaggggacggggtggggaccggccatgtcggaggtgacccggagtctgctgcagcgctggggcgccagttttaggagaggcgccgacttcgactcttggggccagctggtggaggcgatagacgagtatcagatattagcaagacatctacaaaaggaggcccaagctcaacacaataattctgaattcacagaagaacaaaagaaaaccataggcaaaattgcaacatgcttggaattgcgaagtgcagctttacagtccacacagtctcaagaagaatttaaactggaggacctgaagaagctagaaccaatcctaaagaatattcttacatataataaagaattcccatttgatgttcagcctgtcccattaagaagaattttggcacctggtgaagaagagaatttggaatttgaagaagatgaagaagagggtggtgctggagcagggtctcctgattcttttcctgctagagttcccggtactttattaccaaggttgccatcggaaccaggaatgacattactcactatcagaattgagaaaattggtttgaaagatgctgggcagtgcatcgatccctatattacagttagtgtaaaggatctgaatggcatagacttaactcctgtgcaagatactcctgtggcttcaagaaaagaagatacatatgttcattttaatgtggacattgagctccagaagcatgttgaaaaattaaccaaaggtgcagctatcttctttgaattcaaacactacaagcctaaaaaaaggtttaccagcaccaagtgttttgctttcatggagatggatgaaattaaacctgggccaattgtaatagaactatacaagaaacccactgactttaaaagaaagaaattgcaattattgaccaagaaaccactttatcttcatctacatcaaactttgcacaaggaatgatcctgacatgatgaacctggaacttctgtgaattttaccactcagtagaaaccatcatagctctgtgtagcatattcacccttcaacaggcaggaagcaagccgtacccagaccagtaggccggacggagtccaatgcaaagctgtaccacagaattcagagtccagcacatcacactgacgtataggactccttgggatacaggtttattgtagattttgaaacatgtttttacttttctattaattgtgcaattaatagtctattttctaatttaccactactcctaccctgcttcctggaacaatactgttgtgggtaggatgtgctcatcttcagacttaatacagcaataagaatgtgctagagtttacacatctgttcacttttgctccaatatgctcttttgacttaacgtcaagctttgggttgatgtgggtagggtagtgtcaaactgctttgagaggaatgggaccagttctgctgcctaagaaggtctgtctggatgtttataggcagcacctctgaagtggcctaaattcaccctgatctgatagttttcctgcttagaaagtgtgccttggccagatcagtatcccacatgggagtgttccctaggttgtagctgtgattgtttccagatgaccagattgtttttctgaaaatgagcatatttttagtcatgtcgattagctgttcttctacatcacattgttactctttctgatgatgattctagggttaacattggaaccatctcaaaataattacaaagttttagatgggtttacaatgtcttctaaacaatgtaatctaaaaataattgagtcagatgctaacgagatactgcaggcataactgctgtttttctgacaactgattgtgaaaccttaaaacctgcatacctcttcttacagtgaggagtatgcaaaatctggaaagatattctattttttttatataggtagataggatcgccatttatttcctatttagatatactgacattcatccatatgaaaatatgcaggtcattagcttactataatttacttttgacttaatggggcataaataaaactttcatagtacacatgaggtggatatttgatacacagaacatttgcggtgggctttctgtgggttagatgtaaagcccacatattttaatattcactattttaaatgagcaatgcatgaggggaatgcagtgtcagtacctggcctatttttaaactagtgtaatcaccctagtcataccattcagtatgtttgctttttaaaataagtaaccacaactaagttgttgtagcccttgcacttcaagagatctagtctttactttcagttgtctgttaggtccattctgtttactagacggatgttaataaaaactatgcgagcctgaatgaattctcagccaaatttagtcttgtctctcatcttgattggattaattccaaattctaaaatgattcagtccacaatagctctaggggatgaagaatttgccttactttgcccagttcctaagactgtgagttgtcaaatccctagactgtaagctcttcaaggagcaagaggcgcattttctccgtgtcatgtaatttttctaaggtgcttggcagcactctgtaccctgtggagtactcagtaccttttgtttgatgttgctgacaagacctgaaaaaaaatcccttaaaaaaaaaacccattaaagtgtagcaaaaccgatgtattattttttctcttttctcataaaccataagatatgtatatcaaaatgataatttatatgaagcatctgctatccttcacataagtatagtttatatgaactacaaatacctttcatcaacattaaagaagcttaaattgaa

SEQ ID NO: 3100 - DNA, 1875 bp, Homo sapiens
  source 1..1875: mol_type = unassigned DNA
tagcggttcctcctggccctgttaatgtcggggccaggccgggggaggatggcgccctagaacccggccttgctggggtaggggcgggaggggacggggtggggaccggccatgtcggaggtgacccggagtctgctgcagcgctggggcgccagttttaggagaggcgccgacttcgactcttggggccagctggtggaggcgatagacgagtatcagatattagcaagacatctacaaaaggaggcccaagctcaacacaataattctgaattcacagaagaacaaaagaaaaccataggcaaaattgcaacatgcttggaattgcgaagtgcagctttacagtccacacagtctcaagaagaatttaaactggaggacctgaagaagctagaaccaatcctaaagaatattcttacatataataaagaattcccatttgatgttcagcctgtcccattaagaagaattttggcacctggtgaagaagagaatttggaatttgaagaagatgaagaagagggtggtgctggagcagggtctcctgattcttttcctgctagagttcccggtgcagctatcttctttgaattcaaacactacaagcctaaaaaaaggtttaccagcaccaagtgttttgctttcatggagatggatgaaattaaacctgggccaattgtaatagaactatacaagaaacccactgactttaaaagaaagaaattgcaattattgaccaagaaaccactttatcttcatctacatcaaactttgcacaaggaatgatcctgacatgatgaacctggaacttctgtgaattttaccactcagtagaaaccatcatagctctgtgtagcatattcacccttcaacaggcaggaagcaagccgtacccagaccagtaggccggacggagtccaatgcaaagctgtaccacagaattcagagtccagcacatcacactgacgtataggactccttgggatacaggtttattgtagattttgaaacatgtttttacttttctattaattgtgcaattaatagtctattttctaatttaccactactcctaccctgcttcctggaacaatactgttgtgggtaggatgtgctcatcttcagacttaatacagcaataagaatgtgctagagtttacacatctgttcacttttgctccaatatgctcttttgacttaacgtcaagctttgggttgatgtgggtagggtagtgtcaaactgctttgagaggaatgggaccagttctgctgcctaagaaggtctgtctggatgtttataggcagcacctctgaagtggcctaaattcaccctgatctgatagttttcctgcttagaaagtgtgccttggccagatcagtatcccacatgggagtgttccctaggttgtagctgtgattgtttccagatgaccagattgtttttctgaaaatgagcatatttttagtcatgtcgattagctgttcttctacatcacattgttactctttctgatgatgattctagggttaacattggaaccatctcaaaataattacaaagttttagatgggtttacaatgtcttctaaacaatgtaatctaaaaataattgagtcagatgctaacgagatactgcaggcataactgctgtttttctgacaactgattgtgaaaccttaaaacctgcatacctcttcttacagtgaggagtatgcaaaatctggaaagatattctattttttttatataggtagataggatcgccatttatttcctatttagatatactgacattcatccatatgaaaatatgcaggtcattagcttactataatttacttttgacttaatggggcataaataaaactttcatag

SEQ ID NO: 3101 - DNA, 1568 bp, Homo sapiens
  source 1..1568: mol_type = unassigned DNA
aatgaccaatggagatgcggggcaaggggattcagcggatctagctgttaatgccactgatttgtggtgaccaatatggattttctttctgtcgtttgtttcaaggcactagaaggagacttttggtccactgtccaggggtctatggagactaatgtaaaagggggtgatcctattgcttgagactccggggaagtagcgggggatattactgagaaacacccatcctctgacatacttaccaaatttctcagagtcggttcagcagttcttctaagggaagaagggcaatatatcggagtccacaagcgagaaaaagagggagtcggagaaccgagactacagaaccagggtgacggaaaaccaggacggcgccaagccggagtcacgtgacccggcggccatgatagctaccgaggcggtagtgcgcgcagctcagggattagcaagacatctacaaaaggaggcccaagctcaacacaataattctgaattcacagaagaacaaaagaaaaccataggcaaaattgcaacatgcttggaattgcgaagtgcagctttacagtccacacagtctcaagaagaatttaaactggaggacctgaagaagctagaaccaatcctaaagaatattcttacatataataaagaattcccatttgatgttcagcctgtcccattaagaagaattttggcacctggtgaagaagagaatttggaatttgaagaagatgaagaagagggtggtgctggagcagggtctcctgattcttttcctgctagagttcccggtactttattaccaaggttgccatcggaaccaggaatgacattactcactatcagaattgagaaaattggtttgaaagatgctgggcagtgcatcgatccctatattacagttagtgtaaaggatctgaatggcatagacttaactcctgtgcaagatactcctgtggcttcaagaaaagaagatacatatgttcattttaatgtggacattgagctccagaagcatgttgaaaaattaaccaaaggtgcagctatcttctttgaattcaaacactacaagcctaaaaaaaggtttaccagcaccaagtgttttgctttcatggagatggatgaaattaaacctgggccaattgtaatagaactatacaagaaacccactgactttaaaagaaagaaattgcaattattgaccaagaaaccactttatcttcatctacatcaaactttgcacaaggaatgatcctgacatgatgaacctggaacttctgtgaattttaccactcagtagaaaccatcatagctctgtgtagcatattcacccttcaacaggcaggaagcaagccgtacccagaccagtaggccggacggagtccaatgcaaagctgtaccacagaattcagagtccagcacatcacactgacgtataggactccttgggatacaggtttattgtagattttgaaacatgtttttacttttctattaattgtgcaattaatagtctattttctaatttaccactactcctaccctgcttcctggaacaatactgttgt

SEQ ID NO: 3102 - DNA, 4736 bp, Homo sapiens
  source 1..4736: mol_type = unassigned DNA
gggaaggaggcaggggtgctgagaaggcggctgctgggcagagccggtggcaagggcctcccctgccgctgtgccaggcaggcagtgccaaatccggggagcctggagctggggggagggccggggacagcccggccctgccccctcccccgctgggagcccaacaacttctgaggaaagtttggcacccatggcgtggcggtgccccaggatgggcagggtcccgctggcctggtgcttggcgctgtgcggctgggcgtgcatggcccccaggggcacgcaggctgaagaaagtcccttcgtgggcaacccagggaatatcacaggtgcccggggactcacgggcacccttcggtgtcagctccaggttcagggagagccccccgaggtacattggcttcgggatggacagatcctggagctcgcggacagcacccagacccaggtgcccctgggtgaggatgaacaggatgactggatagtggtcagccagctcagaatcacctccctgcagctttccgacacgggacagtaccagtgtttggtgtttctgggacatcagaccttcgtgtcccagcctggctatgttgggctggagggcttgccttacttcctggaggagcccgaagacaggactgtggccgccaacacccccttcaacctgagctgccaagctcagggacccccagagcccgtggacctactctggctccaggatgctgtccccctggccacggctccaggtcacggcccccagcgcagcctgcatgttccagggctgaacaagacatcctctttctcctgcgaagcccataacgccaagggggtcaccacatcccgcacagccaccatcacagtgctcccccagcagccccgtaacctccacctggtctcccgccaacccacggagctggaggtggcttggactccaggcctgagcggcatctaccccctgacccactgcaccctgcaggctgtgctgtcaaacgatgggatgggcatccaggcgggagaaccagaccccccagaggagcccctcacctcgcaagcatccgtgcccccccatcagcttcggctaggcagcctccatcctcacaccccttatcacatccgcgtggcatgcaccagcagccagggcccctcatcctggacccactggcttcctgtggagacgccggagggagtgcccctgggcccccctgagaacattagtgctacgcggaatgggagccaggccttcgtgcattggcaagagccccgggcgcccctgcagggtaccctgttagggtaccggctggcgtatcaaggccaggacaccccagaggtgctaatggacatagggctaaggcaagaggtgaccctggagctgcagggggacgggtctgtgtccaatctgacagtgtgtgtggcagcctacactgctgctggggatggaccctggagcctcccagtacccctggaggcctggcgcccagggcaagcacagccagtccaccagctggtgaaggaaccttcaactcctgccttctcgtggccctggtggtatgtactgctaggagcagtcgtggccgctgcctgtgtcctcatcttggctctcttccttgtccaccggcgaaagaaggagacccgttatggagaagtgtttgaaccaacagtggaaagaggtgaactggtagtcaggtaccgcgtgcgcaagtcctacagtcgtcggaccactgaagctaccttgaacagcctgggcatcagtgaagagctgaaggagaagctgcgggatgtgatggtggaccggcacaaggtggccctggggaagactctgggagagggagagtttggagctgtgatggaaggccagctcaaccaggacgactccatcctcaaggtggctgtgaagacgatgaagattgccatctgcacgaggtcagagctggaggatttcctgagtgaagcggtctgcatgaaggaatttgaccatcccaacgtcatgaggctcatcggtgtctgtttccagggttctgaacgagagagcttcccagcacctgtggtcatcttacctttcatgaaacatggagacctacacagcttcctcctctattcccggctcggggaccagccagtgtacctgcccactcagatgctagtgaagttcatggcagacatcgccagtggcatggagtatctgagtaccaagagattcatacaccgggacctggcggccaggaactgcatgctgaatgagaacatgtccgtgtgtgtggcggacttcgggctctccaagaagatctacaatggggactactaccgccagggacgtatcgccaagatgccagtcaagtggattgccattgagagtctagctgaccgtgtctacaccagcaagagcgatgtgtggtccttcggggtgacaatgtgggagattgccacaagaggccaaaccccatatccgggcgtggagaacagcgagatttatgactatctgcgccagggaaatcgcctgaagcagcctgcggactgtctggatggactgtatgccttgatgtcgcggtgctgggagctaaatccccaggaccggccaagttttacagagctgcgggaagatttggagaacacactgaaggccttgcctcctgcccaggagcctgacgaaatcctctatgtcaacatggatgagggtggaggttatcctgaaccccctggagctgcaggaggagctgaccccccaacccagccagaccctaaggattcctgtagctgcctcactgcggctgaggtccatcctgctggacgctatgtcctctgcccttccacaacccctagccccgctcagcctgctgataggggctccccagcagccccagggcaggaggatggtgcctgagacaaccctccacctggtactccctctcaggatccaagctaagcactgccactggggaaaactccaccttcccactttcccaccccacgccttatccccacttgcagccctgtcttcctacctatcccacctccatcccagacaggtccctccccttctctgtgcagtagcatcaccttgaaagcagtagcatcaccatctgtaaaaggaaggggttggattgcaatatctgaagccctcccaggtgttaacattccaagactctagagtccaaggtttaaagagtctagattcaaaggttctaggtttcaaagatgctgtgagtctttggttctaaggacctgaaattccaaagtctctaattctattaaagtgctaaggttctaaggcctactttttttttttttttttttttttttttttttgcgatagagtctcactgtgtcacccaggctggagtgcagtggtgcaatctcgcctcactgcaaccttcacctaccgagttcaagtgattttcctgccttggcctcccaagtagctgggattacaggtgtgtgccaccacacccggctaatttttatatttttagtagagacagggtttcaccatgttggccaggctggtctaaaactcctgacctcaagtgatctgcccacctcagcctcccaaagtgctgagattacaggcatgagccactgcactcaaccttaagacctactgttctaaagctctgacattatgtggttttagattttctggttctaacatttttgataaagcctcaaggttttaggttctaaagttctaagattctgattttaggagctaaggctctatgagtctagatgtttattcttctagagttcagagtccttaaaatgtaagattatagattctaaagattctatagttctagacatggaggttctaaggcctaggattctaaaatgtgatgttctaaggctctgagagtctagattctctggctgtaaggctctagatcataaggcttcaaaatgttatcttctcaagttctaagattctaatgatgatcaattatagtttctgaggctttatgataatagattctcttgtataagatcctagatcctaagggtcgaaagctctagaatctgcaattcaaaagttccaagagtctaaagatggagtttctaaggtccggtgttctaagatgtgatattctaagacttactctaagatcttagattctctgtgtctaagattctagatcagatgctccaagattctagatgattaaataagattctaacggtctgttctgtttcaaggcactctagattccattggtccaagattccggatcctaagcatctaagttataagactctcacactcagttgtgactaactagacaccaaagttctaataatttctaatgttggacacctttaggttctttgctgcattctgcctctctaggaccatggttaagagtccaagaatccacatttctaaaatcttatagttctaggcactgtagttctaagactcaaatgttctaagtttctaagattctaaaggtccacaggtctagactattaggtgcaatttcaaggttctaaccctatactgtagtattctttggggtgcccctctccttcttagctatcattgcttcctcctccccaactgtgggggtgtgcccccttcaagcctgtgcaatgcattagggatgcctcctttcccgcaggggatggacgatctcccacctttcgggccatgttgcccccgtgagccaatccctcaccttctgagtacagagtgtggactctggtgcctccagaggggctcaggtcacataaaactttgtatatcaacg

SEQ ID NO: 3103 - DNA, 4709 bp, Homo sapiens
  source 1..4709: mol_type = unassigned DNA
gggaaggaggcaggggtgctgagaaggcggctgctgggcagagccggtggcaagggcctcccctgccgctgtgccaggcaggcagtgccaaatccggggagcctggagctggggggagggccggggacagcccggccctgccccctcccccgctgggagcccaacaacttctgaggaaagtttggcacccatggcgtggcggtgccccaggatgggcagggtcccgctggcctggtgcttggcgctgtgcggctgggcgtgcatggcccccaggggcacgcaggctgaagaaagtcccttcgtgggcaacccagggaatatcacaggtgcccggggactcacgggcacccttcggtgtcagctccaggttcagggagagccccccgaggtacattggcttcgggatggacagatcctggagctcgcggacagcacccagacccaggtgcccctgggtgaggatgaacaggatgactggatagtggtcagccagctcagaatcacctccctgcagctttccgacacgggacagtaccagtgtttggtgtttctgggacatcagaccttcgtgtcccagcctggctatgttgggctggagggcttgccttacttcctggaggagcccgaagacaggactgtggccgccaacacccccttcaacctgagctgccaagctcagggacccccagagcccgtggacctactctggctccaggatgctgtccccctggccacggctccaggtcacggcccccagcgcagcctgcatgttccagggctgaacaagacatcctctttctcctgcgaagcccataacgccaagggggtcaccacatcccgcacagccaccatcacagtgctcccccagcagccccgtaacctccacctggtctcccgccaacccacggagctggaggtggcttggactccaggcctgagcggcatctaccccctgacccactgcaccctgcaggctgtgctgtcaaacgatgggatgggcatccaggcgggagaaccagaccccccagaggagcccctcacctcgcaagcatccgtgcccccccatcagcttcggctaggcagcctccatcctcacaccccttatcacatccgcgtggcatgcaccagcagccagggcccctcatcctggacccactggcttcctgtggagacgccggagggagtgcccctgggcccccctgagaacattagtgctacgcggaatgggagccaggccttcgtgcattggcaagagccccgggcgcccctgcagggtaccctgttagggtaccggctggcgtatcaaggccaggacaccccagaggtgctaatggacatagggctaaggcaagaggtgaccctggagctgcagggggacgggtctgtgtccaatctgacagtgtgtgtggcagcctacactgctgctggggatggaccctggagcctcccagtacccctggaggcctggcgcccagtgaaggaaccttcaactcctgccttctcgtggccctggtggtatgtactgctaggagcagtcgtggccgctgcctgtgtcctcatcttggctctcttccttgtccaccggcgaaagaaggagacccgttatggagaagtgtttgaaccaacagtggaaagaggtgaactggtagtcaggtaccgcgtgcgcaagtcctacagtcgtcggaccactgaagctaccttgaacagcctgggcatcagtgaagagctgaaggagaagctgcgggatgtgatggtggaccggcacaaggtggccctggggaagactctgggagagggagagtttggagctgtgatggaaggccagctcaaccaggacgactccatcctcaaggtggctgtgaagacgatgaagattgccatctgcacgaggtcagagctggaggatttcctgagtgaagcggtctgcatgaaggaatttgaccatcccaacgtcatgaggctcatcggtgtctgtttccagggttctgaacgagagagcttcccagcacctgtggtcatcttacctttcatgaaacatggagacctacacagcttcctcctctattcccggctcggggaccagccagtgtacctgcccactcagatgctagtgaagttcatggcagacatcgccagtggcatggagtatctgagtaccaagagattcatacaccgggacctggcggccaggaactgcatgctgaatgagaacatgtccgtgtgtgtggcggacttcgggctctccaagaagatctacaatggggactactaccgccagggacgtatcgccaagatgccagtcaagtggattgccattgagagtctagctgaccgtgtctacaccagcaagagcgatgtgtggtccttcggggtgacaatgtgggagattgccacaagaggccaaaccccatatccgggcgtggagaacagcgagatttatgactatctgcgccagggaaatcgcctgaagcagcctgcggactgtctggatggactgtatgccttgatgtcgcggtgctgggagctaaatccccaggaccggccaagttttacagagctgcgggaagatttggagaacacactgaaggccttgcctcctgcccaggagcctgacgaaatcctctatgtcaacatggatgagggtggaggttatcctgaaccccctggagctgcaggaggagctgaccccccaacccagccagaccctaaggattcctgtagctgcctcactgcggctgaggtccatcctgctggacgctatgtcctctgcccttccacaacccctagccccgctcagcctgctgataggggctccccagcagccccagggcaggaggatggtgcctgagacaaccctccacctggtactccctctcaggatccaagctaagcactgccactggggaaaactccaccttcccactttcccaccccacgccttatccccacttgcagccctgtcttcctacctatcccacctccatcccagacaggtccctccccttctctgtgcagtagcatcaccttgaaagcagtagcatcaccatctgtaaaaggaaggggttggattgcaatatctgaagccctcccaggtgttaacattccaagactctagagtccaaggtttaaagagtctagattcaaaggttctaggtttcaaagatgctgtgagtctttggttctaaggacctgaaattccaaagtctctaattctattaaagtgctaaggttctaaggcctactttttttttttttttttttttttttttttttgcgatagagtctcactgtgtcacccaggctggagtgcagtggtgcaatctcgcctcactgcaaccttcacctaccgagttcaagtgattttcctgccttggcctcccaagtagctgggattacaggtgtgtgccaccacacccggctaatttttatatttttagtagagacagggtttcaccatgttggccaggctggtctaaaactcctgacctcaagtgatctgcccacctcagcctcccaaagtgctgagattacaggcatgagccactgcactcaaccttaagacctactgttctaaagctctgacattatgtggttttagattttctggttctaacatttttgataaagcctcaaggttttaggttctaaagttctaagattctgattttaggagctaaggctctatgagtctagatgtttattcttctagagttcagagtccttaaaatgtaagattatagattctaaagattctatagttctagacatggaggttctaaggcctaggattctaaaatgtgatgttctaaggctctgagagtctagattctctggctgtaaggctctagatcataaggcttcaaaatgttatcttctcaagttctaagattctaatgatgatcaattatagtttctgaggctttatgataatagattctcttgtataagatcctagatcctaagggtcgaaagctctagaatctgcaattcaaaagttccaagagtctaaagatggagtttctaaggtccggtgttctaagatgtgatattctaagacttactctaagatcttagattctctgtgtctaagattctagatcagatgctccaagattctagatgattaaataagattctaacggtctgttctgtttcaaggcactctagattccattggtccaagattccggatcctaagcatctaagttataagactctcacactcagttgtgactaactagacaccaaagttctaataatttctaatgttggacacctttaggttctttgctgcattctgcctctctaggaccatggttaagagtccaagaatccacatttctaaaatcttatagttctaggcactgtagttctaagactcaaatgttctaagtttctaagattctaaaggtccacaggtctagactattaggtgcaatttcaaggttctaaccctatactgtagtattctttggggtgcccctctccttcttagctatcattgcttcctcctccccaactgtgggggtgtgcccccttcaagcctgtgcaatgcattagggatgcctcctttcccgcaggggatggacgatctcccacctttcgggccatgttgcccccgtgagccaatccctcaccttctgagtacagagtgtggactctggtgcctccagaggggctcaggtcacataaaactttgtatatcaacg

SEQ ID NO: 3104 - DNA, 912 bp, Homo sapiens
  source 1..912: mol_type = unassigned DNA
acagacctgccccgccatgacccggctgacagtcctggccctgctggctggtctgctggcgtcctcgagggccggctccagcccccttttggacatcgttggcggccggaaggcgaggccccgccagttcccgttcctggcctccattcagaatcaaggcaggcacttctgcgggggtgccctgatccatgcccgcttcgtgatgaccgcggccagctgcttccaaagccagaaccccggggttagcaccgtggtgctgggtgcctatgacctgaggcggcgggagaggcagtcccgccagacgttttccatcagcagcatgagcgagaatggctacgacccccagcagaacctgaacgacctgatgctgcttcagctggaccgtgaggccaacctcaccagcagcgtgacgatactgccactgcctctgcagaacgccacggtggaagccggcaccagatgccaggtggccggctgggggagccagcgcagtggggggcgtctctcccgttttcccaggtttgtcaacgtgactgtgacccccgaggaccagtgtcgccccaacaacgtgtgcaccggtgtgctcacccgccgcggtggcatctgcaatggggacgggggcacccccctcgtctgcgagggcctggcccacggcgtggcctccttttccctggggccctgtggccgaggccctgacttcttcacccgagtggcgctcttccgagactggatcgatggtgttctcaacaacccgggaccggggccagcctaggggggcctgtgacctcccatggagcccagccccgccctccacacctccggcgctccgcacccacctcccacggccccgcccctgcccccgctccggccagaggggccctggctgtaataaagaagccgatctctcctctg

SEQ ID NO: 3105 - DNA, 1713 bp, Homo sapiens
  source 1..1713: mol_type = unassigned DNA
ggcagaggggaaatggggcctggcccacgggagagctgaggcccacgtttggccaggacagggtggatggaggctggggcctccgcagggaagatggacaggctccagcccccttttggacatcgttggcggccggaaggcgaggccccgccagttcccgttcctggcctccattcagaatcaaggcaggcacttctgcgggggtgccctgatccatgcccgcttcgtgatgaccgcggccagctgcttccaaagccagaaccccggggttagcaccgtggtgctgggtgcctatgacctgaggcggcgggagaggcagtcccgccagacgttttccatcagcagcatgagcgagaatggctacgacccccagcagaacctgaacgacctgatgctgcttcagctggaccgtgaggccaacctcaccagcagcgtgacgatactgccactgcctctgcagaacgccacggtggaagccggcaccagatgccaggtggccggctgggggagccagcgcagtggggggcgtctctcccgttttcccaggtttgtcaacgtgactgtgacccccgaggaccagtgtcgccccaacaacgtgtgcaccggtgtgctcacccgccgcggtggcatctgcaatgtgagtgctccctgtggcgggaggaggggtcctgagaggtactgagctctccgtggcaggagaaagcaagtgcaggctgagggcggcacagcaggggggccccaggattgagcattttcacggtaggagaaacagtatctttttttttttttttgagacagagtctcgctctgtcgcccaggctggagtgtagtggcgtgatctcggcggctcactgcaacctccgcctcctgggttcaagcgattctcctgcctcagcctcctaagtagctgggattacaggcatgcgccaccacgcccggctaattttgtatttttagtagagacagggtttctccatgtgggtcaggctggtctcgaactcctgacctcatgatcgacccaccttggcctcccaaagtgttaggataacaggcatgagccaccgtgcctggctgagaaacagtagctatcaaacgccggctgtgagccacgtctgtgctgggggttggggacccagcaggcatggtagagccggtcactgagggactcaggcgtgtgattgccaggggaggggcacctggcccagcctggaggtgccaggaagctccagaaagcaactgatcccaaagtccactagcagttaaccagggcagagaaagagaagagccatgcaaaggccctggggctggatcaggacttgtaggttccaggggcagcaagaggcctctgcagttctggggtggcgtgggagccaggccctgggacgccctgacacagctgctgcctgcccagggggacgggggcacccccctcgtctgcgagggcctggcccacggcgtggcctccttttccctggggccctgtggccgaggccctgacttcttcacccgagtggcgctcttccgagactggatcgatggtgttctcaacaacccgggaccggggccagcctaggggggcctgtgacctcccatggagcccagccccgccctccacacctccggcgctccgcacccacctcccacggccccgcccctgcccccgctccggccagaggggccctggctgtaataaagaagccgatctctcctctg

SEQ ID NO: 3106 - DNA, 11073 bp, Homo sapiens
  source 1..11073: mol_type = unassigned DNA
agttgcggcgtcctgtgagcgcggggatgctgggaggagggtgaaatttagccatcggtgtgtggcagggtcatgaaaaagcggcggcggcgggagagaggaggaggcggcggcggggcagtgaaactacggtagctgccccctgagctggtggtgtggctttgtggggagggcgtagttcctaatcccctttccgggcagccgccggggctcggggctgtgagcggccgtgaggctgcctccccgggccccctgcctccgccatgttccgcagggcacgccttagcgtgaagccgaatgtcaggcctggtgtaggcgccaggggctccacagcttccaatccccagcgtggacgggagtctcccaggccgccggatcctgccacggactctgcttccaagcccgcggagcccacagatgtgcccacagtcgatttcggtggagcggagccccaagaaaaggctcctaggagcagtactgaaaagactggtggtgacaatgatgttgaagaatccagtagatcttcctctactgtttcacagagaagaaagcgaatatcaagtacttctagcctggttaagtctagtgtcagtgttccttcagaatctcatcccttatctacaattaatcaagaggctccacagccaactgccacttcaacaaaagagaaacagccatgctcagacagataccgaatatacaaagcccagaaactgagggaaatgttaaaagaagaattgagaaaagagaagaaacaatggaaaaacaaatatgctataaatgaaagtcagaggccaccagatcgttcaaaaatgactatgagagacttcatatattatctaccagataataatccaatgacttcttcactggaacaagaaaagaaaactgaaaagccatcgactccagtccagacaagagagcaagaaggtaagagtactcctaatgctgaagataatgaaatggaagaagagacagatgatgggccattactggttcctcgagtaaaagtggcagaagatggttccattattttggatgaagaaagtttaactgtagaagttttaagaacaaaaggcccttgtgttgttgaagaaaatgaccccatatttgagcgcggttctacaactacatactccagctttaggaaaaactattactctaaaccatggtcaaataaagaaacagatatgttttttttagccatcagcatggtaggaactgacttttctatgatcggacaactttttcctcacagagcaaggatagaaattaagaataaatttaaacgggaagagaaaacaaatggatggagaatagacaaagcattccaggaaaagcgcccttttgacttcgatttttttgctcatttgcttcagaaagttcttgctgaagaagagaaaagaaaacaaaaatctgttaaaaatcacagtttaaaggagaagaaatccaccaaaccacggaaaaatgtaaaagtgaaaaaagttgcctgtgaaggagtgaataatgatccagatgagtctatgagttctagaatttcagacacggaaagatctcagaaggatgctcagacagttgaagaagagtctctgaccttatcaagggaggatgcagagcaggttgcattagaagtagacctaaatcaaaagaaaagaaggaggaagaagcaagatggagctaatgaactgggagtaaacaatcttttagaaaatgccactgttcaggcgggtccttctaaaggagaaaaacacaagaataaatgtcaggctataaggcctgagctaaaggaaggtgaatgcagtaaggagcagatgctttcctgcacacaaaacatagatggcattgtgggttttgcctccactgaaaaagttgagaaaagaactgaccccatcctttcattaagtaatcaacaagatgccacatcagtagcaactgagtcttcagaatcaagcacttcagatttgccttcattcgaagttggaattagagcattgtgtgaggtgaataatgctgagggtagttgtatagaagaaagaaatgttgacctaaaaaataattcactggaaattgatcaaacagaaaatgttaaaccaatgttgagaggtcgcttccaaagacctaaacccaatttgtcaagggctgggaagaaatcagttctttcacaaggcaaaacagagtcagagagcaagaattcacattcaaaaacttcagttgaaaagaaccacgtggaaaaagataaaatgaatacattggacattttgagaatggagactacagagagagagaatccagaagctgaaactgtatctgttttgggtgaaaaaaattgtctgcaggaagggagtcaactaaaggctttaagacctgtacaagtgaggggccgattgcaaaagccaaagccaaatgcaggtaaagctgctgaaagaaaagaaattctcatatcacaggaagaaattggggccaatgtagagaagaatgaaaatgaatcctgtgctgatagagatactcctcaacacatggaagatcaatcgcgtaaagattttgaagaggaagatgtcatattacagcctgagaaaaatgattcttttcaaaatgtgcagccagatgagcccaaggttcttaatgaatgtctaagcgttcaagagaataataaggcaaataaacttaaccaagtcccaattctaaggactcgatttcagaaaccaaagccaaatataggaagaggaactggaaggagagaaatttcctcaaaggaagaggtactagagaagattcttgtctctggggaaatggcggcagcattgagagaaactgtaagactagacacctcaccaaaggagatggtaccagcagagattaatactaaagaaatgcagtcagatttaaaagaaactggaagaagagccatttctcccagggagaagattctagatgtgattgatgacaccatagaaatggagacaggtctgaaagcaatgggaagagagatttgtctaagggagaagacgccagaggtgattgatgccactgaggaaatagacaaagatttggaagaagctggaagaagagaaatatccccacagaaaaatggcccagaggaggttaagcctctaggtgaagtggagacagatttgaaagcaactggaaatgagagttccccaagggagaagacaccagaggtgactgatgccactgaggaaatagacaaaaatttggaagaaactggaagaagaaaaatatccccaagggaaaatggcccagaggaggtcaagcctgtagatgaaatggagacagatttgaacgcaactggaagagagagttctccaagggagaagacaccagaggtgattgatgctactgaggaaatagatttggaagaaactgaaagagaagtatccccacaggaaaatggactagaggaggtcaagcctctaggtgaaatggagacggatttgaaagcaactggaagagacagtttcccaagggggaagacaccagaggtgattgatgccattgaggaaatagagatagatttggaagaaactgaaagagaaatatccccacaggaaaatggcctagaggaggttaagcctctaggtgaaatgcaaacagatttgaaagcaaccggaagggagatttccccaagggagaagacaccagaggtgattgatgccactgaggaaatagacaaagatctggaagaaactggaagaagagaaatatccccagaggaaaatggcccagaggaggtcaagcctgtagatgaaatggagacagacttgaaaacaactggaagagagggttcctcaagggagaagacacgagaggtgattgatgctgctgaggtaatagagacagatttggaagaaactgaaagagaaatatcgccacaggaaaatggcccagaggaggtcaagcctgtaggtaaaatggagacagatttgaaagaaattagagaagaaatttcccaaagggaaaaggtgctagcagagttcagtgctataagggaaaaggagattgatttgaaagaaactggaaaaagagacattcccatcatggagaaagtatcaggaaagatggctgttgttgaagaaatggaggcagatttgaaagaaactggaaaagaaaattttagagagagaggatctgaagagatctgtgttactgaggaaaaggtggcagaattgaaacaaactggaaaaacagacatttctccaagggaaaacgagctagaggagaccagtacctcaagacaaactgacacacatttaatgcagagcggtagcaatgacttcagtgctgtgccttcactagatattcagaacattagcagtgaagtactgtcgatgatgcatacacctgtagaagaaaaaagaaattctgaaaaagaagtatcaagtcacttcagtcatttcaagatttcttcacagactcatgaatctgataaaacagaagtccaggggattcaatctccagatgttccagagcagttttcagatattaatttaagcaaatctcttcctcaagaacagaagccacttgaaattaaaccagcaccttttgtgaggagccgattcaaaagaccaaaaccaaacttagcaagagcagctttgaagagagagactacagaatcagaaaaatatatatatgagaagaaatcagaaaccaagaaaatggagactattgtgatgcaagaaaataatgaacaaactgatactctcccttctcaacatgatgaagcttccctaatgatatcaagagaaaaagacacattaggtcacaggaatgaggaggctgtgatattgccatgtacacagactgaaaggaacctttcaccttcaaattcttgtgaacctaaagaggagtctcagtcagcaccagtccagaaaaatgactcagttgtttctgtggggactaataatgtaaacactttccagcaagaaatgaaggaaagtgttatccaaactgctcgacaagtaaggggccgacttcagagaccgagaccaaatataagaaagacaggacagaggcaaatagtagacaaaggtgaagccaaaggcataattaaggaaggaagaacgatattaccaaaagatgaaactgaaaagaaagtcttaactgtgtcaaattctcaaattgaaactgaaattgaagttccatcgtccgcagttccagaacacagaatgtatgaaaatcaaagtcaggtggttcttgtagaaaaccttcatgttaacaaaacaaatgaaacaatcagacatgaaaataaaccgtatgttcctagttcagcacaaatgacaagaaggaaattccaaaaggctaagccaaatttgggaagagcacacagtaagaaagaggaaccagttttagaaaaagtcacaacagatcagagcaaggaaggcaagccagaagatcatttgctgcagaaaggagcttccaacacccagctccttctaaaagaaaaagctgagcttctgacatctctggaggtttcagcaagaaaagattgtgtaggttccaaagagtctgctttggcaaaaatagatgcggaattagaagaagttggaccatcaagaagggttggagaggaaactgtaggagataattcaccatcttcagttgttgaagagcaatatctcaataaactaacaagctgtccacaaccgttaaacgaaacaagttactctaaaattgccctggatgggaaaacaactatctcttctacatctgagtatgagagaaatcgtggtgaaaggagaagtcataaaaagttcaaaccaaatgtcaccagaggtcgtggatcaaaacgagttcggggtaagacctctaagaaggaacctagagcttccaaggccatgctggtgactcttcgggcttcccaggaagaagatgatgatgctgacgattttgagtctgactatgaggaagaaagctatcatcttgctcccgaagaagtaaacaaagctccagtatttgtacctgttggtctcagatctcctgaacctgtttctgctcagattgaggaaacaatggaagagcttgaaataactgtgaatgtcccagatgtaggatgcatagctgttgttgaacatgagctaccaaacacagatgtgactactgaagaaatgaaacaagaagaaaatttgagtgtaccgtttgaaatgaccacaagtgaacatatccaagatgaaccaggtaccaatgatggaagcaccgaagctgcaataactttacttacaatgggagatctagtattgcagtcagagatcagtagtgaacagggtgatgtaggagtatgtataattcctcatgttcattcaaaggataaaagccatattccttctagcctagataatgtaaatcacaaaattgttcatgaatgtcaggaactttcttcacctgtcattactacatctcctgcatcatttgaagaaaacaagattgtattggaggaacaaagttccagagaagaaataagtttaatggagaaagtaaaggagaatgctacaccaaccaggaatacaatttctaaagtgaccagtaatttgagaataagaagtaggcttgctaagcctaaaccaaatcttgagaagactttagggaccaacaggcttgatgattatcaggaagtttccagtttgtgtgtaaccaaaggggcagaaatggaaactcaaagagaaacagagaaaaatgcttccaaagcaacagaattggaaaataaaaacctcggaccagttacaacagcagagaataaggatcagagcaaattggcatgtgtacatggtatcaaagggaccagtatttcttcagaagtaaacctaactgaaagaaacgaaaatcaagaagagagctctcaggaggttcacatgttgtcagttgctccagttgcttcctctgagacagggccctgcacacttggtttggataggggtcttggtgaaaattctgttgaagagccccagataaaggactctaaaggagacagtgtgcttacacttcctgtgccagagtatacaccaacaagtattccagaagtccaacaagagaatataatcaatcctcaagacctaacagtgaatctagttgctaatgtacctcaagatggagaagatgaacaagcctttattttaactctggtggaaatcccagccaatgcagtagaagaatttactgatgccactgcacagttcatgccaaaccctttactgccagctcccatattggtcaaatcagtgaataccgaagaaaggggtgacatgagtatttgtttaccagcaacttcagttggtcaagatgccatgggtttatctatttctggaagagataattctaaaaagccgcctgataatttggatcttgtatctaggaagagatttcaatgcaggcttgataaaaatgaccacattcctcctgccaaaaaacgttcactcactttaagagatgactgtcaagaatataccactgaggtgcactcaaaggaattaacaaatgtttttgaggaaacaggggagtctcacaagggacaagatatttttcttacctcaggaagcacactgacaactccagaacctcaaagacagcaagttgaagcagcttttcagagtagaggatctagatctcctgatgcatgcatggacaagaatgtgcctcagttacctcaggatgaaatgattgtgtctgataaggaagaaagaactgatgctgctcctaagtctcagcaaatggatagcagaacatcgtcttctaaagcctcactatccagacctggcagaagacccctgggatttttatctttaatatgctcaaagaatagtttggagtctgatgaacctatgcaagtccatagtaagaaacgcctaaaacctcttatacctggattaagaaagaaattgaaaagatctaatccattcaatgaaagccaggaaaaaaatcgagagtcctctgatctgcttccatctccaagtgttattactactcaatctgagaatattagcagctcagcaactcaggtttcttgtgatcagcccttactgaaagaaggatataaaagtgcccaaaagcgggcccctcaaggggaggcaaccacagtctctgaatatttcttcaatgatatcttcattgaagtggatgaaacagaataaaacaatcttttctctttttcttttttaaattaggtctaggatttccagagtcaattacatcaacaaaacagtatttagagcaaaatatcactgtcttatttttctttaggttgattttgaatacttaatgagcttgatttgaagcttttataatcagtggaaaacatttctgaggttcctttcattctgactgattcagcattttgcaaatagcaagcaattaagactgctttctcagacagaaataacaactcttgtttacattttgactcttcctgtgctaagcacacatggacatttgggaatgttgtggatatatgtctctgtatgaattgcagtgcagacagatttgggggttaattgtatcatatttaacatttagcaacttcttttgtgaagattttttatttttagggggagatgatgaaggatgaaggctttttcatttgcttctaagtacagtcatgtatcacataatgaagtttaagtcaatgatggaccacatatattacagtggtcccatgcaattaaaatggagataaattcctatcaactagtgacattatagccatcataacacagtgcattgcttttttatgtttagatatgtttagatacacaaatacttactattgtgttacaactgcctacagtattcagcatagtaacacattgtagaggtttgtagccgaggagcaataggctataccacatagcctcagtctgtacggtgtgtagcagcctgtaccatctcagtgtttgtaagtacactctgcgttgtttcacacaagatcacctaacaaggcaattcttagaacatgtagttaagggacacgtgactatatgtgaaaacaaattgtcaaacttcactttagtatggcaaatgttaaagaacttttctattatcagctgtttgtctgactgaaaaatacatatttttctaattcatggtgatgtaacattagtcctaattgaaaaactagtatttaaacataattatttataaagatgacacatcaaagggcttatttatttttaaattttttatttaaaaggatattcagttttagctatttttacccctcagattgtagataaagaaggcattaaatttatgtttgtctcctttttctgtttaattttaaagatatttaaaatgatataactaaaaatgtttagctggtgtatatgttttgaatacctttttcccctcagtttagtatattgactttgtactgtaaatttttctgcttttcttggataatctcaggattttcatgaggatagggggaactcaactttatttatgagacaaaatttccatacaaagctcaatctcctttatacacccacagacataatattagtttttaaaaagccaatttcttcatagttttttcccattaaattctcaaggaacacttggatctttaagcacggaacataatcatgatgttaaaaacagagaaaataaggctttataaagttaatgattatcatcagtatgaatttaaggtttgttttaatttcaagatttgattttttatacgtgtaattctattatctacccaagcagatctgtagtggttccaattagacttctcaaacagcaaatttatcctgattttatttgaaaagcctcttggattgatagtatagtagctcaggcattggaaactttctgcaaactgttttgggtttgcaggccagatggtctctgtggcagctactcagctctgcaatttcagtgtgaaagaagccatagacagtacttgaatgaaggactgtggctggattggccttttagtttgaccccctacattaggccccaaattttcttaccctgaggtgctgatatctgtatggatgagttatttgtcactaaagttatgagttgtgcctaaaagttaaaactgttgactgtattatgtaatgatcagtatttcagttgggaagatattttagagtctagataattatgtttgtatattgaaaaaatggtggccagtttttaagttccttaatagaagagaattatgtctcagcacatataacagtaatgctaatttattgaaactactgctgttagagcacttcttattcattgtcttttagtgaaatttatggcgtaacactttgtcagagaggaggctatataattcggagcggaaattgtctataagtaggcatttatttcatgattgatatgtcacagaaatcatggtagtaaatcacattgctatttgaataccctgtttttgtaagtttttaaaactcatattctgaaaagatttcattctcttagtgttagcttgggagttagattgccatgattaaactattatttatccttgtgtaatattagtttttaactttaacatctgtttctttttaatctataatgagctagttttatggaaaatggaatttcttactatataaagaatacagagactcattgtattagagaatcaagtcagccagctaaagtatcctactgttaaatccttaaacctaattttggaaaagagaaagttaatcaatgtatttaccttacatgttggaaagaactatgttaggtctgattcatgtgaagaagatgttgcaaaggatttatttcacaaattttaaaggagatatgagtaaaagtttttatcttttcttgactttttctcctgaacacttatgtcttagcaagtggtcaacatgaggatttgaacgcctaattgttggtaaatggttgaggcatgacaaaaatattaatatccactgtttaccatcatgttatttgaaacaaaagtgaccatgtatactatcttgcttgaagaagtctttgacagaaaaagcaatatcatgtcatttataaattttcttgttctaaagaaagcagttatatatatatataaattatgtaaataaaagttattttatatca

SEQ ID NO: 3107 - DNA, 10885 bp, Homo sapiens
  source 1..10885: mol_type = unassigned DNA
agttgcggcgtcctgtgagcgcggggatgctgggaggagggtgaaatttagccatcggtgtgtggcagggtcatgaaaaagcggcggcggcgggagagaggaggaggcggcggcggggcagtgaaactacggtagctgccccctgagctggtggtgtggctttgtggggagggcgtagttcctaatcccctttccgggcagccgccggggctcggggctgtgagcggccgtgaggctgcctccccgggccccctgcctccgccatgttccgcagggcacgccttagcgtgaagccgaatgtcaggcctggtgtaggcgccaggggctccacagcttccaatccccagcgtggacgggagtctcccaggccgccggatcctgccacggactctgcttccaagcccgcggagcccacagatgtgcccacagtcgatttcggtggagcggagccccaagaaaaggctcctaggagcagtactgaaaagactggtggtgacaatgatgttgaagaatccagtagatcttcctctactgtttcacagagaagaaagcgaatatcaagtacttctagcctggttaagtctagtgtcagtgttccttcagaatctcatcccttatctacaattaatcaagaggctccacagccaactgccacttcaacaaaagagaaacagccatgctcagacagataccgaatatacaaagcccagaaactgagggaaatgttaaaagaagaattgagaaaagagaagaaacaatggaaaaacaaatatgctataaatgaaagtcagaggccaccagatcgttcaaaaatgactatgagagacttcatatattatctaccagataataatccaatgacttcttcactggaacaagaaaagaaaactgaaaagccatcgactccagtccagacaagagagcaagaaggtaagagtactcctaatgctgaagataatgaaatggaagaagagacagatgatgggccattactggttcctcgagtaaaagtggcagaagatggttccattattttggatgaagaaagtttaactgtagaagttttaagaacaaaaggcccttgtgttgttgaagaaaatgaccccatatttgagcgcggttctacaactacatactccagctttaggaaaaactattactctaaaccatggtcaaataaagaaacagatatgttttttttagccatcagcatggtaggaactgacttttctatgatcggacaactttttcctcacagagcaaggatagaaattaagaataaatttaaacgggaagagaaaacaaatggatggagaatagacaaagcattccaggaaaagcgcccttttgacttcgatttttttgctcatttgcttcagaaagttcttgctgaagaagagaaaagaaaacaaaaatctgttaaaaatcacagtttaaaggagaagaaatccaccaaaccacggaaaaatgtaaaagtgaaaaaagttgcctgtgaaggagtgaataatgatccagatgagtctatgagttctagaatttcagacacggaaagatctcagaaggatgctcagacagttgaagaagagtctctgaccttatcaagggaggatgcagagcaggttgcattagaagtagacctaaatcaaaagaaaagaaggaggaagaagcaagatggagctaatgaactgggagtaaacaatcttttagaaaatgccactgttcaggcgggtccttctaaaggagaaaaacacaagaataaatgtcaggctataaggcctgagctaaaggaaggtgaatgcagtaaggagcagatgctttcctgcacacaaaacatagatggcattgtgggttttgcctccactgaaaaagttgagaaaagaactgaccccatcctttcattaagtaatcaacaagatgccacatcagtagcaactgagtcttcagaatcaagcacttcagatttgccttcattcgaagttggaattagagcattgtgtgaggtgaataatgctgagggtagttgtatagaagaaagaaatgttgacctaaaaaataattcactggaaattgatcaaacagaaaatgttaaaccaatgttgagaggtcgcttccaaagacctaaacccaatttgtcaagggctgggaagaaatcagttctttcacaaggcaaaacagagtcagagagcaagaattcacattcaaaaacttcagttgaaaagaaccacgtggaaaaagataaaatgaatacattggacattttgagaatggagactacagagagagagaatccagaagctgaaactgtatctgttttgggtgaaaaaaattgtctgcaggaagggagtcaactaaaggctttaagacctgtacaagtgaggggccgattgcaaaagccaaagccaaatgcaggtaaagctgctgaaagaaaagaaattctcatatcacaggaagaaattggggccaatgtagagaagaatgaaaatgaatcctgtgctgatagagatactcctcaacacatggaagatcaatcgcgtaaagattttgaagaggaagatgtcatattacagcctgagaaaaatgattcttttcaaaatgtgcagccagatgagcccaaggttcttaatgaatgtctaagcgttcaagagaataataaggcaaataaacttaaccaagtcccaattctaaggactcgatttcagaaaccaaagccaaatataggaagaggaactggaaggagagaaatttcctcaaaggaagaggtactagagaagattcttgtctctggggaaatggcggcagcattgagagaaactgtaagactagacacctcaccaaaggagatggtaccagcagagattaatactaaagaaatgcagtcagatttaaaagaaactggaagaagagccatttctcccagggagaagattctagatgtgattgatgacaccatagaaatggagacaggtctgaaagcaatgggaagagagatttgtctaagggagaagacgccagaggtgattgatgccactgaggaaatagacaaagatttggaagaagctggaagaagagaaatatccccacagaaaaatggcccagaggaggttaagcctctaggtgaagtggagacagatttgaaagcaactggaaatgagagttccccaagggagaagacaccagaggtgactgatgccactgaggaaatagacaaaaatttggaagaaactggaagaagaaaaatatccccaagggaaaatggcccagaggaggtcaagcctgtagatgaaatggagacagatttgaacgcaactggaagagagagttctccaagggagaagacaccagaggtgattgatgctactgaggaaatagatttggaagaaactgaaagagaagtatccccacaggaaaatggactagaggaggtcaagcctctaggtgaaatggagacggatttgaaagcaactggaagagacagtttcccaagggggaagacaccagaggtgattgatgccattgaggaaatagagatagatttggaagaaactgaaagagaaatatccccacaggaaaatggcctagaggaggttaagcctctaggtgaaatgcaaacagatttgaaagcaaccggaagggagatttccccaagggagaagacaccagaggtgattgatgccactgaggaaatagacaaagatctggaagaaactggaagaagagaaatatccccagaggaaaatggcccagaggaggtcaagcctgtagatgaaatggagacagacttgaaaacaactggaagagagggttcctcaagggagaagacacgagaggtgattgatgctgctgaggtaatagagacagatttggaagaaactgaaagagaaatatcgccacaggaaaatggcccagaggaggtcaagcctgtaggtaaaatggagacagatttgaaagaaattagagaagaaatttcccaaagggaaaaggtgctagcagagttcagtgctataagggaaaaggagattgatttgaaagaaactggaaaaagagacattcccatcatggagaaagtatcaggaaagatggctgttgttgaagaaatggaggcagatttgaaagaaactggaaaagaaaattttagagagagaggatctgaagagatctgtgttactgaggaaaaggtggcagaattgaaacaaactggaaaaacagacatttctccaagggaaaacgagctagaggagaccagtacctcaagacaaactgacacacatttaatgcagagcggtagcaatgacttcagtgctgtgccttcactagatattcagaacattagcagtgaagtactgtcgatgatgcatacacctgtagaagaaaaaagaaattctgaaaaagaagtatcaagtcacttcagtcatttcaagatttcttcacagactcatgaatctgataaaacagaagtccaggggattcaatctccagatgttccagagcagttttcagatattaatttaagcaaatctcttcctcaagaacagaagccacttgaaattaaaccagcaccttttgtgaggagccgattcaaaagaccaaaaccaaacttagcaagagcagctttgaagagagagactacagaatcagaaaaatatatatatgagaagaaatcagaaaccaagaaaatggagactattgtgatgcaagaaaataatgaacaaactgatactctcccttctcaacatgatgaagcttccctaatgatatcaagagaaaaagacacattaggtcacaggaatgaggaggctgtgatattgccatgtacacagactgaaaggaacctttcaccttcaaattcttgtgaacctaaagaggagtctcagtcagcaccagtccagaaaaatgactcagttgtttctgtggggactaataatgtaaacactttccagcaagaaatgaaggaaagtgttatccaaactgctcgacaagtaaggggccgacttcagagaccgagaccaaatataagaaagacaggacagaggcaaatagtagacaaaggtgaagccaaaggcataattaaggaaggaagaacgatattaccaaaagatgaaactgaaaagaaagtcttaactgtgtcaaattctcaaattgaaactgaaattgaagttccatcgtccgcagttccagaacacagaatgtatgaaaatcaaagtcaggtggttcttgtagaaaaccttcatgttaacaaaacaaatgaaacaatcagacatgaaaataaaccgtatgttcctagttcagcacaaatgacaagaaggaaattccaaaaggctaagccaaatttgggaagagcacacagtaagaaagaggaaccagttttagaaaaagtcacaacagatcagagcaaggaaggcaagccagaagatcatttgctgcagaaaggagcttccaacacccagctccttctaaaagaaaaagctgagcttctgacatctctggaggtttcagcaagaaaagattgtgtaggttccaaagagtctgctttggcaaaaatagatgcggaattagaagaagttggaccatcaagaagggttggagaggaaactgtaggagataattcaccatcttcagttgttgaagagcaatatctcaataaactaacaagctgtccacaaccgttaaacgaaacaagttactctaaaattgccctggatgggaaaacaactatctcttctacatctgagtatgagagaaatcgtggtgaaaggagaagtcataaaaagttcaaaccaaatgtcaccagaggtcgtggatcaaaacgagttcggggtaagacctctaagaaggaacctagagcttccaaggccatgctggtgactcttcgggcttcccaggaagaagatgatgatgctgacgattttgagtctgactatgaggaagaaagctatcatcttgctcccgaagaagtaaacaaagctccagtatttgtacctgttggtctcagatctcctgaacctgtttctgctcagattgaggaaacaatggaagagcttgaaataactgtgaatgtcccagatgtaggatgcatagctgttgttgaacatgagctaccaaacacagatgtgactactgaagaaatgaaacaagaagaaaatttgagtgtaccgtttgaaatgaccacaagtgaacatatccaagatgaaccaggtaccaatgatggaagcaccgaagctgcaataactttacttacaatgggagatctagtattgcagtcagagatcagtagtgaacagggtgatggagtatgtataattcctcatgttcattcaaaggataaaagccatattccttctagcctagataatgtaaatcacaaaattgttcatgaatgtcaggaactttcttcacctgtcattactacatctcctgcatcatttgaagaaaacaagattgtattggaggaacaaagttccagagaagaaataagtttaatggagaaagtaaaggagaatgctacaccaaccaggaatacaatttctaaagtgaccagtaatttgagaataagaagtaggcttgctaagcctaaaccaaatcttgagaagactttagggaccaacaggcttgatgattatcaggaagtttccagtttgtgtgtaaccaaaggggcagaaatggaaactcaaagagaaacagagaaaaatgcttccaaagcaacagaattggaaaataaaaacctcggaccagttacaacagcagagaataaggatcagagcaaattggcatgtgtacatggtatcaaagggaccagtatttcttcagaagtaaacctaactgaaagaaacgaaaatcaagaagagagctctcaggaggttcacatgttgtcagttgctccagttgcttcctctgagacagggccctgcacacttggtttggataggggtcttggtgaaaattctgttgaagagccccagataaaggactctaaaggagacagtgtgcttacacttcctgtgccagagtatacaccaacaagtattccagaagtccaacaagagaatataatcaatcctcaagacctaacagtatttgtttaccagcaacttcagttggtcaagatgccatgggtttatctatttctggaagagataattctaaaaagccgcctgataatttggatcttgtatctaggaagagatttcaatgcaggcttgataaaaatgaccacattcctcctgccaaaaaacgttcactcactttaagagatgactgtcaagaatataccactgaggtgcactcaaaggaattaacaaatgtttttgaggaaacaggggagtctcacaagggacaagatatttttcttacctcaggaagcacactgacaactccagaacctcaaagacagcaagttgaagcagcttttcagagtagaggatctagatctcctgatgcatgcatggacaagaatgtgcctcagttacctcaggatgaaatgattgtgtctgataaggaagaaagaactgatgctgctcctaagtctcagcaaatggatagcagaacatcgtcttctaaagcctcactatccagacctggcagaagacccctgggatttttatctttaatatgctcaaagaatagtttggagtctgatgaacctatgcaagtccatagtaagaaacgcctaaaacctcttatacctggattaagaaagaaattgaaaagatctaatccattcaatgaaagccaggaaaaaaatcgagagtcctctgatctgcttccatctccaagtgttattactactcaatctgagaatattagcagctcagcaactcaggtttcttgtgatcagcccttactgaaagaaggatataaaagtgcccaaaagcgggcccctcaaggggaggcaaccacagtctctgaatatttcttcaatgatatcttcattgaagtggatgaaacagaataaaacaatcttttctctttttcttttttaaattaggtctaggatttccagagtcaattacatcaacaaaacagtatttagagcaaaatatcactgtcttatttttctttaggttgattttgaatacttaatgagcttgatttgaagcttttataatcagtggaaaacatttctgaggttcctttcattctgactgattcagcattttgcaaatagcaagcaattaagactgctttctcagacagaaataacaactcttgtttacattttgactcttcctgtgctaagcacacatggacatttgggaatgttgtggatatatgtctctgtatgaattgcagtgcagacagatttgggggttaattgtatcatatttaacatttagcaacttcttttgtgaagattttttatttttagggggagatgatgaaggatgaaggctttttcatttgcttctaagtacagtcatgtatcacataatgaagtttaagtcaatgatggaccacatatattacagtggtcccatgcaattaaaatggagataaattcctatcaactagtgacattatagccatcataacacagtgcattgcttttttatgtttagatatgtttagatacacaaatacttactattgtgttacaactgcctacagtattcagcatagtaacacattgtagaggtttgtagccgaggagcaataggctataccacatagcctcagtctgtacggtgtgtagcagcctgtaccatctcagtgtttgtaagtacactctgcgttgtttcacacaagatcacctaacaaggcaattcttagaacatgtagttaagggacacgtgactatatgtgaaaacaaattgtcaaacttcactttagtatggcaaatgttaaagaacttttctattatcagctgtttgtctgactgaaaaatacatatttttctaattcatggtgatgtaacattagtcctaattgaaaaactagtatttaaacataattatttataaagatgacacatcaaagggcttatttatttttaaattttttatttaaaaggatattcagttttagctatttttacccctcagattgtagataaagaaggcattaaatttatgtttgtctcctttttctgtttaattttaaagatatttaaaatgatataactaaaaatgtttagctggtgtatatgttttgaatacctttttcccctcagtttagtatattgactttgtactgtaaatttttctgcttttcttggataatctcaggattttcatgaggatagggggaactcaactttatttatgagacaaaatttccatacaaagctcaatctcctttatacacccacagacataatattagtttttaaaaagccaatttcttcatagttttttcccattaaattctcaaggaacacttggatctttaagcacggaacataatcatgatgttaaaaacagagaaaataaggctttataaagttaatgattatcatcagtatgaatttaaggtttgttttaatttcaagatttgattttttatacgtgtaattctattatctacccaagcagatctgtagtggttccaattagacttctcaaacagcaaatttatcctgattttatttgaaaagcctcttggattgatagtatagtagctcaggcattggaaactttctgcaaactgttttgggtttgcaggccagatggtctctgtggcagctactcagctctgcaatttcagtgtgaaagaagccatagacagtacttgaatgaaggactgtggctggattggccttttagtttgaccccctacattaggccccaaattttcttaccctgaggtgctgatatctgtatggatgagttatttgtcactaaagttatgagttgtgcctaaaagttaaaactgttgactgtattatgtaatgatcagtatttcagttgggaagatattttagagtctagataattatgtttgtatattgaaaaaatggtggccagtttttaagttccttaatagaagagaattatgtctcagcacatataacagtaatgctaatttattgaaactactgctgttagagcacttcttattcattgtcttttagtgaaatttatggcgtaacactttgtcagagaggaggctatataattcggagcggaaattgtctataagtaggcatttatttcatgattgatatgtcacagaaatcatggtagtaaatcacattgctatttgaataccctgtttttgtaagtttttaaaactcatattctgaaaagatttcattctcttagtgttagcttgggagttagattgccatgattaaactattatttatccttgtgtaatattagtttttaactttaacatctgtttctttttaatctataatgagctagttttatggaaaatggaatttcttactatataaagaatacagagactcattgtattagagaatcaagtcagccagctaaagtatcctactgttaaatccttaaacctaattttggaaaagagaaagttaatcaatgtatttaccttacatgttggaaagaactatgttaggtctgattcatgtgaagaagatgttgcaaaggatttatttcacaaattttaaaggagatatgagtaaaagtttttatcttttcttgactttttctcctgaacacttatgtcttagcaagtggtcaacatgaggatttgaacgcctaattgttggtaaatggttgaggcatgacaaaaatattaatatccactgtttaccatcatgttatttgaaacaaaagtgaccatgtatactatcttgcttgaagaagtctttgacagaaaaagcaatatcatgtcatttataaattttcttgttctaaagaaagcagttatatatatatataaattatgtaaataaaagttattttatatcatt

SEQ ID NO: 3108 - DNA, 4427 bp, Homo sapiens
  source 1..4427: mol_type = unassigned DNA
agttgcggcgtcctgtgagcgcggggatgctgggaggagggtgaaatttagccatcggtgtgtggcagggtcatgaaaaagcggcggcggcgggagagaggaggaggcggcggcggggcagtgaaactacggtagctgccccctgagctggtggtgtggctttgtggggagggcgtagttcctaatcccctttccgggcagccgccggggctcggggctgtgagcggccgtgaggctgcctccccgggccccctgcctccgccatgttccgcagggcacgccttagcgtgaagccgaatgtcaggcctggtgtaggcgccaggggctccacagcttccaatccccagcgtggacgggagtctcccaggccgccggatcctgccacggactctgcttccaagcccgcggagcccacagatgtgcccacagtcgatttcggtggagcggagccccaagaaaaggctcctaggagcagtactgaaaagactggtggtgacaatgatgttgaagaatccagtagatcttcctctactgtttcacagagaagaaagcgaatatcaagtacttctagcctggttaagtctagtgtcagtgttccttcagaatctcatcccttatctacaattaatcaagaggctccacagccaactgccacttcaacaaaagagaaacagccatgctcagacagataccgaatatacaaagcccagaaactgagggaaatgttaaaagaagaattgagaaaagagaagaaacaatggaaaaacaaatatgctataaatgaaagtcagaggccaccagatcgttcaaaaatgactatgagagacttcatatattatctaccagataataatccaatgacttcttcactggaacaagaaaagaaaactgaaaagccatcgactccagtccagacaagagagcaagaaggtaagagtactcctaatgctgaagataatgaaatggaagaagagacagatgatgggccattactggttcctcgagtaaaagtggcagaagatggttccattattttggatgaagaaagtttaactgtagaagttttaagaacaaaaggcccttgtgttgttgaagaaaatgaccccatatttgagcgcggttctacaactacatactccagctttaggaaaaactattactctaaaccatggtcaaataaagaaacagatatgttttttttagccatcagcatggtaggaactgacttttctatgatcggacaactttttcctcacagagcaaggatagaaattaagaataaatttaaacgggaagagaaaacaaatggatggagaatagacaaagcattccaggaaaagcgcccttttgacttcgatttttttgctcatttgcttcagaaagttcttgctgaagaagagaaaagaaaacaaaaatctgttaaaaatcacagtttaaaggagaagaaatccaccaaaccacggaaaaatgtaaaagtgaaaaaagttgcctgtgaaggagtgaataatgatccagatgagtctatgagttctagaatttcagacacggaaagatctcagaaggatgctcagacagttgaagaagagtctctgaccttatcaagggaggatgcagagcaggttgcattagaagtagacctaaatcaaaagaaaagaaggaggaagaagcaagatggagctaatgaactgggagtaaacaatcttttagaaaatgccactgttcaggcgggtccttctaaaggagaaaaacacaagaataaatgtcaggctataaggcctgagctaaaggaaggtgaatgcagtaaggagcagatgctttcctgcacacaaaacatagatggcattgtgggttttgcctccactgaaaaagttgagaaaagaactgaccccatcctttcattaagtaatcaacaagatgccacatcagtagcaactgagtcttcagaatcaagcacttcagatttgccttcattcgaagttggaattagagcattgtgtgaggtgaataatgctgagggtagttgtatagaagaaagaaatgttgacctaaaaaataattcactggaaattgatcaaacagaaaatgttaaaccaatgttgagaggtcgcttccaaagacctaaacccaatttgtcaagggctgggaagaaatcagttctttcacaaggcaaaacagagtcagagagcaagaattcacattcaaaaacttcagttgaaaagaaccacgtggaaaaagataaaatgaatacattggacattttgagaatggagactacagagagagagaatccagaagctgaaactgtatctgttttgggtgaaaaaaattgtctgcaggaagggagtcaactaaaggctttaagacctgtacaagtgaggggccgattgcaaaagccaaagccaaatgcaggtaaagctgctgaaagaaaagaaattctcatatcacaggaagaaattggggccaatgtagagaagaatgaaaatgaatcctgtgctgatagagatactcctcaacacatggaagatcaatcgcgtaaagattttgaagaggaagatgtcatattacagcctgagaaaaatgattcttttcaaaatgtgcagccagatgagcccaaggttcttaatgaatgtctaagcgttcaagagaataataaggcaaataaacttaaccaagtcccaattctaaggactcgatttcagaaaccaaagccaaatataggaagaggaactggaaggagagaaatttcctcaaaggaagaggtactagagaagattcttgtctctggggaaatggcggcagcattgagagaaactgtaagactagacacctcaccaaaggagatggtaccagcagagattaatactaaagaaatgcagtcagatttaaaagaaactggaagaagagccatttctcccagggagaagattctagatgtgattgatgacaccatagaaatggagacaggtctgaaagcaatgggaagagagatttgtctaagggagaagacgccagaggtgattgatgccactgaggaaatagacaaagatttggaagaagctggaagaagagaaatatccccacagaaaaatggcccagaggaggttaagcctctaggtgaagtggagacagatttgaaagcaactggaaatgagagttccccaagggagaagacaccagaggtgactgatgccactgaggaaatagacaaaaatttggaagaaactggaagaagaaaaatatccccaagggaaaatggcccagaggaggtcaagcctgtagatgaaatggagacagatttgaacgcaactggaagagagagttctccaagggagaagacaccagaggtgattgatgctactgaggaaatagatttggaagaaactgaaagagaagtatccccacaggaaaatggactagaggaggtcaagcctctaggtgaaatggagacggatttgaaagcaactggaagagacagtttcccaagggggaagacaccagaggtgattgatgccattgaggaaatagagatagatttggaagaaactgaaagagaaatatccccacaggaaaatggcctagaggaggttaagcctctaggtgaaatgcaaacagatttgaaagcaaccggaagggagatttccccaagggagaagacaccagaggtgattgatgccactgaggaaatagacaaagatctggaagaaactggaagaagagaaatatccccagaggaaaatggcccagaggaggtcaagcctgtagatgaaatggagacagacttgaaaacaactggaagagagggttcctcaagggagaagacacgagaggtgattgatgctgctgaggtaatagagacagatttggaagaaactgaaagagaaatatcgccacaggaaaatggcccagaggaggtcaagcctgtaggtaaaatggagacagatttgaaagaaattagagaagaaatttcccaaagggaaaaggtgctagcagagttcagtgctataagggaaaaggagattgatttgaaagaaactggaaaaagagacattcccatcatggagaaagtatcaggaaagatggctgttgttgaagaaatggaggcagatttgaaagaaactggaaaagaaaattttagagagagaggatctgaagagatctgtgttactgaggaaaaggtggcagaattgaaacaaactggaaaaacagacatttctccaagggaaaacgagctagaggagaccagtacctcaagacaaactgacacacatttaatgcagagcggtagcaatgacttcagtgctgtgccttcactagatattcaggtatgtatttttctgtcctttaaaagttttttgaatttttcagaggaaataaataattccatgattattttgtccttaagtccaacaacacttaaaaatctctaa

SEQ ID NO: 3109 - DNA, 2861 bp, Homo sapiens
  source 1..2861: mol_type = unassigned DNA
aatttagccatcggtgtgtggcagggtcatgaaaaagcggcggcggcgggagagaggaggaggcggcggcggggcagtgaaactacggtagctgccccctgagctggtggtgtggctttgtggggagggcgtagttcctaatcccctttccgggcagccgccggggctcggggctgtgagcggccgtgaggctgcctccccgggccccctgcctccgccatgttccgcagggcacgccttagcgtgaagccgaatgtcaggcctggtgtaggcgccaggggctccacagcttccaatccccagcgtggacgggagtctcccaggccgccggatcctgccacggactctgcttccaagcccgcggagcccacagatgtgcccacagtcgatttcggtggagcggagccccaagaaaaggctcctaggagcagtactgaaaagactggtggtgacaatgatgttgaagaatccagtagatcttcctctactgtttcacagagaagaaagcgaatatcaagtacttctagcctggttaagtctagtgtcagtgttccttcagaatctcatcccttatctacaattaatcaagaggctccacagccaactgccacttcaacaaaagagaaacagccatgctcagacagataccgaatatacaaagcccagaaactgagggaaatgttaaaagaagaattgagaaaagagaagaaacaatggaaaaacaaatatgctataaatgaaagtcagaggccaccagatcgttcaaaaatgactatgagagacttcatatattatctaccagataataatccaatgacttcttcactggaacaagaaaagaaaactgaaaagccatcgactccagtccagacaagagagcaagaaggtaagagtactcctaatgctgaagataatgaaatggaagaagagacagatgatgggccattactggttcctcgagtaaaagtggcagaagatggttccattattttggatgaagaaagtttaactgtagaagttttaagaacaaaaggcccttgtgttgttgaagaaaatgaccccatatttgagcgcggttctacaactacatactccagctttaggaaaaactattactctaaaccatggtcaaataaagaaacagatatgttttttttagccatcagcatggtaggaactgacttttctatgatcggacaactttttcctcacagagcaaggatagaaattaagaataaatttaaacgggaagagaaaacaaatggatggagaatagacaaagcattccaggaaaagcgcccttttgacttcgatttttttgctcatttgcttcagaaagttcttgctgaagaagagaaaagaaaacaaaaatctgttaaaaatcacagtttaaaggagaagaaatccaccaaaccacggaaaaatgtaaaagtgaaaaaagttgcctgtgaaggagtgaataatgatccagatgagtctatgagttctagaatttcagacacggaaagatctcagaaggatgctcagacagttgaagaagagtctctgaccttatcaagggaggatgcagagcaggttgcattagaagtagacctaaatcaaaagaaaagaaggaggaagaagcaagatggagctaatgaactgggagtaaacaatcttttagaaaatgccactgttcaggcgggtccttctaaaggagaaaaacacaagaataaatgtcaggctataaggcctgagctaaaggaaggtgaatgcagtaaggagcagatgctttcctgcacacaaaacatagatggcattgtgggttttgcctccactgaaaaagttgagaaaagaactgaccccatcctttcattaagtaatcaacaagatgccacatcagtagcaactgagtcttcagaatcaagcacttcagatttgccttcattcgaagttggaattagagcattgtgtgaggtgaataatgctgagggtagttgtatagaagaaagaaatgttgacctaaaaaataattcactggaaattgatcaaacagaaaatgttaaaccaatgttgagaggtcgcttccaaagacctaaacccaatttgtcaagggctgggaagaaatcagttctttcacaaggcaaaacagagtcagagagcaagaattcacattcaaaaacttcagttgaaaagaaccacgtggaaaaagataaaatgaatacattggacattttgagaatggagactacagagagagagaatccagaagctgaaactgtatctgttttgggtgaaaaaaattgtctgcaggaagggagtcaactaaaggctttaagacctgtacaagtgaggggccgattgcaaaagccaaagccaaatgcaggtaaagctgctgaaagaaaagaaattctcatatcacaggaagaaattggggccaatgtagagaagaatgaaaatgaatcctgtgctgatagagatactcctcaacacatggaagatcaatcgcgtaaagattttgaagaggaagatgtcatattacagcctgagaaaaatgattcttttcaaaatgtgcagccagatgagcccaaggttcttaatgaatgtctaagcgttcaagagaataataaggcaaataaacttaaccaagtcccaattctaaggactcgatttcagaaaccaaagccaaatataggaagaggaactggaaggagagaaatttcctcaaaggaagaggtactagagaagattttgtctctggggaaatggcggcagcattgagagaaactgtaagactagacacctcaccaaaggagatggtaccagcagagattaatactaaagaaatgcagtcagatttaaaagaaactggaagaagagcc

SEQ ID NO: 3110 - DNA, 7919 bp, Homo sapiens
  source 1..7919: mol_type = unassigned DNA
agttgcggcgtcctgtgagcgcggggatgctgggaggagggtgaaatttagccatcggtgtgtggcagggtcatgaaaaagcggcggcggcgggagagaggaggaggcggcggcggggcagtgaaactacggtagctgccccctgagctggtggtgtggctttgtggggagggcgtagttcctaatcccctttccgggcagccgccggggctcggggctgtgagcggccgtgaggctgcctccccgggccccctgcctccgccatgttccgcagggcacgccttagcgtgaagccgaatgtcaggcctggtgtaggcgccaggggctccacagcttccaatccccagcgtggacgggagtctcccaggccgccggatcctgccacggactctgcttccaagcccgcggagcccacagatgtgcccacagtcgatttcggtggagcggagccccaagaaaaggctcctaggagcagtactgaaaagactggtggtgacaatgatgttgaagaatccagtagatcttcctctactgtttcacagagaagaaagcgaatatcaagtacttctagcctggttaagtctagtgtcagtgttccttcagaatctcatcccttatctacaattaatcaagaggctccacagccaactgccacttcaacaaaagagaaacagccatgctcagacagataccgaatatacaaagcccagaaactgagggaaatgttaaaagaagaattgagaaaagagaagaaacaatggaaaaacaaatatgctataaatgaaagtcagaggccaccagatcgttcaaaaatgactatgagagacttcatatattatctaccagataataatccaatgacttcttcactggaacaagaaaagaaaactgaaaagccatcgactccagtccagacaagagagcaagaaggtaagagtactcctaatgctgaagataatgaaatggaagaagagacagatgatgggccattactggttcctcgagtaaaagtggcagaagatggttccattattttggatgaagaaagtttaactgtagaagttttaagaacaaaaggcccttgtgttgttgaagaaaatgaccccatatttgagcgcggttctacaactacatactccagctttaggaaaaactattactctaaaccatggtcaaataaagaaacagatatgttttttttagccatcagcatggtaggaactgacttttctatgatcggacaactttttcctcacagagcaaggatagaaattaagaataaatttaaacgggaagagaaaacaaatggatggagaatagacaaagcattccaggaaaagcgcccttttgacttcgatttttttgctcatttgcttcagaaagttcttgctgaagaagagaaaagaaaacaaaaatctgttaaaaatcacagtttaaaggagaagaaatccaccaaaccacggaaaaatgtaaaagtgaaaaaagttgcctgtgaaggagtgaataatgatccagatgagtctatgagttctagaatttcagacacggaaagatctcagaaggatgctcagacagttgaagaagagtctctgaccttatcaagggaggatgcagagcaggttgcattagaagtagacctaaatcaaaagaaaagaaggaggaagaagcaagatggagctaatgaactgggagtaaacaatcttttagaaaatgccactgttcaggcgggtccttctaaaggagaaaaacacaagaataaatgtcaggctataaggcctgagctaaaggaaggtgaatgcagtaaggagcagatgctttcctgcacacaaaacatagatggcattgtgggttttgcctccactgaaaaagttgagaaaagaactgaccccatcctttcattaagtaatcaacaagatgccacatcagtagcaactgagtcttcagaatcaagcacttcagatttgccttcattcgaagttggaattagagcattgtgtgaggtgaataatgctgagggtagttgtatagaagaaagaaatgttgacctaaaaaataattcactggaaattgatcaaacagaaaatgttaaaccaatgttgagaggtcgcttccaaagacctaaacccaatttgtcaagggctgggaagaaatcagttctttcacaaggcaaaacagagtcagagagcaagaattcacattcaaaaacttcagttgaaaagaaccacgtggaaaaagataaaatgaatacattggacattttgagaatggagactacagagagagagaatccagaagctgaaactgtatctgttttgggtgaaaaaaattgtctgcaggaagggagtcaactaaaggctttaagacctgtacaagtgaggggccgattgcaaaagccaaagccaaatgcaggtaaagctgctgaaagaaaagaaattctcatatcacaggaagaaattggggccaatgtagagaagaatgaaaatgaatcctgtgctgatagagatactcctcaacacatggaagatcaatcgcgtaaagattttgaagaggaagatgtcatattacagcctgagaaaaatgattcttttcaaaatgtgcagccagatgagcccaaggttcttaatgaatgtctaagcgttcaagagaataataaggcaaataaacttaaccaagtcccaattctaaggactcgatttcagaaaccaaagccaaatataggaagaggaactggaaggagagaaatttcctcaaaggaagaggtactagagaagattcttgtctctggggaaatggcggcagcattgagagaaactgtaagactagacacctcaccaaaggagatggtaccagcagagattaatactaaagaaatgcagtcagatttaaaagaaactggaagaagagccatttctcccagggagaagattctagatgtgattgatgacaccatagaaatggagacaggtctgaaagcaatgggaagagagatttgtctaagggagaagacgccagaggtgattgatgccactgaggaaatagacaaagatttggaagaagctggaagaagagaaatatccccacagaaaaatggcccagaggaggttaagcctctaggtgaagtggagacagatttgaaagcaactggaaatgagagttccccaagggagaagacaccagaggtgactgatgccactgaggaaatagacaaaaatttggaagaaactggaagaagaaaaatatccccaagggaaaatggcccagaggaggtcaagcctgtagatgaaatggagacagatttgaacgcaactggaagagagagttctccaagggagaagacaccagaggtgattgatgctactgaggaaatagatttggaagaaactgaaagagaagtatccccacaggaaaatggactagaggaggtcaagcctctaggtgaaatggagacggatttgaaagcaactggaagagacagtttcccaagggggaagacaccagaggtgattgatgccattgaggaaatagagatagatttggaagaaactgaaagagaaatatccccacaggaaaatggcctagaggaggttaagcctctaggtgaaatgcaaacagatttgaaagcaaccggaagggagatttccccaagggagaagacaccagaggtgattgatgccactgaggaaatagacaaagatctggaagaaactggaagaagagaaatatccccagaggaaaatggcccagaggaggtcaagcctgtagatgaaatggagacagacttgaaaacaactggaagagagggttcctcaagggagaagacacgagaggtgattgatgctgctgaggtaatagagacagatttggaagaaactgaaagagaaatatcgccacaggaaaatggcccagaggaggtcaagcctgtaggtaaaatggagacagatttgaaagaaattagagaagaaatttcccaaagggaaaaggtgctagcagagttcagtgctataagggaaaaggagattgatttgaaagaaactggaaaaagagacattcccatcatggagaaagtatcaggaaagatggctgttgttgaagaaatggaggcagatttgaaagaaactggaaaagaaaattttagagagagaggatctgaagagatctgtgttactgaggaaaaggtggcagaattgaaacaaactggaaaaacagacatttctccaagggaaaacgagctagaggagaccagtacctcaagacaaactgacacacatttaatgcagagcggtagcaatgacttcagtgctgtgccttcactagatattcagaacattagcagtgaagtactgtcgatgatgcatacacctgtagaagaaaaaagaaattctgaaaaagaagtatcaagtcacttcagtcatttcaagatttcttcacagactcatgaatctgataaaacagaagtccaggggattcaatctccagatgttccagagcagttttcagatattaatttaagcaaatctcttcctcaagaacagaagccacttgaaattaaaccagcaccttttgtgaggagccgattcaaaagaccaaaaccaaacttagcaagagcagctttgaagagagagactacagaatcagaaaaatatatatatgagaagaaatcagaaaccaagaaaatggagactattgtgatgcaagaaaataatgaacaaactgatactctcccttctcaacatgatgaagcttccctaatgatatcaagagaaaaagacacattaggtcacaggaatgaggaggctgtgatattgccatgtacacagactgaaaggaacctttcaccttcaaattcttgtgaacctaaagaggagtctcagtcagcaccagtccagaaaaatgactcagttgtttctgtggggactaataatgtaaacactttccagcaagaaatgaaggaaagtgttatccaaactgctcgacaagtaaggggccgacttcagagaccgagaccaaatataagaaagacaggacagaggcaaatagtagacaaaggtgaagccaaaggcataattaaggaaggaagaacgatattaccaaaagatgaaactgaaaagaaagtcttaactgtgtcaaattctcaaattgaaactgaaattgaagttccatcgtccgcagttccagaacacagaatgtatgaaaatcaaagtcaggtggttcttgtagaaaaccttcatgttaacaaaacaaatgaaacaatcagacatgaaaataaaccgtatgttcctagttcagcacaaatgacaagaaggaaattccaaaaggctaagccaaatttgggaagagcacacagtaagaaagaggaaccagttttagaaaaagtcacaacagatcagagcaaggaaggcaagccagaagatcatttgctgcagaaaggagcttccaacacccagctccttctaaaagaaaaagctgagcttctgacatctctggaggtttcagcaagaaaagattgtgtaggttccaaagagtctgctttggcaaaaatagatgcggaattagaagaagttggaccatcaagaagggttggagaggaaactgtaggagataattcaccatcttcagttgttgaagagcaatatctcaataaactaacaagctgtccacaaccgttaaacgaaacaagttactctaaaattgccctggatgggaaaacaactatctcttctacatctgagtatgagagaaatcgtggtgaaaggagaagtcataaaaagttcaaaccaaatgtcaccagaggtcgtggatcaaaacgagttcggggtaagacctctaagaaggaacctagagcttccaaggccatgctggtgactcttcgggcttcccaggaagaagatgatgatgctgacgattttgagtctgactatgaggaagaaagctatcatcttgctcccgaagaagtaaacaaagctccagtatttgtacctgttggtctcagatctcctgaacctgtttctgctcagattgaggaaacaatggaagagcttgaaataactgtgaatgtcccagatgtaggatgcatagctgttgttgaacatgagctaccaaacacagatgtgactactgaagaaatgaaacaagaagaaaatttgagtgtaccgtttgaaatgaccacaagtgaacatatccaagatgaaccaggagtatgtataattcctcatgttcattcaaaggataaaagccatattccttctagcctagataatgtaaatcacaaaattgttcatgaatgtcaggaactttcttcacctgtcattactacatctcctgcatcatttgaagaaaacaagattgtattggaggaacaaagttccagagaagaaataagtttaatggagaaagtaaaggagaatgctacaccaaccaggaatacaatttctaaagtgaccagtaatttgagaataagaagtaggcttgctaagcctaaaccaaatcttgagaagactttagggaccaacaggcttgatgattatcaggaagtttccagtttgtgtgtaaccaaaggggcagaaatggaaactcaaagagaaacagagaaaaatgcttccaaagcaacagaattggaaaataaaaacctcggaccagttacaacagcagagaataaggatcagagcaaattggcatgtgtacatggtatcaaagggaccagtatttcttcagaagtaaacctaactgaaagaaacgaaaatcaagaagagagctctcaggaggttcacatgttgtcagttgctccagttgcttcctctgagacagggccctgcacacttggtttggataggggtcttggtgaaaattctgttgaagagccccagataaaggactctaaaggagacagtgtgcttacacttcctgtgccagagtatacaccaacaagtattccagaagtccaacaagagaatataatcaatcctcaagacctaacagtgaatctagttgctaatgtacctcaagatggagaagatgaacaagcctttattttaactctggtggaaatcccagccaatgcagtagaagaatttactgatgccactgcacagttcatgccaaaccctttactgccagctcccatattggtcaaatcagtgaataccgaagaaaggggtgacatgagtatttgtttaccagcaacttcagttggtcaagatgccatgggtttatctatttctggaagagataattctaaaaagccgcctgataatttggatcttgtatctaggaagagatttcaatgcaggcttgataaaaatgaccacattcctcctgccaaaaaacgttcactcactttaagagatgactgtcaagaatataccactgaggtgcactcaaaggaattaacaaatgtttttgaggaaacaggggagtctcacaagggacaagatatttttcttacctcaggaagcacactgacaactccagaacctcaaagacagcaagttgaagcagcttttcagagtagaggatctagatctcctgatgcatgcatggacaagaatgtgcctcagttacctcaggatgaaatgattgtgtctgataaggaagaaagaactgatgctgctcctaagtctcagcaaatggatagcagaacatcgtcttctaaagcctcactatccagacctggcagaagacccctgggatttttatctttaatatgctcaaagaatagtttggagtctgatgaacctatgcaagtccatagtaagaaacgcctaaaacctcttatacctggattaagaaagaaattgaaaagatctaatccattcaatgaaagccaggaaaaaaatcgagagtcctctgatctgcttccatctccaagtgttattactactcaatctgagaatattagcagctcagcaactcagtctcctttt

SEQ ID NO: 3111 - DNA, 5562 bp, Homo sapiens
  source 1..5562: mol_type = unassigned DNA
tgacaagaaggaaattccaaaaggctaagccaaatttgggaagagcacacagcaagaaaagattgtgtaggttccaaagagtctgctttggcaaaaatagatgcggaattagaagaagttggaccatcaagaagggttggagaggaaactgtaggagataattcaccatcttcagttgttgaagagcaatatctcaataaactaacaagctgtccacaaccgttaaacgaaacaagttactctaaaattgccctggatgggaaaacaactatctcttctacatctgagtatgagagaaatcgtggtgaaaggagaagtcataaaaagttcaaaccaaatgtcaccagaggtcgtggatcaaaacgagttcggggtaagacctctaagaaggaacctagagcttccaaggccatgctggtgactcttcgggcttcccaggaagaagatgatgatgctgacgattttgagtctgactatgaggaagaaagctatcatcttgctcccgaagaagtaaacaaagctccagtatttgtacctgttggtctcagatctcctgaacctgtttctgctcagattgaggaaacaatggaagagcttgaaataactgtgaatgtcccagatgtaggatgcatagctgttgttgaacatgagctaccaaacacagatgtgactactgaagaaatgaaacaagaagaaaatttgagtgtaccgtttgaaatgaccacaagtgaacatatccaagatgaaccaggtaccaatgatggaagcaccgaagctgcaataactttacttacaatgggagatctagtattgcagtcagagatcagtagtgaacagggtgatggagtatgtataattcctcatgttcattcaaaggataaaagccatattccttctagcctagataatgtaaatcacaaaattgttcatgaatgtcaggaactttcttcacctgtcattactacatctcctgcatcatttgaagaaaacaagattgtattggaggaacaaagttccagagaagaaataagtttaatggagaaagtaaaggagaatgctacaccaaccaggaatacaatttctaaagtgaccagtaatttgagaataagaagtaggcttgctaagcctaaaccaaatcttgagaagactttagggaccaacaggcttgatgattatcaggaagtttccagtttgtgtgtaaccaaaggggcagaaatggaaactcaaagagaaacagagaaaaatgcttccaaagcaacagaattggaaaataaaaacctcggaccagttacaacagcagagaataaggatcagagcaaattggcatgtgtacatggtatcaaagggaccagtatttcttcagaagtaaacctaactgaaagaaacgaaaatcaagaagagagctctcaggaggttcacatgttgtcagttgctccagttgcttcctctgagacagggccctgcacacttggtttggataggggtcttggtgaaaattctgttgaagagccccagataaaggactctaaaggagacagtgtgcttacacttcctgtgccagagtatacaccaacaagtattccagaagtccaacaagagaatataatcaatcctcaagacctaacagtatttgtttaccagcaacttcagttggtcaagatgccatgggtttatctatttctggaagagataattctaaaaagccgcctgataatttggatcttgtatctaggaagagatttcaatgcaggcttgataaaaatgaccacattcctcctgccaaaaaacgttcactcactttaagagatgactgtcaagaatataccactgaggtgcactcaaaggaattaacaaatgtttttgaggaaacaggggagtctcacaagggacaagatatttttcttacctcaggaagcacactgacaactccagaacctcaaagacagcaagttgaagcagcttttcagagtagaggatctagatctcctgatgcatgcatggacaagaatgtgcctcagttacctcaggatgaaatgattgtgtctgataaggaagaaagaactgatgctgctcctaagtctcagcaaatggatagcagaacatcgtcttctaaagcctcactatccagacctggcagaagacccctgggatttttatctttaatatgctcaaagaatagtttggagtctgatgaacctatgcaagtccatagtaagaaacgcctaaaacctcttatacctggattaagaaagaaattgaaaagatctaatccattcaatgaaagccaggaaaaaaatcgagagtcctctgatctgcttccatctccaagtgttattactactcaatctgagaatattagcagctcagcaactcagagacccttctgacttgtggaagcaaaaggaagcagtgctgacacccacaagaatttaaggaactgtaaaactagaatttgttcacatgtttcatttctatgtctcctgaagctgtccaatggtttcttgtgatcagcccttactgaaagaaggatataaaagtgcccaaaagcgggcccctcaaggggaggcaaccacagtctctgaatatttcttcaatgatatcttcattgaagtggatgaaacagaataaaacaatcttttctctttttcttttttaaattaggtctaggatttccagagtcaattacatcaacaaaacagtatttagagcaaaatatcactgtcttatttttctttaggttgattttgaatacttaatgagcttgatttgaagcttttataatcagtggaaaacatttctgaggttcctttcattctgactgattcagcattttgcaaatagcaagcaattaagactgctttctcagacagaaataacaactcttgtttacattttgactcttcctgtgctaagcacacatggacatttgggaatgttgtggatatatgtctctgtatgaattgcagtgcagacagatttgggggttaattgtatcatatttaacatttagcaacttcttttgtgaagattttttatttttagggggagatgatgaaggatgaaggctttttcatttgcttctaagtacagtcatgtatcacataatgaagtttaagtcaatgatggaccacatatattacagtggtcccatgcaattaaaatggagataaattcctatcaactagtgacattatagccatcataacacagtgcattgcttttttatgtttagatatgtttagatacacaaatacttactattgtgttacaactgcctacagtattcagcatagtaacacattgtagaggtttgtagccgaggagcaataggctataccacatagcctcagtctgtacggtgtgtagcagcctgtaccatctcagtgtttgtaagtacactctgcgttgtttcacacaagatcacctaacaaggcaattcttagaacatgtagttaagggacacgtgactatatgtgaaaacaaattgtcaaacttcactttagtatggcaaatgttaaagaacttttctattatcagctgtttgtctgactgaaaaatacatatttttctaattcatggtgatgtaacattagtcctaattgaaaaactagtatttaaacataattatttataaagatgacacatcaaagggcttatttatttttaaattttttatttaaaaggatattcagttttagctatttttacccctcagattgtagataaagaaggcattaaatttatgtttgtctcctttttctgtttaattttaaagatatttaaaatgatataactaaaaatgtttagctggtgtatatgttttgaatacctttttcccctcagtttagtatattgactttgtactgtaaatttttctgcttttcttggataatctcaggattttcatgaggatagggggaactcaactttatttatgagacaaaatttccatacaaagctcaatctcctttatacacccacagacataatattagtttttaaaaagccaatttcttcatagttttttcccattaaattctcaaggaacacttggatctttaagcacggaacataatcatgatgttaaaaacagagaaaataaggctttataaagttaatgattatcatcagtatgaatttaaggtttgttttaatttcaagatttgattttttatacgtgtaattctattatctacccaagcagatctgtagtggttccaattagacttctcaaacagcaaatttatcctgattttatttgaaaagcctcttggattgatagtatagtagctcaggcattggaaactttctgcaaactgttttgggtttgcaggccagatggtctctgtggcagctactcagctctgcaatttcagtgtgaaagaagccatagacagtacttgaatgaaggactgtggctggattggccttttagtttgaccccctacattaggccccaaattttcttaccctgaggtgctgatatctgtatggatgagttatttgtcactaaagttatgagttgtgcctaaaagttaaaactgttgactgtattatgtaatgatcagtatttcagttgggaagatattttagagtctagataattatgtttgtatattgaaaaaatggtggccagtttttaagttccttaatagaagagaattatgtctcagcacatataacagtaatgctaatttattgaaactactgctgttagagcacttcttattcattgtcttttagtgaaatttatggcgtaacactttgtcagagaggaggctatataattcggagcggaaattgtctataagtaggcatttatttcatgattgatatgtcacagaaatcatggtagtaaatcacattgctatttgaataccctgtttttgtaagtttttaaaactcatattctgaaaagatttcattctcttagtgttagcttgggagttagattgccatgattaaactattatttatccttgtgtaatattagtttttaactttaacatctgtttctttttaatctataatgagctagttttatggaaaatggaatttcttactatataaagaatacagagactcattgtattagagaatcaagtcagccagctaaagtatcctactgttaaatccttaaacctaattttggaaaagagaaagttaatcaatgtatttaccttacatgttggaaagaactatgttaggtctgattcatgtgaagaagatgttgcaaaggatttatttcacaaattttaaaggagatatgagtaaaagtttttatcttttcttgactttttctcctgaacacttatgtcttagcaagtggtcaacatgaggatttgaacgcctaattgttggtaaatggttgaggcatgacaaaaatattaatatccactgtttaccatcatgttatttgaaacaaaagtgaccatgtatactatcttgcttgaagaagtctttgacagaaaaagcaatatcatgtcatttataaattttcttgttctaaagaaagcagttatatatatatataaattatgtaaataaaagttattttatatc

SEQ ID NO: 3112 - DNA, 2606 bp, Homo sapiens
  source 1..2606: mol_type = unassigned DNA
ctgccctggtgcacacagatggcacatggcagagcccaagccctctccatgagatctgcagcgtttgtccacacggcagggcaaattaccttgtagagtcagcatggaggtttgctaactctgccggacttggtgcagaaaaaataccagccgtgctgttaaaccaaaaccccaggagaaaactttctggtgacagaagggcattgtgacccacgttgcccagggccagggacagggcagctgctcatggtccttcctcacgagttttcctggagcagagggatacccccaaacccagggagcccacaggagcttcagaagggctcggctggagggcggggcccctgttgcacttgctcactggggactggggaggctctgatcgcagaccgggggtgctgccacctctgtctgctgccggcagaaagccacaagccatgaaaactgattgagatgagaagaattcatctgggactggcttttgctttaggatggtgttggaagttgctcgttgtcgctaggagcctgctccactgtaagggtgtcaggatctgaagagctatggtgaaacaccactgaagcattgccaaggatggggctggtaagtagcaaaaagccggacaaggaaaagccgatcaaagagaaggacaagggccaatggagccccctgaaggtcagcgcccaagacaaggacgccccgccactgccgcccctggttgtcttcaaccaccttactcctccaccgcccgatgaacacctggatgaagacaagcatttcgtggtggctctgtatgactacaccgctatgaatgatcgggacctgcagatgctgaagggggagaagctacaggtcctgaagggaactggagactggtggctggccaggtcactcgtcacaggaagagaaggctatgtgcccagtaactttgtggcccgagtggagagcctggaaatggaaaggtggttctttagatcacagggtcggaaggaggctgagaggcagcttcttgctccaatcaacaaggccggctcctttcttatcagagagagtgaaaccaacaaaggtgccttctccctgtctgtgaaggatgtcaccacccagggggagctgatcaagcactataagatccgctgcctggatgaagggggctactacatctccccccggatcaccttcccctcgctccaggccctggtgcagcactattctaagaagggggatggtctatgccagaggctgaccctgccctgtgtgcgcccggccccgcagaatccctgggcccaggatgaatgggagatcccccggcagtctctcaggctggtcaggaaactcgggtctggacaattcggcgaagtctggatgggttactacaaaaacaacatgaaggtggccattaagacgctgaaggagggaaccatgtctccagaagcctttctgggtgaggccaacgtgatgaaggctctgcagcacgagcggctggtccgactctacgcagtggtcaccaaggagcccatctacattgtcaccgagtacatggccagaggatgcctgctggatttcctgaagacagatgaagggagcagattgtcactcccaaggctgattgacatgtcggcgcagattgctgaagggatggcatacattgagcgcatgaattccatccaccgcgacctgcgggcggccaacatcctggtgtctgaggccttgtgctgcaaaattgctgattttggcttggctcgaatcatcgacagtgaatacacggcccaagagggggccaagttccccatcaagtggacagccccggaagccatccacttcggggtcttcaccatcaaagcagacgtgtggtcgtttggagtcctcctgatggaagttgtcacttatgggcgggtgccatacccagggatgagcaaccccgaggtcatccgcaacctggagcgcggctaccgcatgccgcgccccgacacctgcccgcccgagctgtaccgcggcgtcatcgccgagtgctggcgcagccggcccgaggagcggcccaccttcgagttcctgcagtcggtgctggaggacttctacacggccaccgagcggcagtacgagctgcagccctagccggccgcgcccgcctgcgccccgtgcccacctctgcgcggacgaccccgacttccgtgccatcccagacgggccgcgaaggcggggtgtcgcctgtgcccttttctcagacccggaatccagtgggcagaggcagcttcgcagggggtccccggacggactccttcaccgactgcacccccgggcgagttacgcggcctctctgtgccgcttcatttgtagagggctgtaacagtgacctcgcacggtcatccggagtactaagccccagtaaggtgttcaggactggtaagcgactgtcatcaagtaaggcccccgtgctgggcaccccccgtgctggccgcgtccccgcctctgcgccctgcgtggaccccgccctgccccgctacagaagccagactgggtcccgcggacgccagcaggggcagccccagcctaggctgcgctccagcactgcggggcttttctgcaataaagtcacgagcgttcgagctgt

SEQ ID NO: 3113 - DNA, 2351 bp, Homo sapiens
  source 1..2351: mol_type = unassigned DNA
cacacagatggcacatggcagagcccaagccctctccatgagatctgcagcgtttgtccacacggcagggcaaattaccttgtagagtcagcatggaggtttgctaactctgccggacttggtgcagaaaaaataccagccgtgctgttaaaccaaaaccccaggagaaaactttctggtgacagaagggcattgtgacccacgttgcccagggccagggacagggcagctgctcatggtccttcctcacgagttttcctggagcagagggatacccccaaacccagggagcccacaggagcttcagaagggctcggctggagggcggggcccctgttgcacttgctcactggggactggggaggctctgatcgcagaccgggggtgctgccacctctgtctgctgccggcagaaagccacaagccatgaaaactgattgagatgagaagaattcatctgggactggcttttgctttaggatggtgttggaagttgctcgttgtcgctaggagcctgctccactgtaagggtgtcaggatctgaagagctatggtgaaacaccactgaagcattgccaaggatggggctggtaagtagcaaaaagccggacaaggaaaagccgatcaaagagaaggacaagggccaatggagccccctgaaggtcagcgcccaagacaaggacgccccgccactgccgcccctggttgtcttcaaccaccttactcctccaccgcccgatgaacacctggatgaagacaagcatttcgtggtggctctgtatgactacaccgctatgaatgatcgggacctgcagatgctgaagggggagaagctacaggtcctgaagggaactggagactggtggctggccaggtcactcgtcacaggaagagaaggctatgtgcccagtaactttgtggcccgagtggagagcctggaaatggaaaggtggttctttagatcacagggtcggaaggaggctgagaggcagcttcttgctccaatcaacaaggccggctcctttcttatcagagagagtgaaaccaacaaaggtgccttctccctgtctgtgaaggatgtcaccacccagggggagctgatcaagcactataagatccgctgcctggatgaagggggctactacatctccccccggatcaccttcccctcgctccaggccctggtgcagcactattctaagaagggggatggtctatgccagaggctgaccctgccctgtgtgcgcccggccccgcagaatccctgggcccaggatgaatgggagatcccccggcagtctctcaggctggtcaggaaactcgggtctggacaattcggcgaagtctggatgggttactacaaaaacaacatgaaggtggccattaagacgctgaaggagggaaccatgtctccagaagcctttctgggtgaggccaacgtgatgaaggctctgcagcacgagcggctggtccgactctacgcagtggtcaccaaggagcccatctacattgtcaccgagtacatggccagaggatgcctgctggatttcctgaagacagatgaagggagcagattgtcactcccaaggctgattgacatgtcggcgcagattgctgaagggatggcatacattgagcgcatgaattccatccaccgcgacctgcgggcggccaacatcctggtgtctgaggccttgtgctgcaaaattgctgattttggcttggctcgaatcatcgacagtgaatacacggcccaagagggggccaagttccccatcaagtggacagccccggaagccatccacttcggggtcttcaccatcaaagcagacgtgtggtcgtttggagtcctcctgatggaagttgtcacttatgggcgggtgccatacccagggatgagcaaccccgaggtcatccgcaacctggagcgcggctaccgcatgccgcgccccgacacctgcccgcccgagctgtaccgcggcgtcatcgccgagtgctggcgcagccggcccgaggagcggcccaccttcgactgcacccccgggcgagttacgcggcctctctgtgccgcttcatttgtagagggctgtaacagtgacctcgcacggtcatccggagtactaagccccagtaaggtgttcaggactggtaagcgactgtcatcaagtaaggcccccgtgctgggcaccccccgtgctggccgcgtccccgcctctgcgccctgcgtggaccccgccctgccccgctacagaagccagactgggtcccgcggacgccagcaggggcagccccagcctaggctgcgctccagcactgcggggcttttctgcaataaagtcacgagcgttcga

SEQ ID NO: 3114 - DNA, 908 bp, Homo sapiens
  source 1..908: mol_type = unassigned DNA
cgcgcactcgcgtggccttcgcgaaggtgtcgctgccaagaaacgtgtcctgcgcgctacgccgtctgtttctagggcaacgccggcgtctcttagcaaccgcgcgcggcctaggtgggtccccccggcacccccagacctgccatggcgaccgcgagtcctagcgtctttctactcatggtcaacgggcaggtggagagcgcccagtttccagagtatgatgacctctactgcaagtactgctttgtgtacggccaggactgggcccccacagcgggtctggaggaggggatctcacagatcacatccaagagccaagatgtgcggcaagcactggtgtggaacttccccattgatgtcacctttaaaagcaccaacccctacggctggccacagatcgtgctcagcgtgtatggaccagatgtgttcgggaacgatgtggttcgaggctatggggccgtgcacgtgcccttctcacctggccggcacaaaaggaccatccccatgtttgtcccagaatctacgtctaaactgcagaagtttacaagctggttcatggggcggcggcccgagtacacagaccccaaggtggtggctcagggtgaaggccgggaagtgacccgtgtccgttctcagggctttgtcaccctcctcttcaacgtggtgaccaaggacatgaggaaactgggctatgacactgggccttctgatacacagggtgtgttggggcccagcccaccccagagcttcccccagtgaaggctccacaggctgcacagtctctgataatgaagggctgccttcccgaagtcagccgctgcccatcggcctgaggggcagcctggtggccagagctgggggcacacagaatagttttgtataataaagtctcattttcagagagccta

SEQ ID NO: 3115 - DNA, 755 bp, Homo sapiens
  source 1..755: mol_type = unassigned DNA
gtgtcctgcgcgctacgccgtctgtttctagggcaacgccggcgtctcttagcaaccgcgcgcggcctaggtgggtccccccggcacccccagacctgccatggcgaccgcgagtcctagcgtctttctactcatggtcaacgggcaggtggagagcgcccagtttccagagtatgatgacctctactgcaagtactgctttgtgtacggccaggactgggcccccacagcgggtctggaggaggggatctcacagatcacatccaagagccaagatgtgcggcaagcactggtgtggaacttccccattgatgtcacctttaaaagcaccaacccctacggctggccacagatcgtgctcagcgtgtatggaccagatgtgttcgggaacgatgtggttcgaggctatggggccgtgcacgtgcccttctcacctggccggcacaaaaggaccatccccatgtttgtcccagaatctacgtctaaactgcagaagtttacaagtttgtgcctggtcgcctcctcagatctgcaagctgctccacccactgaggacaaatagaaacaggtcccctgggagtgctgagtcacggggctcccttcagccctgttccagcagcagaaggccgggcgattttaccctgtgccctgtgaaaaatctttgtgtctgagggagcagaggaaaaactcttgtcagatgggaaaaatgctcatgacataatgtgacattaaaaggtgggaaacaagaggatata

SEQ ID NO: 3116 - DNA, 805 bp, Homo sapiens
  source 1..805: mol_type = unassigned DNA
acctgccatggcgaccgcgagtcctagcgtctttctactcatggtcaacgggcaggtggagagcgcccagtttccagagtatgatgacctctactgcaagtactgctttgtgtacggccaggactgggcccccacagcgggtctggaggaggggatctcacagatcacatccaagagccaagatgtgcggcaagcactggtgtggaacttccccattgatgtcacctttaaaagcaccaacccctacggctggccacagatcgtgctcagcgtgtatggaccagatgtgttcgggaacgatgtggttcgaggctatggggccgtgcacgtgcccttctcacctggccggcacaaaaggaccatccccatgtttgtcccagaatctacgtctaaactgcagaagtttacaagctggttcatggggcggcggcccgagtacacagaccccaaggtggtggctcagggtgaaggccgggaagcccagcctggctgatgctgcccttctgtccccagtgacccgtgtccgttctcagggctttgtcaccctcctcttcaacgtggtgaccaaggacatgaggaaactgggctatgacactgggccttctgatacacagggtgtgttggggcccagcccaccccagagcttcccccagtgaaggctccacaggctgcacagtctctgataatgaagggctgccttcccgaagtcagccgctgcccatcggcctgaggggcagcctggtggccagagctgggggcacacagaatagttttgtataataaagtctcattttcagagagccta

SEQ ID NO: 3117 - DNA, 733 bp, Homo sapiens
  source 1..733: mol_type = unassigned DNA
ctgcgcctgcgcatgccacacgcgcactcgcgtggccttcgcgaaggtgtcgctgccaagaaacgtgtcctgcgcgctacgccgtctgtttctagggcaacgccggcgtctcttagcaaccgcgcgcggcctaggtgggtccccccggcacccccagacctgccatggcgaccgcgagtcctagcgtctttctactcatggtcaacgggcaggtggagagcgcccagtttccagagtatgatgacctctactgcaagtactgctttgtgtacggccaggactgggcccccacagcgggtctggaggaggggatctcacagatcacatccaagagccaagatgtgcggcaagcactggtgtggaacttccccattgatgtcacctttaaaagcaccaacccctacggctggccacagatcgtgctcagcgtgtatggaccagatgtgttcgggaacgatgtggttcgaggctatggggccgtgcacgtgcccttctcacctggccggcacaaaaggaccatccccatgtttgtcccagaatctacgtctaaactgcagaagtttacaagctggttcatggggcggcggcccgagtacacagaccccaaggtggtggctcagggtgaaggccgggaagatgagaacgctgaggctgagattcccagatcaacctgggtctctctctgccccagcccagcctggctgatgctgcccttctgtccccagtgacccgt

SEQ ID NO: 3118 - DNA, 601 bp, Homo sapiens
  source 1..601: mol_type = unassigned DNA
ctactcatggtcaacgggcaggtggagagcgcccagtttccagagtatgatgacctctactgcaagtactgctttgtgtacggccaggactgggcccccacagcgggtctggaggaggggatctcacagatcacatccaagagccaagatgtgcggcaagcactggtgtggaacttccccattgatgtcacctttaaaagcaccaacccctacggctggccacagatcgtgctcagcgtgtatggaccagatgtgttcgggaacgatgtggttcgaggctatggggccgtgcacgtgcccttctcacctggccggcacaaaaggaccatccccatgtttgtcccagaatctacgtctaaactgcagaagtttacaagatctgcaagctgctccacccactgaggacaaatagaaacaggtcccctgggagtgctgagtcacggggctcccttcagccctgttccagcagcagaaggccgggcgattttaccctgtgccctgtgaaaaatctttgtgtctgagggagcagaggaaaaactcttgtcagatgggaaaaatgctcatgacataatgtgacattaaaaggtgggaaacaagagga

SEQ ID NO: 3119 - DNA, 899 bp, Homo sapiens
  source 1..899: mol_type = unassigned DNA
ccgcgcgcggcctaggtgggtccccccggcacccccagacctgccatggcgaccgcgagtcctagcgtctttctactcatggtcaacgggcaggtggagagcgcccagtttccagagtatgatgacctctactgcaagtactgctttgtgtacggccaggactgggcccccacagcgggtctggaggaggggatctcacagatcacatccaagagccaagatgtgcggcaagcactggtgtggaacttccccattgatgtcacctttaaaagcaccaacccctacggctggccacagatcgtgctcagcgtgtatggaccagatgtgttcgggaacgatgtggttcgaggctatggggccgtgcacgtgcccttctcacctggccggcacaaaaggaccatccccatgtttgtcccagaatctacgtctaaactgcagaagtttacaagctggttcatggggcggcggcccgagtacacagaccccaaggtggtggctcagggtgaaggccgggaagtgacccgtgtccgttctcagggctttgtcaccctcctcttcaacgtggtgaccaaggacatgaggaaactgggctatgacactgggccttctgatacacagggtgtgttggggcccagcccaccccagagcttcccccagtgaaggctccacaggctgcacagtctctgataatgaagggctgccttcccgaagtcagccgctgcccatcggcctgaggggcagcctggtggccagagctgggggcacacagaatagttttgtataataaagtctcattttcagagagcctactatcacagctccccggaaagctgtcttctctgtccatggcctcacctcacccagggcactggccttggtccacatcaaggggacctgaa

SEQ ID NO: 3120 - DNA, 928 bp, Homo sapiens
  source 1..928: mol_type = unassigned DNA
aacctcatccggccaatcacagctagtcccgtgagctcggggaactgcccggcctgagatgcccaggtctgggactgttaccttggctactggctcccgaagtccccttccgcccagggaattgtgtccgccatttgcttggtcccaggagctctgggaatgtgtcatccccggtagagggtgcccgtcacggccaaccacagagatcccggtcctccgggattctagagcgtccggccgaaccctccactgacttccggtggctgagcctctccgcagcttccggccaagttggactgcagctcgcggtttcctggcttctagtttccagagtatgatgacctctactgcaagtactgctttgtgtacggccaggactgggcccccacagcgggtctggaggaggggatctcacagatcacatccaagagccaagatgtgcggcaagcactggtgtggaacttccccattgatgtcacctttaaaagcaccaacccctacggctggccacagatcgtgctcagcgtgtatggaccagatgtgttcgggaacgatgtggttcgaggctatggggccgtgcacgtgcccttctcacctggccggcacaaaaggaccatccccatgtttgtcccagaatctacgtctaaactgcagaagtttacaagctggttcatggggcggcggcccgagtacacagaccccaaggtggtggctcagggtgaaggccgggaagccaccttcagggctgtctgtcaaagatagcagtgtttcaagatgaaagcggcttgagtccctgagtcactgacttctgtgagaaacttccgcgggaagccgctgagacctggagatgtgttactgcagcgtaaccaagagcatcccacacacccttctttctctcctgtcccctgcactgaacgggcaccccctg

SEQ ID NO: 3121 - DNA, 1031 bp, Homo sapiens
  source 1..1031: mol_type = unassigned DNA
aggggaggagcctgctgttgccccagcaacaaccacggaaaccaagacgagcgcggtcgcggaagtatcgcggcttacatatctcgcagccaggcgggtcctgggagaggcgcgagccaggcctggtcggcgcccgcggagaaaagaagcagtcaagcccatgaactacaaccccggttgccgctttctcctctcctaaccgttaagtgcgctaagggccatggctgaggtgcacgtgatcgggcagatcataggggccagcggtttctcggaaagtagcctcttctgcaagtggggcattcacacaggggcggcatggaagctcctgtcaggcgtgcgggagggccaaacgcaagtggacaccccgcagataggggacatggcttactggtcccaccccatcgacctgcacttcgccaccaaaggtcttcaaggctggccccggctccatttccaggtgtggtcccaggacagctttggccgctgccagcttgcaggctatggattttgccatgtgcccagtagcccgggcacccaccagctggcctgccccacgtggcggcccctgggcagttggcgagaacagttggcacgggctttcgtgggtggtgggccgcagctgctgcatggggacaccatctacagtggggccgaccgctatcgcctgcacacagctgctggtggcaccgtgcacctggagatcggcctgctgctccgcaacttcgaccgctacggcgtggagtgctgagggactctgcctccaacgtcaccaccatccacaccccggacacccagtgatgggggaggatggcacagtggtcaagagcacagactctagagactgtcagagctgaccccagctaaggcatggcaccgcttctgtcctttctaggacctcggggtccctctgggcccagtttccctatctgtaaattggggacagtaaatgtatggggtcgcagggtgttgagtgacaggaggctgcttagccacatgggaggtgctcagtaaaggagagcaattcttacagg

SEQ ID NO: 3122 - DNA, 1368 bp, Homo sapiens
  source 1..1368: mol_type = unassigned DNA
gaccccagaggccaccctggccacttccagaaagctgtgggccctgggatactcccctcccagggtgtctggtggcaggcctgtgcctatccctgctgtccccagggtgggccccgggggtcaggagctccagaagggccagctgggcatattctgagattggccatcagcccccatttctgctgcaaacctggtcagagccagtgttccctccatgggacctaaagacagtgccaagtgcctgcaccgtggaccacagccgagccactgggcagccggtgatggtcccacgcaggagcgctgtggaccccgctctctgggcagccctgtcctaggcctggacacctgcagagcctgggaccacgtggatgggcagatcctgggccagctgcggcccctgacagaggaggaagaggaggagggcgccggggccaccttgtccagggggcctgccttccccggcatgggctctgaggagttgcgtctggcctccttctatgactggccgctgactgctgaggtgccacccgagctgctggctgctgccggcttcttccacacaggccatcaggacaaggtgaggtgcttcttctgctatgggggcctgcagagctggaagcgcggggacgacccctggacggagcatgccaagtggttccccagctgtcagttcctgctccggtcaaaaggaagagactttgtccacagtgtgcaggagactcactcccagctgctgggctcctgggacccgtgggaagaaccggaagacgcagcccctgtggccccctccgtccctgcctctgggtaccctgagctgcccacacccaggagagaggtccagtctgaaagtgcccaggagccaggaggggtcagtccagccgaggcccagagggcgtggtgggttcttgagcccccaggagccagggatgtggaggcgcagctgcggcggctgcaggaggagaggacgtgcaaggtgtgcctggaccgcgccgtgtccatcgtctttgtgccgtgcggccacctggtctgtgctgagtgtgcccccggcctgcagctgtgccccatctgcagagcccccgtccgcagccgcgtgcgcaccttcctgtcctaggccaggtgccatggccggccaggtgggctgcagagtgggctccctgcccctctctgcctgttctggactgtgttctgggcctgctgaggatggcagagctggtgtccatccagcactgaccagccctgattccccgaccaccgcccagggtggagaaggaggcccttgcttggcgtgggggatggcttaactgtacctgtttggatgcttctgaatagaaataaagtgggttttccctggaggtacccagcagcctg

SEQ ID NO: 3123 - DNA, 1302 bp, Homo sapiens
  source 1..1302: mol_type = unassigned DNA
gaccccagaggccaccctggccacttccagaaagctgtgggccctgggatactcccctcccagggtgtctggtggcaggcctgtgcctatccctgctgtccccagggtgggccccgggggtcaggagctccagaagggccagctgggcatattctgagattggccatcagcccccatttctgctgcaaacctggtcagagccagtgttccctccatgggacctaaagacagtgccaagtgcctgcaccgtggaccacagccgagccactgggcagccggtgatggtcccacgcaggagcgctgtggaccccgctctctgggcagccctgtcctaggcctggacacctgcagagcctgggaccacgtggatgggcagatcctgggccagctgcggcccctgacagaggaggaagaggaggagggcgccggggccaccttgtccagggggcctgccttccccggcatgggctctgaggagttgcgtctggcctccttctatgactggccgctgactgctgaggtgccacccgagctgctggctgctgccggcttcttccacacaggccatcaggacaaggtgaggtgcttcttctgctatgggggcctgcagagctggaagcgcggggacgacccctggacggagcatgccaagtggttccccagctgtcagttcctgctccggtcaaaaggaagagactttgtccacagtgtgcaggagactcactcccagctgctgggctcctgggacccgtgggaagaaccggaagacgcagcccctgtggccccctccgtccctgcctctgggtaccctgagctgcccacacccaggagagaggtccagtctgaaagtgcccaggagccaggagccagggatgtggaggcgcagctgcggcggctgcaggaggagaggacgtgcaaggtgtgcctggaccgcgccgtgtccatcgtctttgtgccgtgcggccacctggtctgtgctgagtgtgcccccggcctgcagctgtgccccatctgcagagcccccgtccgcagccgcgtgcgcaccttcctgtcctaggccaggtgccatggccggccaggtgggctgcagagtgggctccctgcccctctctgcctgttctggactgtgttctgggcctgctgaggatggcagagctggtgtccatccagcactgaccagccctgattccccgaccaccgcccagggtggagaaggaggcccttgcttggcgtgggggatggcttaactgtacctgtttggatgcttctgaatagaaataaagtgggttttccctggaggta

SEQ ID NO: 3124 - DNA, 4531 bp, Homo sapiens
  source 1..4531: mol_type = unassigned DNA
ttcgactggaatgagaccccggggagcagcgtttgcagcgggcccgccaggtgacctgcacctgggcaccgccatcggcttcgcaggggccatctggaggagtcggtcacccgccatgtcgaccttgctggacattaagagcagcgtgctcaggcaggtgcaggtgtgcccgtccttccgccgcaggactgagcaggacccagggagtgccagcgccgacccgcaggagcctgccacgggggcctggaaacccggggatggcgtggagttctttgcccacatgcgcctcatgctgaagaagggggaaggcagacagggcttgccgtgcctcgaggtccccctgcgcagtggctcgccagcacccccggagcctgtggatcccagcctcggcctgagagccctggccccagaggaggtggagatgctctacgaggaggccctgtacacggtgctttaccgcgcgggtaccatgggccctgaccaggtggacgacgaggaggccctgctcagctatctccagcaggtgtttggcaccagccttgaggagcacactgaggccatcgagcgagtgaggaaggccaaggcccccacgtatgccctgaaagtctctgtcatgcgtgccaagaaccttctggccaaggaccccaacggcttcagcgacccatactgcatgctgggcatcctgcctgcctcggacgccacgcgggagccccgtgcacagaaggagcagcgcttcggcttccgcaagggcagcaagcgcggtggacccctgcctgccaagtgcatccaggtcaccgaggtgaagagcagcaccctgaaccccgtctggaaggagcacttcctcttcgagattgaggatgtgagcacggaccagctgcacctggacatctgggatcatgacgacgatgtatccctggtagaagcgtgcaggaagctgaatgaagtcatcggcctgaagggcatgggcaggtacttcaaacagatcgtcaagtcagcccgcgcaaacgggacagcaggacccaccgaggaccacaccgatgacttcctggggtgcctcaacatacctgtccgggaggtgcctgtggctggcgtcgaccgctggttcaagctggagccacgctccagtgcctcgcgtgtgcagggacactgccacctggttctcaagctgatcactacgcagagggatacggccatgagccagcgcgggcgatccggcttcctgtcccacctgctgctgctcagccatctgctgcggttggagcactcagcagaggagcccaactccagcagctggcgaggagagctcagcacaccagccgccaccatcctctgcctgcacggagcccagagcaacctgtcacccttgcagctggccgtgctgcactggcaggtcagcagccgccaccatcaaacctgcacgctggactacagctacctgctggggctgctggaggacatgcaggcacactgggaagaggctccttcactgccccaggagcaggaggagagcctggctgatagcctttccgccttctctgagttcgggctgcagctgctgcgccagctccgagactacttccctgccaccaacagcaccgctgtccaccgcctggagctgctgctgaagtgtctgggcaagctgcagctcttccaaccctcctttgagatctgccccttcgagtcggagctgaacatggacattgctgcggccctgaagagaggcaaccgtgagtggtacgacaggatcctgaatgacaagagtccccgagagcagccaggaccacagcgcctgcctgggctggttgtgctggctgacgccgtctatgatgaccttcagttctgctacagtgtgtacgccagcctcttccacagcatcctcaatgtggacgtcttcaccctgaccttccggcagctggagcgtctggtggctgaggaggcgtgggtgctgacggaggagctgagccccaagatgaccctggaggtggcctcggggctctttgagctctacctgaccctggctgacctccagcgcttctgggatagcatccctggccgggacagccgctctctggccctggctggcatccacgcccccttcctgcctgctgtgaagctctggttccaagtgctgagggaccaggccaagtggaggcttcagggagccgtggacatggacacgctggagcccgtggacgcctcctccaggcacagcagctccgcagccactgctggtctctgcctcagccacatccaggagttgtgggtgcgcctggcgtggcctgaccctgcccaggctcaggggctgggcacccagcttggccaggacgtgtgtgaggccaccctcttctatacggagctgcttcggaagaaggtggacactcagccaggggcggccggtgaagcagtgagcgaggcgctctgcgtggtcctcaacaatgtggagctcgtgcgcaaggctgctgggcaggccttgaagggcctggcatggccagagggggccacggggcccgagggggtgctcccccgccctctgctcagctgcacacaggccctggacgatgatctgcaacgggaggcccacacggtgacagcgcacctgacctctaagatggtgggcgacatccgcaagtatgtacagcacatcagtctctcgcctgactccatccagaacgatgaggccgtggccccgctcatgaagtacctggatgagaagctggccctgctgaacgcctcgctggtgaaggggaacctgagcagggtgctggaggccctgtgggagctactcctccaggccattctgcaggcgctgggtgcaaaccgtgacgtctctgctgatttctacagccgcttccatttcacgctggaggccctggtcagttttttccacgcagagggtcagggtttgcccctggagagcctgagggatggaagctacaagaggctgaaggaggagctgcggctgcacaaatgttccacccgcgagtgcatcgagcagttctacctggacaagctcaaacagaggaccctggagcagaaccggtttggacgcctgagcgtccgttgccattacgaggcggctgagcagcggctggccgtggaggtgctgcacgccgcggacctgctccccctggacgccaacggcttaagtgacccctttgtgatcgtggagctgggcccaccgcatctctttccactggtccgcagccagaggacccaggtgaagacccggacgctgcaccctgtatacgacgaactcttctacttttccgtgcctgccgaggcgtgccgccgccgcgcggcctgtgtgttgttcaccgtcatggaccacgactggctgtccaccaacgacttcgctggggaggcggccctcggcctaggtggcgtcactggtgtcgcccggccccaggtgggcgggggtgcaagggctgggcagcctgtcaccctgcacctgtgccggcccagagcccaggtgagatctgcgctgaggaggctggaaggccgcaccagcaaggaggcgcaggagttcgtgaagaaactcaaggagctggagaagtgcatggaggcggacccctgagtccatcagctgccagccccggccctggcccccaccccaagttccctgaagcatcctccagctcactgtggccagctttgtgcaaccagggcccacggcgcccctcctgtgctgtgacgtgtgtgtcgtggctggccccgcggcgcctaccgccctggccgtgtctgtctggtgtgtgctgtgaacccctgcacccaaccccacatctgggtggccaacttggcaggacttggccagcagctgcccaggacacagtgcaggccagagcgggcttgaccacctggtgggcctccctgcccgcttccttgggctccccggccctgggtgggcggtgggcagctggtctccagggactcagtgagtggctgtgctctctgcacaacgggcaatgtgcagacgcatttttggtaatcacagctggggagtgaaaagggtgccactggcaccactgggtggatggtccagagcctccacccacagaggggatgcaaagggcaggtgagtcaagaaccgcataggtctccagtccccacggggctcccaggccggggaaaggttcccctgaggtcactctgaggccagggacgtcacccaaggctggtggtcagtgtgaagggctccgtgccaactggtcagctgtccttcacgcacatatccgtggccacctgagacctgctccacgacccttccaggcagagccgagagttcgccccaacccttccccaggcccagtgtgaaaaacagactcacaaggggcttcttggcctgcagcttcatttgcgagagcgccgaggcaggacacagagcacagctgtgctggaagtgtggggagaacccggacagctcagtcctgccagcagccgcaaagagccgaggctgccaggcccatttatgtccctcatgtctctagattttctcgtcacccagcctcaaaaatatatgtgtctgcaaccctca

SEQ ID NO: 3125 - DNA, 4574 bp, Homo sapiens
  source 1..4574: mol_type = unassigned DNA
gcgcgcgcggctgggagcggtagctgtgcctcggcgtccccgagctggtgccgagcgcagcgccccaggagcccccccatccccgcgccggcccacggtcacccgccatgtcgaccttgctggacattaagagcagcgtgctcaggcaggtgcaggtgtgcccgtccttccgccgcaggactgagcaggacccagggagtgccagcgccgacccgcaggagcctgccacgggggcctggaaacccggggatggcgtggagttctttgcccacatgcgcctcatgctgaagaagggggaaggcagacagggcttgccgtgcctcgaggcctggggctctccctgccgtcagagccctcaccctgggccccacacacaggtccccctgcgcagtggctcgccagcacccccggagcctgtggatcccagcctcggcctgagagccctggccccagaggaggtggagatgctctacgaggaggccctgtacacggtgctttaccgcgcgggtaccatgggccctgaccaggtggacgacgaggaggccctgctcagctatctccagcaggtgtttggcaccagccttgaggagcacactgaggccatcgagcgagtgaggaaggccaaggcccccacgtatgccctgaaagtctctgtcatgcgtgccaagaaccttctggccaaggaccccaacggcttcagcgacccatactgcatgctgggcatcctgcctgcctcggacgccacgcgggagccccgtgcacagaaggagcagcgcttcggcttccgcaagggcagcaagcgcggtggacccctgcctgccaagtgcatccaggtcaccgaggtgaagagcagcaccctgaaccccgtctggaaggagcacttcctcttcgagattgaggatgtgagcacggaccagctgcacctggacatctgggatcatgacgacgatgtatccctggtagaagcgtgcaggaagctgaatgaagtcatcggcctgaagggcatgggcaggtacttcaaacagatcgtcaagtcagcccgcgcaaacgggacagcaggacccaccgaggaccacaccgatgacttcctggggtgcctcaacatacctgtccgggaggtgcctgtggctggcgtcgaccgctggttcaagctggagccacgctccagtgcctcgcgtgtgcagggacactgccacctggttctcaagctgatcactacgcagagggatacggccatgagccagcgcgggcgatccggcttcctgtcccacctgctgctgctcagccatctgctgcggttggagcactcagcagaggagcccaactccagcagctggcgaggagagctcagcacaccagccgccaccatcctctgcctgcacggagcccagagcaacctgtcacccttgcagctggccgtgctgcactggcaggtcagcagccgccaccatcaaacctgcacgctggactacagctacctgctggggctgctggaggacatgcaggcacactgggaagaggctccttcactgccccaggagcaggaggagagcctggctgatagcctttccgccttctctgagttcgggctgcagctgctgcgccagctccgagactacttccctgccaccaacagcaccgctgtccaccgcctggagctgctgctgaagtgtctgggcaagctgcagctcttccaaccctcctttgagatctgccccttcgagtcggagctgaacatggacattgctgcggccctgaagagaggcaaccgtgagtggtacgacaggatcctgaatgacaagagtccccgagagcagccaggaccacagcgcctgcctgggctggttgtgctggctgacgccgtctatgatgaccttcagttctgctacagtgtgtacgccagcctcttccacagcatcctcaatgtggacgtcttcaccctgaccttccggcagctggagcgtctggtggctgaggaggcgtgggtgctgacggaggagctgagccccaagatgaccctggaggtggcctcggggctctttgagctctacctgaccctggctgacctccagcgcttctgggatagcatccctggccgggacagccgctctctggccctggctggcatccacgcccccttcctgcctgctgtgaagctctggttccaagtgctgagggaccaggccaagtggaggcttcagggagccgtggacatggacacgctggagcccgtggacgcctcctccaggcacagcagctccgcagccactgctggtctctgcctcagccacatccaggagttgtgggtgcgcctggcgtggcctgaccctgcccaggctcaggggctgggcacccagcttggccaggacgtgtgtgaggccaccctcttctatacggagctgcttcggaagaaggtggacactcagccaggggcggccggtgaagcagtgagcgaggcgctctgcgtggtcctcaacaatgtggagctcgtgcgcaaggctgctgggcaggccttgaagggcctggcatggccagagggggccacggggcccgagggggtgctcccccgccctctgctcagctgcacacaggccctggacgatgatctgcaacgggaggcccacacggtgacagcgcacctgacctctaagatggtgggcgacatccgcaagtatgtacagcacatcagtctctcgcctgactccatccagaacgatgaggccgtggccccgctcatgaagtacctggatgagaagctggccctgctgaacgcctcgctggtgaaggggaacctgagcagggtgctggaggccctgtgggagctactcctccaggccattctgcaggcgctgggtgcaaaccgtgacgtctctgctgatttctacagccgcttccatttcacgctggaggccctggtcagttttttccacgcagagggtcagggtttgcccctggagagcctgagggatggaagctacaagaggctgaaggaggagctgcggctgcacaaatgttccacccgcgagtgcatcgagcagttctacctggacaagctcaaacagaggaccctggagcagaaccggtttggacgcctgagcgtccgttgccattacgaggcggctgagcagcggctggccgtggaggtgctgcacgccgcggacctgctccccctggacgccaacggcttaagtgacccctttgtgatcgtggagctgggcccaccgcatctctttccactggtccgcagccagaggacccaggtgaagacccggacgctgcaccctgtatacgacgaactcttctacttttccgtgcctgccgaggcgtgccgccgccgcgcggcctgtgtgttgttcaccgtcatggaccacgactggctgtccaccaacgacttcgctggggaggcggccctcggcctaggtggcgtcactggtgtcgcccggccccaggtgggcgggggtgcaagggctgggcagcctgtcaccctgcacctgtgccggcccagagcccaggtgagatctgcgctgaggaggctggaaggccgcaccagcaaggaggcgcaggagttcgtgaagaaactcaaggagctggagaagtgcatggaggcggacccctgagtccatcagctgccagccccggccctggcccccaccccaagttccctgaagcatcctccagctcactgtggccagctttgtgcaaccagggcccacggcgcccctcctgtgctgtgacgtgtgtgtcgtggctggccccgcggcgcctaccgccctggccgtgtctgtctggtgtgtgctgtgaacccctgcacccaaccccacatctgggtggccaacttggcaggacttggccagcagctgcccaggacacagtgcaggccagagcgggcttgaccacctggtgggcctccctgcccgcttccttgggctccccggccctgggtgggcggtgggcagctggtctccagggactcagtgagtggctgtgctctctgcacaacgggcaatgtgcagacgcatttttggtaatcacagctggggagtgaaaagggtgccactggcaccactgggtggatggtccagagcctccacccacagaggggatgcaaagggcaggtgagtcaagaaccgcataggtctccagtccccacggggctcccaggccggggaaaggttcccctgaggtcactctgaggccagggacgtcacccaaggctggtggtcagtgtgaagggctccgtgccaactggtcagctgtccttcacgcacatatccgtggccacctgagacctgctccacgacccttccaggcagagccgagagttcgccccaacccttccccaggcccagtgtgaaaaacagactcacaaggggcttcttggcctgcagcttcatttgcgagagcgccgaggcaggacacagagcacagctgtgctggaagtgtggggagaacccggacagctcagtcctgccagcagccgcaaagagccgaggctgccaggcccatttatgtccctcatgtctctagattttctcgtcacccagcctcaaaaatatatgtgtctgcaaccctca

SEQ ID NO: 3126 - DNA, 4581 bp, Homo sapiens
  source 1..4581: mol_type = unassigned DNA
ttcgactggaatgagaccccggggagcagcgtttgcagcgggcccgccaggtgacctgcacctgggcaccgccatcggcttcgcaggggccatctggaggagtcggtcacccgccatgtcgaccttgctggacattaagagcagcgtgctcaggcaggtgcaggtgtgcccgtccttccgccgcaggactgagcaggacccagggagtgccagcgccgacccgcaggagcctgccacgggggcctggaaacccggggatggcgtggagttctttgcccacatgcgcctcatgctgaagaagggggaaggcagacagggcttgccgtgcctcgaggcctggggctctccctgccgtcagagccctcaccctgggccccacacacaggtccccctgcgcagtggctcgccagcacccccggagcctgtggatcccagcctcggcctgagagccctggccccagaggaggtggagatgctctacgaggaggccctgtacacggtgctttaccgcgcgggtaccatgggccctgaccaggtggacgacgaggaggccctgctcagctatctccagcaggtgtttggcaccagccttgaggagcacactgaggccatcgagcgagtgaggaaggccaaggcccccacgtatgccctgaaagtctctgtcatgcgtgccaagaaccttctggccaaggaccccaacggcttcagcgacccatactgcatgctgggcatcctgcctgcctcggacgccacgcgggagccccgtgcacagaaggagcagcgcttcggcttccgcaagggcagcaagcgcggtggacccctgcctgccaagtgcatccaggtcaccgaggtgaagagcagcaccctgaaccccgtctggaaggagcacttcctcttcgagattgaggatgtgagcacggaccagctgcacctggacatctgggatcatgacgacgatgtatccctggtagaagcgtgcaggaagctgaatgaagtcatcggcctgaagggcatgggcaggtacttcaaacagatcgtcaagtcagcccgcgcaaacgggacagcaggacccaccgaggaccacaccgatgacttcctggggtgcctcaacatacctgtccgggaggtgcctgtggctggcgtcgaccgctggttcaagctggagccacgctccagtgcctcgcgtgtgcagggacactgccacctggttctcaagctgatcactacgcagagggatacggccatgagccagcgcgggcgatccggcttcctgtcccacctgctgctgctcagccatctgctgcggttggagcactcagcagaggagcccaactccagcagctggcgaggagagctcagcacaccagccgccaccatcctctgcctgcacggagcccagagcaacctgtcacccttgcagctggccgtgctgcactggcaggtcagcagccgccaccatcaaacctgcacgctggactacagctacctgctggggctgctggaggacatgcaggcacactgggaagaggctccttcactgccccaggagcaggaggagagcctggctgatagcctttccgccttctctgagttcgggctgcagctgctgcgccagctccgagactacttccctgccaccaacagcaccgctgtccaccgcctggagctgctgctgaagtgtctgggcaagctgcagctcttccaaccctcctttgagatctgccccttcgagtcggagctgaacatggacattgctgcggccctgaagagaggcaaccgtgagtggtacgacaggatcctgaatgacaagagtccccgagagcagccaggaccacagcgcctgcctgggctggttgtgctggctgacgccgtctatgatgaccttcagttctgctacagtgtgtacgccagcctcttccacagcatcctcaatgtggacgtcttcaccctgaccttccggcagctggagcgtctggtggctgaggaggcgtgggtgctgacggaggagctgagccccaagatgaccctggaggtggcctcggggctctttgagctctacctgaccctggctgacctccagcgcttctgggatagcatccctggccgggacagccgctctctggccctggctggcatccacgcccccttcctgcctgctgtgaagctctggttccaagtgctgagggaccaggccaagtggaggcttcagggagccgtggacatggacacgctggagcccgtggacgcctcctccaggcacagcagctccgcagccactgctggtctctgcctcagccacatccaggagttgtgggtgcgcctggcgtggcctgaccctgcccaggctcaggggctgggcacccagcttggccaggacgtgtgtgaggccaccctcttctatacggagctgcttcggaagaaggtggacactcagccaggggcggccggtgaagcagtgagcgaggcgctctgcgtggtcctcaacaatgtggagctcgtgcgcaaggctgctgggcaggccttgaagggcctggcatggccagagggggccacggggcccgagggggtgctcccccgccctctgctcagctgcacacaggccctggacgatgatctgcaacgggaggcccacacggtgacagcgcacctgacctctaagatggtgggcgacatccgcaagtatgtacagcacatcagtctctcgcctgactccatccagaacgatgaggccgtggccccgctcatgaagtacctggatgagaagctggccctgctgaacgcctcgctggtgaaggggaacctgagcagggtgctggaggccctgtgggagctactcctccaggccattctgcaggcgctgggtgcaaaccgtgacgtctctgctgatttctacagccgcttccatttcacgctggaggccctggtcagttttttccacgcagagggtcagggtttgcccctggagagcctgagggatggaagctacaagaggctgaaggaggagctgcggctgcacaaatgttccacccgcgagtgcatcgagcagttctacctggacaagctcaaacagaggaccctggagcagaaccggtttggacgcctgagcgtccgttgccattacgaggcggctgagcagcggctggccgtggaggtgctgcacgccgcggacctgctccccctggacgccaacggcttaagtgacccctttgtgatcgtggagctgggcccaccgcatctctttccactggtccgcagccagaggacccaggtgaagacccggacgctgcaccctgtatacgacgaactcttctacttttccgtgcctgccgaggcgtgccgccgccgcgcggcctgtgtgttgttcaccgtcatggaccacgactggctgtccaccaacgacttcgctggggaggcggccctcggcctaggtggcgtcactggtgtcgcccggccccaggtgggcgggggtgcaagggctgggcagcctgtcaccctgcacctgtgccggcccagagcccaggtgagatctgcgctgaggaggctggaaggccgcaccagcaaggaggcgcaggagttcgtgaagaaactcaaggagctggagaagtgcatggaggcggacccctgagtccatcagctgccagccccggccctggcccccaccccaagttccctgaagcatcctccagctcactgtggccagctttgtgcaaccagggcccacggcgcccctcctgtgctgtgacgtgtgtgtcgtggctggccccgcggcgcctaccgccctggccgtgtctgtctggtgtgtgctgtgaacccctgcacccaaccccacatctgggtggccaacttggcaggacttggccagcagctgcccaggacacagtgcaggccagagcgggcttgaccacctggtgggcctccctgcccgcttccttgggctccccggccctgggtgggcggtgggcagctggtctccagggactcagtgagtggctgtgctctctgcacaacgggcaatgtgcagacgcatttttggtaatcacagctggggagtgaaaagggtgccactggcaccactgggtggatggtccagagcctccacccacagaggggatgcaaagggcaggtgagtcaagaaccgcataggtctccagtccccacggggctcccaggccggggaaaggttcccctgaggtcactctgaggccagggacgtcacccaaggctggtggtcagtgtgaagggctccgtgccaactggtcagctgtccttcacgcacatatccgtggccacctgagacctgctccacgacccttccaggcagagccgagagttcgccccaacccttccccaggcccagtgtgaaaaacagactcacaaggggcttcttggcctgcagcttcatttgcgagagcgccgaggcaggacacagagcacagctgtgctggaagtgtggggagaacccggacagctcagtcctgccagcagccgcaaagagccgaggctgccaggcccatttatgtccctcatgtctctagattttctcgtcacccagcctcaaaaatatatgtgtctgcaaccctc

SEQ ID NO: 3127 - DNA, 3875 bp, Homo sapiens
  source 1..3875: mol_type = unassigned DNA
actggcttcgggggacagcagggggagcagcctcttccacccagcaagggaggggaagggggcttgtgactcccaggcccctgaggatttcacgactggctgtgggggtgacagcttccagaagcactgtacccagcctaccaagcccccccatcttttgggggggaggctcacaggggaaggcactgataggtttgaaggaggtcacccgccatgtcgaccttgctggacattaagagcagcgtgctcaggcaggtgcaggtgtgcccgtccttccgccgcaggactgagcaggacccagggagtgccagcgccgacccgcaggagcctgccacgggggcctggaaacccggggatggcgtggagttctttgcccacatgcgcctcatgctgaagaagggggaaggcagacagggcttgccgtgcctcgaggtccccctgcgcagtggctcgccagcacccccggagcctgtggatcccagcctcggcctgagagccctggccccagaggaggtggagatgctctacgaggaggccctgtacacggtgctttaccgcgcgggtaccatgggccctgaccaggtggacgacgaggaggccctgctcagctatctccagcaggtgtttggcaccagccttgaggagcacactgaggccatcgagcgagtgaggaaggccaaggcccccacgtatgccctgaaagtctctgtcatgcgtgccaagaaccttctggccaaggaccccaacggcttcagcgacccatactgcatgctgggcatcctgcctgcctcggacgccacgcgggagccccgtgcacagaaggagcagcgcttcggcttccgcaagggcagcaagcgcggtggacccctgcctgccaagtgcatccaggtcaccgaggtgaagagcagcaccctgaaccccgtctggaaggagcacttcctcttcgagattgaggatgtgagcacggaccagctgcacctggacatctgggatcatgacgacgatgtatccctggtagaagcgtgcaggaagctgaatgaagtcatcggcctgaagggcatgggcaggtacttcaaacagatcgtcaagtcagcccgcgcaaacgggacagcaggacccaccgaggaccacaccgatgacttcctggggtgcctcaacatacctgtccggagggatacggccatgagccagcgcgggcgatccggcttcctgtcccacctgctgctgctcagccatctgctgcggttggagcactcagcagaggagcccaactccagcagctggcgaggagagctcagcacaccagccgccaccatcctctgcctgcacggagcccagagcaacctgtcacccttgcagctggccgtgctgcactggcaggtcagcagccgccaccatcaaacctgcacgctggactacagctacctgctggggctgctggaggacatgcaggcacactgggaagaggctccttcactgccccaggagcaggaggagagcctggctgatagcctttccgccttctctgagttcgggctgcagctgctgcgccagctccgagactacttccctgccaccaacagcaccgctgtccaccgcctggagctgctgctgaagtgtctgggcaagctgcagctcttccaaccctcctttgagatctgccccttcgagtcggagctgaacatggacattgctgcggccctgaagagaggcaaccgtgagtggtacgacaggatcctgaatgacaagagtccccgagagcagccaggaccacagcgcctgcctgggctggttgtgctggctgacgccgtctatgatgaccttcagttctgctacagtgtgtacgccagcctcttccacagcatcctcaatgtggacgtcttcaccctgaccttccggcagctggagcgtctggtggctgaggaggcgtgggtgctgacggaggagctgagccccaagatgaccctggaggtggcctcggggctctttgagctctacctgaccctggctgacctccagcgcttctgggatagcatccctggccgggacagccgctctctggccctggctggcatccacgcccccttcctgcctgctgtgaagctctggttccaagtgctgagggaccaggccaagtggaggcttcagggagccgtggacatggacacgctggagcccgtggacgcctcctccaggcacagcagctccgcagccactgctggtctctgcctcagccacatccaggagttgtgggtgcgcctggcgtggcctgaccctgcccaggctcaggggctgggcacccagcttggccaggacgtgtgtgaggccaccctcttctatacggagctgcttcggaagaaggtggacactcagccaggggcggccggtgaagcagtgagcgaggcgctctgcgtggtcctcaacaatgtggagctcgtgcgcaaggctgctgggcaggccttgaagggcctggcatggccagagggggccacggggcccgagggggtgctcccccgccctctgctcagctgcacacaggccctggacgatgatctgcaacgggaggcccacacggtgacagcgcacctgacctctaagatggtgggcgacatccgcaagtatgtacagcacatcagtctctcgcctgactccatccagaacgatgaggccgtggccccgctcatgaagtacctggatgagaagctggccctgctgaacgcctcgctggtgaaggggaacctgagcagggtgctggaggccctgtgggagctactcctccaggccattctgcaggcgctgggtgcaaaccgtgacgtctctgctgatttctacagccgcttccatttcacgctggaggccctggtcagttttttccacgcagagggtcagggtttgcccctggagagcctgagggatggaagctacaagaggctgaaggaggagctgcggctgcacaaatgttccacccgcgagtgcatcgagcagttctacctggacaagctcaaacagaggaccctggagcagaaccggtttggacgcctgagcgtccgttgccattacgaggcggctgagcagcggctggccgtggaggtgctgcacgccgcggacctgctccccctggacgccaacggcttaagtgacccctttgtgatcgtggagctgggcccaccgcatctctttccactggtccgcagccagaggacccaggtgaagacccggacgctgcaccctgtatacgacgaactcttctacttttccgtgcctgccgaggcgtgccgccgccgcgcggcctgtgtgttgttcaccgtcatggaccacgactggctgtccaccaacgacttcgctggggaggcggccctcggcctaggtggcgtcactggtgtcgcccggccccaggtgggcgggggtgcaagggctgggcagcctgtcaccctgcacctgtgccggcccagagcccaggtgagatctgcgctgaggaggctggaaggccgcaccagcaaggaggcgcaggagttcgtgaagaaactcaaggagctggagaagtgcatggaggcggacccctgagtccatcagctgccagccccggccctggcccccaccccaagttccctgaagcatcctccagctcactgtggccagctttgtgcaaccagggcccacggcgcccctcctgtgctgtgacgtgtgtgtcgtggctggccccgcggcgcctaccgccctggccgtgtctgtctggtgtgtgctgtgaacccctgcacccaaccccacatctgggtggccaacttggcaggacttggccagcagctgcccaggacacagtgcaggccagagcgggcttgaccacctggtgggcctccctgcccgcttccttgggc

SEQ ID NO: 3128 - DNA, 3886 bp, Homo sapiens
  source 1..3886: mol_type = unassigned DNA
agtcgtcggcgcgcgcggctgggagcggtagctgtgcctcggcgtccccgagctggtgccgagcgcagcgccccaggagcccccccatccccgcgccggcccacggtcacccgccatgtcgaccttgctggacattaagagcagcgtgctcaggcaggtgcaggtgtgcccgtccttccgccgcaggactgagcaggacccagggagtgccagcgccgacccgcaggagcctgccacgggggcctggaaacccggggatggcgtggagttctttgcccacatgcgcctcatgctgaagaagggggaaggcagacagggcttgccgtgcctcgaggtccccctgcgcagtggctcgccagcacccccggagcctgtggatcccagcctcggcctgagagccctggccccagaggaggtggagatgctctacgaggaggccctgtacacggtgctttaccgcgcgggtaccatgggccctgaccaggtggacgacgaggaggccctgctcagctatctccagcaggtgtttggcaccagccttgaggagcacactgaggccatcgagcgagtgaggaaggccaaggcccccacgtatgccctgaaagtctctgtcatgcgtgccaagaaccttctggccaaggaccccaacggcttcagcgacccatactgcatgctgggcatcctgcctgcctcggacgccacgcgggagccccgtgcacagaaggagcagcgcttcggcttccgcaagggcagcaagcgcggtggacccctgcctgccaagtgcatccaggtcaccgaggtgaagagcagcaccctgaaccccgtctggaaggagcacttcctcttcgagattgaggatgtgagcacggaccagctgcacctggacatctgggatcatgacgacgatgtatccctggtagaagcgtgcaggaagctgaatgaagtcatcggcctgaagggcatgggcaggtacttcaaacagatcgtcaagtcagcccgcgcaaacgggacagcaggacccaccgaggaccacaccgatgacttcctggggtgcctcaacatacctgtccgggaggtgcctgtggctggcgtcgaccgctggttcaagctggagccacgctccagtgcctcgcgtgtgcagggacactgccacctggttctcaagctgatcactacgcagagggatacggccatgagccagcgcgggcgatccggcttcctgtcccacctgctgctgctcagccatctgctgcggttggagcactcagcagaggagcccaactccagcagctggcgaggagagctcagcacaccagccgccaccatcctctgcctgcacggagcccagagcaacctgtcacccttgcagctggccgtgctgcactggcaggtcagcagccgccaccatcaaacctgcacgctggactacagctacctgctggggctgctggaggacatgcaggcacactgggaagaggctccttcactgccccaggagcaggaggagagcctggctgatagcctttccgccttctctgagttcgggctgcagctgctgcgccagctccgagactacttccctgccaccaacagcaccgctgtccaccgcctggagctgctgctgaagtgtctgggcaagctgcagctcttccaaccctcctttgagatctgccccttcgagtcggagctgaacatggacattgctgcggccctgaagagaggcaaccgtgagtggtacgacaggatcctgaatgacaagagtccccgagagcagccaggaccacagcgcctgcctgggctggttgtgctggctgacgccgtctatgatgaccttcagttctgctacagtgtgtacgccagcctcttccacagcatcctcaatgtggacgtcttcaccctgaccttccggcagctggagcgtctggtggctgaggaggcgtgggtgctgacggaggagctgagccccaagatgaccctggaggtggcctcggggctctttgagctctacctgaccctggctgacctccagcgcttctgggatagcatccctggccgggacagccgctctctggccctggctggcatccacgcccccttcctgcctgctgtgaagctctggttccaagtgctgagggaccaggccaagtggaggcttcagggagccgtggacatggacacgctggagcccgtggacgcctcctccaggcacagcagctccgcagccactgctggtctctgcctcagccacatccaggagttgtgggtgcgcctggcgtggcctgaccctgcccaggctcaggggctgggcacccagcttggccaggacgtgtgtgaggccaccctcttctatacggagctgcttcggaagaaggtggacactcagccaggggcggccggtgaagcagtgagcgaggcgctctgcgtggtcctcaacaatgtggagctcgtgcgcaaggctgctgggcaggccttgaagggcctggcatggccagagggggccacggggcccgagggggtgctcccccgccctctgctcagctgcacacaggccctggacgatgatctgcaacgggaggcccacacggtgacagcgcacctgacctctaagatggtgggcgacatccgcaagtatgtacagcacatcagtctctcgcctgactccatccagaacgatgaggccgtggccccgctcatgaagtacctggatgagaagctggccctgctgaacgcctcgctggtgaaggggaacctgagcagggtgctggaggccctgtgggagctactcctccaggccattctgcaggcgctgggtgcaaaccgtgacgtctctgctgatttctacagccgcttccatttcacgctggaggccctggtcagttttttccacgcagagggtcagggtttgcccctggagagcctgagggatggaagctacaagaggctgaaggaggagctgcggctgcacaaatgttccacccgcgagtgcatcgagcagttctacctggacaagctcaaacagaggaccctggagcagaaccggtttggacgcctgagcgtccgttgccattacgaggcggctgagcagcggctggccgtggaggtgctgcacgccgcggacctgctccccctggacgccaacggcttaagtgacccctttgtgatcgtggagctgggcccaccgcatctctttccactggtccgcagccagaggacccaggtgaagacccggacgctgcaccctgtatacgacgaactcttctacttttccgtgcctgccgaggcgtgccgccgccgcgcggcctgtgtgttgttcaccgtcatggaccacgactggctgtccaccaacgacttcgctggggaggcggccctcggcctaggtggcgtcactggtgtcgcccggccccaggtgggcgggggtgcaagggctgggcagcctgtcaccctgcacctgtgccggcccagagcccaggtgagatctgcgctgaggaggctggaaggccgcaccagcaaggaggcgcaggagttcgtgaagaaactcaaggagctggagaagtgcatggaggcggacccctgagtccatcagctgccagccccggccctggcccccaccccaagttccctgaagcatcctccagctcactgtggccagctttgtgcaaccagggcccacggcgcccctcctgtgctgtgacgtgtgtgtcgtggctggccccgcggcgcctaccgccctggccgtgtctgtctggtgtgtgctgtgaacccctgcacccaaccccacatctgggtggccaacttggcaggacttggccagcagctgcccaggacacagtgcaggccagagcgggcttgaccacctggtgggcctccctgcccgcttccttgggct

SEQ ID NO: 3129 - DNA, 4528 bp, Homo sapiens
  source 1..4528: mol_type = unassigned DNA
ttcgactggaatgagaccccggggagcagcgtttgcagcgggcccgccaggtgacctgcacctgggcaccgccatcggcttcgcaggggccatctggaggagtcggtcacccgccatgtcgaccttgctggacattaagagcagcgtgctcaggcaggtgcaggtgtgcccgtccttccgccgcaggactgagcaggacccagggagtgccagcgccgacccgcaggagcctgccacgggggcctggaaacccggggatggcgtggagttctttgcccacatgcgcctcatgctgaagaagggggaaggcagacagggcttgccgtgcctcgaggtccccctgcgcagtggctcgccagcacccccggagcctgtggatcccagcctcggcctgagagccctggccccagaggaggtggagatgctctacgaggaggccctgtacacggtgctttaccgcgcgggtaccatgggccctgaccaggtggacgacgaggaggccctgctcagctatctccagcaggtgtttggcaccagccttgaggagcacactgaggccatcgagcgagtgaggaaggccaaggcccccacgtatgccctgaaagtctctgtcatgcgtgccaagaaccttctggccaaggaccccaacggcttcagcgacccatactgcatgctgggcatcctgcctgcctcggacgccacgcgggagccccgtgcacagaaggagcagcgcttcggcttccgcaagggcagcaagcgcggtggacccctgcctgccaagtgcatccaggtcaccgaggtgaagagcagcaccctgaaccccgtctggaaggagcacttcctcttcgagattgaggatgtgagcacggaccagctgcacctggacatctgggatcatgacgacgatgtatccctggtagaagcgtgcaggaagctgaatgaagtcatcggcctgaagggcatgggcaggtacttcaaacagatcgtcaagtcagcccgcgcaaacgggacagcaggacccaccgaggaccacaccgatgacttcctggggtgcctcaacatacctgtccgggaggtgcctgtggctggcgtcgaccgctggttcaagctggagccacgctccagtgcctcgcgtgtgcagggacactgccacctggttctcaagctgatcactacgcagagggatacggccatgagccagcgcgggcgatccggcttcctgtcccacctgctgctgctcagccatctgctgcggttggagcactcagcagaggagcccaactccagcagctggcgaggagagctcagcacaccagccgccaccatcctctgcctgcacggagcccagagcaacctgtcacccttgcagctggccgtgctgcactggcaggtcagcagccgccaccatcaaacctgcacgctggactacagctacctgctggggctgctggaggacatgcaggcacactgggaagaggctccttcactgccccaggagcaggaggagagcctggctgatagcctttccgccttctctgagttcgggctgcagctgctgcgccagctccgagactacttccctgccaccaacagcaccgctgtccaccgcctggagctgctgctgaagtgtctgggcaagctgcagctcttccaaccctcctttgagatctgcccccgagtcggagctgaacatggacattgctgcggccctgaagagaggcaaccgtgagtggtacgacaggatcctgaatgacaagagtccccgagagcagccaggaccacagcgcctgcctgggctggttgtgctggctgacgccgtctatgatgaccttcagttctgctacagtgtgtacgccagcctcttccacagcatcctcaatgtggacgtcttcaccctgaccttccggcagctggagcgtctggtggctgaggaggcgtgggtgctgacggaggagctgagccccaagatgaccctggaggtggcctcggggctctttgagctctacctgaccctggctgacctccagcgcttctgggatagcatccctggccgggacagccgctctctggccctggctggcatccacgcccccttcctgcctgctgtgaagctctggttccaagtgctgagggaccaggccaagtggaggcttcagggagccgtggacatggacacgctggagcccgtggacgcctcctccaggcacagcagctccgcagccactgctggtctctgcctcagccacatccaggagttgtgggtgcgcctggcgtggcctgaccctgcccaggctcaggggctgggcacccagcttggccaggacgtgtgtgaggccaccctcttctatacggagctgcttcggaagaaggtggacactcagccaggggcggccggtgaagcagtgagcgaggcgctctgcgtggtcctcaacaatgtggagctcgtgcgcaaggctgctgggcaggccttgaagggcctggcatggccagagggggccacggggcccgagggggtgctcccccgccctctgctcagctgcacacaggccctggacgatgatctgcaacgggaggcccacacggtgacagcgcacctgacctctaagatggtgggcgacatccgcaagtatgtacagcacatcagtctctcgcctgactccatccagaacgatgaggccgtggccccgctcatgaagtacctggatgagaagctggccctgctgaacgcctcgctggtgaaggggaacctgagcagggtgctggaggccctgtgggagctactcctccaggccattctgcaggcgctgggtgcaaaccgtgacgtctctgctgatttctacagccgcttccatttcacgctggaggccctggtcagttttttccacgcagagggtcagggtttgcccctggagagcctgagggatggaagctacaagaggctgaaggaggagctgcggctgcacaaatgttccacccgcgagtgcatcgagcagttctacctggacaagctcaaacagaggaccctggagcagaaccggtttggacgcctgagcgtccgttgccattacgaggcggctgagcagcggctggccgtggaggtgctgcacgccgcggacctgctccccctggacgccaacggcttaagtgacccctttgtgatcgtggagctgggcccaccgcatctctttccactggtccgcagccagaggacccaggtgaagacccggacgctgcaccctgtatacgacgaactcttctacttttccgtgcctgccgaggcgtgccgccgccgcgcggcctgtgtgttgttcaccgtcatggaccacgactggctgtccaccaacgacttcgctggggaggcggccctcggcctaggtggcgtcactggtgtcgcccggccccaggtgggcgggggtgcaagggctgggcagcctgtcaccctgcacctgtgccggcccagagcccaggtgagatctgcgctgaggaggctggaaggccgcaccagcaaggaggcgcaggagttcgtgaagaaactcaaggagctggagaagtgcatggaggcggacccctgagtccatcagctgccagccccggccctggcccccaccccaagttccctgaagcatcctccagctcactgtggccagctttgtgcaaccagggcccacggcgcccctcctgtgctgtgacgtgtgtgtcgtggctggccccgcggcgcctaccgccctggccgtgtctgtctggtgtgtgctgtgaacccctgcacccaaccccacatctgggtggccaacttggcaggacttggccagcagctgcccaggacacagtgcaggccagagcgggcttgaccacctggtgggcctccctgcccgcttccttgggctccccggccctgggtgggcggtgggcagctggtctccagggactcagtgagtggctgtgctctctgcacaacgggcaatgtgcagacgcatttttggtaatcacagctggggagtgaaaagggtgccactggcaccactgggtggatggtccagagcctccacccacagaggggatgcaaagggcaggtgagtcaagaaccgcataggtctccagtccccacggggctcccaggccggggaaaggttcccctgaggtcactctgaggccagggacgtcacccaaggctggtggtcagtgtgaagggctccgtgccaactggtcagctgtccttcacgcacatatccgtggccacctgagacctgctccacgacccttccaggcagagccgagagttcgccccaacccttccccaggcccagtgtgaaaaacagactcacaaggggcttcttggcctgcagcttcatttgcgagagcgccgaggcaggacacagagcacagctgtgctggaagtgtggggagaacccggacagctcagtcctgccagcagccgcaaagagccgaggctgccaggcccatttatgtccctcatgtctctagattttctcgtcacccagcctcaaaaatatatgtgtctgcaaccctc

SEQ ID NO: 3130 - DNA, 3423 bp, Homo sapiens
  source 1..3423: mol_type = unassigned DNA
attgggcgttacgcgagggcggggccggttgccaggacgacgcctgcgaagatggccgctgcgtcctcatcggattccgacgcctgcggagctgagagcaatgaggccaattcgaagtggttggatgcgcactacgacccaatggccaatatccacaccttttctgcctgcctagcgctggcagatttacatggggatggggaatacaagctggtggtaggggaccttggccctggtgggcagcagccccgcctgaaggtgctcaaaggaccactggtgatgaccgaaagcccgctacctgctctgccagctgctgctgccaccttcctcatggagcaacatgagccccggaccccagctctggcacttgcttcaggcccttgtgtctatgtgtataagaatctcagaccctacttcaagttcagcctgccccaattgcctccaaatcctctggaacaagacctttggaaccaggccaaagaggaccgaatcgaccccttaaccctgaaggagatgctggagagcatccgggagacggcagaggagcctttgtccatccagtcactcaggtttctgcagctggagctaagtgaaatggaggcatttgtaaaccaacacaagtccaactccatcaagcggcagacagtcatcaccaccatgaccaccttgaagaagaacctggctgacgaggatgctgtgtcttgcctggtgctgggcaccgagaacaaggagctcctggtgcttgaccccgaggccttcaccattttagccaagatgagccttcccagcgtccccgtcttcctagaggtttctggccagtttgatgttgagttccggcttgccgcggcctgccgcaatggaaacatctatattctgagaagagactccaagcaccccaagtactgcatcgagctgagcgcccagcctgtgggacttatccgggtacacaaggtcctagtggtgggcagcacccaagacagcctgcatggcttcacccacaaggggaagaagctgtggacagtgcagatgcccgcagccatcctgaccatgaacctcctggagcagcattcccggggcctgcaggccgtcatggctgggctggccaatggagaggtccgcatttatcgtgacaaggccctgctcaatgtcatccacaccccggatgcagtgaccagcctttgctttggccggtacgggcgggaggacaacaccctcatcatgaccactcgaggtggtggcctgatcatcaagatcctgaagcgtacagcagtgtttgtagagggaggaagtgaggtgggtcccccaccagcccaggccatgaaactcaatgtgccccgaaagacccggctttacgtggatcagacactgcgagagcgggaggctggcaccgccatgcaccgggccttccagacagacctatacctgctgcgcctacgtgctgcccgcgcctacctgcaggccctcgagtccagcctgagccccctgtccacgacagcccgagagccactcaagctgcacgccgtggttcagggccttggccccacctttaagctcacacttcacctgcagaacacctcaacaacccgtcctgtcctggggctgctggtctgcttcctgtacaacgaggcgctctattccctgccccgggccttcttcaaggtacccttgctggtgccagggctcaactaccccctggagacctttgtggagagtctcagtaacaagggcatctcagacatcatcaaggtgctggtgcttcgagaaggccaaagtgcacccctgctgagtgcccacgtcaacatgcctgggagcgaggggctggcggccgcctgagacctgagctgctgtgaaagcccctgcacaatcagccagggagaactgggcgggtttagtggccccaggcccactcctcatgcagcagtgtgctggggcgacagctcgtctcccctctcttaagcacccgcttcctcaccacccccactgttgggcctatagtagcaggttagtgagtacctagggcggctcaactcctcccacagcaccaacccagcatggtcccactgaagtcctactacgccctcccctccccagccttttccagaaaccatactgggctcagatcagagctccgaagcggtcaaagtgagctgagcaggacaggcccagcctttctccactgccacgtccctcatgcacatcactcatctcctgctgcaggccaaggccaaaattgggctagtcctggccagggaaatcagaagctcttcttgggtgagattgagcctcctgttgctccctggagttccggaggctgggctgcagcccactcagcttgcgggcaaaatacgtgctctcctctctccttgtcagctgagcaaacccagggaatagccctcctctccccaggaaacttctctgaaatcttagacttagccagtcttaggcctacgatgccacacaaaggttgttcagggagaagggggtgcaggaggcagagggtgccccgcagggagctggtggctccagccccactagagctcctaaagatcacacagcagctgctcctgacagggatgctcatgcccagaaagcaagcccaggagaggaaggcagagtgtgacagagcagagccagggccaggcgcaccaggagaggcgtttctggggctccagagaagtgccacgggaggcagaagtccagaactgcccatatagatgcccttctacatcctggagcccaaatcagtcatgtgggtgggaagttcccagggcagtggtcacatcgtgagaattagcaggaaaggcggggcctttcttgtcatagctatttctgaggatgaaatgggagacatatgcccagcacctgatgtaagtttatataatgtaatattatgtacctaccactaagaaatacatgaaccgtgccatgaggacagtaagtgttcataaagcaacatgaagcaagaaacagtgcagggtgcccagtgcacacactagagagaaattgtgaacattaaggacaaggagaattggtgtctttctaaaacatacttatttaaaaacacatacccacttactaatgtggaattacacagtttgtaacaagaaaacagtctctcccattctctagtactgctcccctacccagcagtcacttccagttcattcagctatttttaaaatgtgcttatatgactcttgcttgatatatcaatcttagacattacctgttgactccctgttgtcatacatgaggctttagctctcttttgtcagcaaccctcccccatccctagttattaggttaaaaaatactcagattactatttctattactatgtgaaagttaactgcggagccaagagttggactataattaaattaccttccttgtactttctttttaatggagttaatgagttgc

SEQ ID NO: 3131 - DNA, 1002 bp, Homo sapiens
  source 1..1002: mol_type = unassigned DNA
ggttgccaggacgacgcctgcgaagatggccgctgcgtcctcatcggattccgacgcctgcggagctgagagcaatgaggccaattcgaagtggttggatgcgcactacgacccaatggccaatatccacaccttttctgcctgcctagctggtggtaggggaccttggccctggtgggcagcagccccgcctgaaggtgctcaaaggaccactggtgatgaccgaaagcccgctacctgctctgccagctgctgctgccaccttcctcatggagcaacatgagccccggaccccagctctggcacttgcttcaggcccttgtgtctatgtgtataagaatctcagaccctacttcaagttcagcctgccccaattgcctccaaatcctctggaacaagacctttggaaccaggccaaagagggagacggcagaggagcctttgtccatccagtcactcaggtttctgcagctggagctaagtgaaatggaggcatttgtaaaccaacacaagtccaactccatcaagcggcagacagtcatcaccaccatgaccaccttgaagaagaacctggctgacgaggatgctgtgtcttgcctggtgctgggcaccgagaacaaggagctcctggtgcttgaccccgaggccttcaccattttagccaagatgagccttcccagcgtccccgtcttcctagaggtttctggccagtttgatgttgagttccggcttgccgcggcctgccgcaatggaaacatctatattctgagaagatgatcatacaagccaccatagtgaaggtgggcggaagacaagacaccatagtgaaggtgggaggaagacaagacaccatagtgaaggtgggaggaagacacacttgatgttttccaaggccacacatttactaaggtggcagaagtggaaataatcccagggtcatctgctttggggccagtgttcctcccagagactccaagcaccccaagtactgcatcgagctga

SEQ ID NO: 3132 - DNA, 3595 bp, Homo sapiens
  source 1..3595: mol_type = unassigned DNA
attccgtttccggccgttcccacccctgttttcggtcggcccgggtgttctgcaagctggtcaaaaaggggaagcggcccagatatgttaagttctatggccgctgcagggtctgtgaaggcggcgttgcaggtggccgaggtgctggaagccatcgtgagctgctgcgtggggcccgagggacggcaagttttgtgtacgaagcccactggcgaggtgcttctcagccggaatggaggccgcctcctggaggcgctacacttagagcatcccatagccaggatgatagtggactgtgtttccagtcatctcaaaaaaacaggagatggtgcaaaaacatttattatctttctttgccatttgcttagaggacttcatgcaatcacagacagagaaaaggatcctttgatgtgtgaaaacattcaaacccatggaaggcattggaaaaattgttctcggtggaaatttatttcccaggctctcctaacgtttcagacacaaatattagacggtattatggaccagtacctaagtagacactttttgtctatcttttcgtctgctaaagagagaacattgtgtaggagctctttagagttgctcttagaagcatacttttgtggaagagtgggaagaaataatcataaatttatttcacagttgatgtgtgactactttttcaagtgtatgacttgtaaaagtgggattggtgtatttgagttagtggatgaccattttgtagagttgaatgttggtgtcactggccttcctgtttcagattccaggatcatagctggtcttgtgcttcagaaagatttttctgtgtaccgcccagcagatggtgacatgcgaatggtgatagtaacagaaaccattcagcctcttttttccacttctggatcagagtttattctaaattcagaagcacagtttcagacatctcaattttggattatggaaaagacaaaagcaataatgaaacatctacatagtcagaatgtaaaattgctcatatctagtgtgaaacaaccagatttagttagttattatgcaggggtgaatggcatatcagtggttgagtgtttatcatcagaagaagtttctcttatccggaggatcattggtctttctccatttgtaccaccacaggccttttcgcagtgtgaaatacctaacactgctttggtgaaattttgtaaacctcttatccttagatccaaaagatatgttcatctaggcttgataagcacatgtgcatttataccacactctatagttctttgtggaccagtgcatggtctcattgaacaacatgaggatgctttacatggagcacttaaaatgcttcggcaattatttaaagaccttgatctaaattacatgacacaaaccaatgaccaaaatggcacttcaagtctttttatttataagaacagtggagaaagttatcaagcaccagatcctggtaatggctcaatacaaaggccttatcaggacacagttgcagagaacaaagatgcattggaaaaaactcaaacatatttaaaagtacattctaatttggtaattccagatgtagaattagaaacatatattccgtattcaacccccacactgacaccaacagatacattccaaacagttgaaacgctgacatgtttgtctttggaaagaaacaggctaactgattattatgaaccattactcaagaacaattccactgcttattcaacaaggggaaatagaatagaaatttcttacgaaaatttacaggtcacaaatattactagaaagggaagcatgttaccagtgagctgtaagttaccgaatatgggtacttcccagagttacctttcctcatctatgccagctggttgtgttttgccagtaggtggtaattttgagatcttgttacattactatcttctcaattatgccaaaaaatgccatcaatcagaagaaaccatggttagtatgataatagctaatgcacttttaggcattcccaaagtcctttataaatctaaaacaggaaagtacagctttccacatacatatataagagctgtccatgcactgcaaaccaatcaacccttggtaagcagtcagacaggtttggaatcagtaatgggtaaataccagctactaacttcagttcttcagtgtttgacaaaaatattaaccattgacatggtaatcactgttaagagacaccctcagaaagttcacaatcaagattcagaagatgaactataacatcagaagtttttaattaaccaaacttttcatctaactcaagccaagtaaagcagtcatgtgaccactggttctaaagtcagttcagtctacttaggaaaatagcgtaactttaaaagtctttagaagaagcacactaaggtcaccagaccagatacaaatattaaattactttatggaacaaatctagaggggaagccaagatttggctaagtgtgtctgttttttccctattttatgcctctgtgtctcagctctgtgttagcctatgtgtttaggggagggtttttctttatagctcctttttactctcctgtatctttttcactccagccctccttcatcgttacatgtttagttcatagaatcatttaatctctgatttgggtgggcttattctaattgtttttaatattgaatacattatttgcattaattttccctactcatactttgtaaagctgagtaaaaggctcaaattatttttttcaaaaagcataaaattaaattagcagtgagtaaaaggctcaaattttttttcaaaaagcataaaattaatttttacttttatgtggtcattggtttactgccacttcatttggaaaacttggatagattttcacctttgatatacctttgaatatatgttacctgaaatataactgtgcattgttaactctttcatttctgtagtaaaaggttaatactagaaaggatatgcaattaatactttgattttctcctgaccccaagagcttgtaaggatatgtcatgtatttactggtttttcttgtatctggtgcatagccagagttccacagtaacaaataatttgacaatttttatttctaatgtttatttctgttttatttttaatttttatttctaatttatttcatttacaaatgttcatattttaaaaacttgtcaatgtaaataatatgatgcatcttatcatggacaaggacagtgttttctacctttatcagttctctgtaatacccaaaacagtgctgtatttactccaagtattcagaagtgcttgttgaacaaaacagtgttatctttaattcattcctttaaatacatgtttccagtttacttattcaacagattcttacttgggattgactgaagaaaaaaaactttaattatagttgaataagtgttgactaatgtattttaaaaactataatatcaaaattttttatattaaatgtaattctgattttttaaacatttatgctatatgatgcattattttgtttctgtgaatatggagagaataaattagctcttttgctgaattcatggatgaatgaactttaaaactgctgca

SEQ ID NO: 3133 - DNA, 3244 bp, Homo sapiens
  source 1..3244: mol_type = unassigned DNA
gtctcttagcaactaagcccccggctcctccagaagcccctcttcgcacatgcgcaaactgcggacggggaactgggctccctagccctggcgtttttggtgttgctgtcccagccagaatcgcgtctggccggtgggaagccgggaactccagccccctgtaggagaggagaaaggagcgagatcatgatacatggtgatggcttgcagagtcgtaaacaaaagaagacacatgggacttcaacaactttcatcattcgcggaaacaggaagaactttcctaggcccactaaaatcatccaaatttattatagatgaagaatgtcatgaaagtgtattaatcagttcaacagtaaggcttcttgaaagtttggatttaaccagtgcagtgggacaacttctcaatgaagcagttcaagcacaaaacaacacatatagaactggaatcagtactcttttgtttcttgttggtgcttggagcagtgcagttgaagaatgtcttcatcttggtgtccccatttccataatagtatcagtaatgtcagaaggcttaaacttttgtagtgaagaggtagtttctcttcatgtacctgttcacaatatatttgactgtatggacagcacaaaaacattttctcaacttgaaacatttagtgtaagtttgtgtccttttctacaggtcccttcagatactgatttgatagaggaattgcatggtctcaaagatgttgcctctcaaacactgaccatttccaacctttctgggagacctcttaaatcatatgaattatttaaacctcagacaaaggttgaagcagataacaacacatcacgaactctgaaaaacagcctgcttgcagatacctgctgcagacagtcaatactaatccacagtaggcattttaataggacagataatactgaaggggtaagcaaaccagatggatttcaagaacatgttacagctactcacaaaacttacagatgtaatgatttggtagagttggcagtaggcttgagtcatggagatcacagcagcatgaagttagtagaagaagcagtacagctgcaatatcagaatgcttgtgtgcaacaaggcaactgtacaaaaccatttatgtttgacatttcaagaattttcacttgctgtctaccaggcttacctgaaacttcttcttgtgtttgtccaggatatatcactgttgtgtcagtatctaataatcctgtgatcaaggaattgcagaatcagcctgtgcgaatagttctcattgagggtgacctcacagagaattaccgccacctgggatttaataagtctgcaaatattaaaacagtattagatagcatgcggcttcaagaagacagctcagaagaactgtgggcaaatcacgtgttacaggtgttaatccagttcaaggtgaaccttgtcctggtacaaggaaatgtgtccgaacgcttaattgaaaaatgtataaacagtaagcggttggtaatcggctcagtgaatggcagtgtgatgcaggcttttgcagaggctgcaggagcagtacaggtggcctacattacacaagtgaatgaagattgtgtgggcgacggggtctgcgtgaccttctggagaagcagccctttggatgttgtagataggaacaacagaatcgcaatcttattaaaaacagaaggaattaatttggttacggccgtgctcactaacccagttactgcacagatgcaaatcaaagaagataggttctggacatgtgcctatcgtttgtattatgctctaaaagaggaaaaggtcttccttggaggtggtgcagttgaatttttgtgtcttagctgtcttcatattcttgcagagcaatctctgaaaaaagaaaaccatgcctgctcagggtggctgcataatacttcctcttggctggcttcatctctggcaatatacagaccaactgtgcttaaattcctggcaaatggatggcagaaatacctttcaactctcctatataacactgccaattactcatcagaatttgaagccagcacatacattcaacatcatctgcaaaatgccacagactctggctctccttcatcttacatcttgaatgaatatagtaaactaaatagtagaatttttaattcagacatttcaaataaactggagcagattccgagagtttatgacgttgttacaccaaagattgaggcgtggcgccgagcattggatttagtattgttagtacttcagacagacagtgaaataattactggacatggacacacacagataaattcacaggaattaacgggctttctatttttgtagtgttactggctaagtctttggaaaataatttttcataatatgtcatgctaataataaatatattgatagccaagtcatggtgcctaaaatgccagctattgccaagaagaaaatagttgatgtctgtcaataactgtgcatggtctgagattttaccctacttataagctaacaagttagcctgttactgtttcgtgggatgctacagaatgcataagacacctgggtcagaaacaaaggacttatcgctcacagcaaaagctgtagccagagcttcatgttggttttattcagttcctcatttttctagttcccacaggaggaacacaaagggcccatgatgaaagcctgcacacagtgggttatgttgtaagcttgggttattaactgcttttatagtaagcaaaaaaatcctggtctttgtccaaagggagttattaccccatacttgaagatagcttagtgtaaacacaagcctaggacatggactaggtaaagacaaagtccttgcattcttgacatacccagtaagtatgcagggacactcagagcccatagtggatagtctcttccaacagtctgctcctcagcctgagatgttcttggccaaacttgaattttcacatgagtatgccactctatcagctactctgattaacctgacagtcgggttgtttagtcagtaccaaatttgttcatttggtctcatatagcaattaatgcaggctattatcagacacagcagcaggatgaagccaacctgcagtattaacctcagtcctgtcccccaaggtcttgactcaatcaactctaagttccaagggaggaccaataggtctttttattaggcagccagaatgtagtgaaggacaatttattatactttatgacccaataaagggagctttgactgacgta

SEQ ID NO: 3134 - DNA, 859 bp, Homo sapiens
  source 1..859: mol_type = unassigned DNA
tttggtgttgctgtcccagccagaatcgcgtctggccggtgggaagccgggaactccagccccctgtaggagaggagaaaggagcgaggcaggagaggaaaacaagtgcaaagtgcattcttgaagcactctgtcaaatcacttttcatgcttcattgagtagaaacatggcacattttccaaagccatcagcctgtcttgttcatattatatcccagacagacacgcaagtattgtaatcattgataaaaatctcattaggcttctggaaaatagatcatgatacatggtgatggcttgcagagtcgtaaacaaaagaagacacatgggacttcaacaactttcatcattcgcggaaacaggaagaactttcctaggcccactaaaatcatccaaatttattatagatgaagaatgtcatgaaagtgtattaatcagttcaacagtaaggcttcttgaaagtttggatttaaccagtgcagtgggacaacttctcaatgaagcagttcaagcacaaaacaacacatatagaactggaatcagtactcttttgtttcttgttggtgcttggagcagtgcagttgaagaatgtcttcatcttggtgtccccatttccataatagtatcagtaatgtcagaaggcttaaacttttgtagtgaagaggtagtttctcttcatgtacctgttcacaatatatttgactgtatggacagcacaaaaacattttctcaacttgaaacatttagtgtaagtttgtgtccttttctacaggtcccttcagatactgatttgatagaggaattgcatggtctcaaagatgttgcctctcaaacactgaccatttccaacctttctggg

SEQ ID NO: 3135 - DNA, 3431 bp, Homo sapiens
  source 1..3431: mol_type = unassigned DNA
gtctcttagcaactaagcccccggctcctccagaagcccctcttcgcacatgcgcaaactgcggacggggaactgggctccctagccctggcgtttttggtgttgctgtcccagccagaatcgcgtctggccggtgggaagccgggaactccagccccctgtaggagaggagaaaggagcgaggcaggagaggaaaacaagtgcaaagtgcattcttgaagcactctgtcaaatcacttttcatgcttcattgagtagaaacatggcacattttccaaagccatcagcctgtcttgttcatattatatcccagacagacacgcaagtattgtaatcattgataaaaatctcattaggcttctggaaaatagatcatgatacatggtgatggcttgcagagtcgtaaacaaaagaagacacatgggacttcaacaactttcatcattcgcggaaacaggaagaactttcctaggcccactaaaatcatccaaatttattatagatgaagaatgtcatgaaagtgtattaatcagttcaacagtaaggcttcttgaaagtttggatttaaccagtgcagtgggacaacttctcaatgaagcagttcaagcacaaaacaacacatatagaactggaatcagtactcttttgtttcttgttggtgcttggagcagtgcagttgaagaatgtcttcatcttggtgtccccatttccataatagtatcagtaatgtcagaaggcttaaacttttgtagtgaagaggtagtttctcttcatgtacctgttcacaatatatttgactgtatggacagcacaaaaacattttctcaacttgaaacatttagtgtaagtttgtgtccttttctacaggtcccttcagatactgatttgatagaggaattgcatggtctcaaagatgttgcctctcaaacactgaccatttccaacctttctgggagacctcttaaatcatatgaattatttaaacctcagacaaaggttgaagcagataacaacacatcacgaactctgaaaaacagcctgcttgcagatacctgctgcagacagtcaatactaatccacagtaggcattttaataggacagataatactgaaggggtaagcaaaccagatggatttcaagaacatgttacagctactcacaaaacttacagatgtaatgatttggtagagttggcagtaggcttgagtcatggagatcacagcagcatgaagttagtagaagaagcagtacagctgcaatatcagaatgcttgtgtgcaacaaggcaactgtacaaaaccatttatgtttgacatttcaagaattttcacttgctgtctaccaggcttacctgaaacttcttcttgtgtttgtccaggatatatcactgttgtgtcagtatctaataatcctgtgatcaaggaattgcagaatcagcctgtgcgaatagttctcattgagggtgacctcacagagaattaccgccacctgggatttaataagtctgcaaatattaaaacagtattagatagcatgcggcttcaagaagacagctcagaagaactgtgggcaaatcacgtgttacaggtgttaatccagttcaaggtgaaccttgtcctggtacaaggaaatgtgtccgaacgcttaattgaaaaatgtataaacagtaagcggttggtaatcggctcagtgaatggcagtgtgatgcaggcttttgcagaggctgcaggagcagtacaggtggcctacattacacaagtgaatgaagattgtgtgggcgacggggtctgcgtgaccttctggagaagcagccctttggatgttgtagataggaacaacagaatcgcaatcttattaaaaacagaaggaattaatttggttacggccgtgctcactaacccagttactgcacagatgcaaatcaaagaagataggttctggacatgtgcctatcgtttgtattatgctctaaaagaggaaaaggtcttccttggaggtggtgcagttgaatttttgtgtcttagctgtcttcatattcttgcagagcaatctctgaaaaaagaaaaccatgcctgctcagggtggctgcataatacttcctcttggctggcttcatctctggcaatatacagaccaactgtgcttaaattcctggcaaatggatggcagaaatacctttcaactctcctatataacactgccaattactcatcagaatttgaagccagcacatacattcaacatcatctgcaaaatgccacagactctggctctccttcatcttacatcttgaatgaatatagtaaactaaatagtagaatttttaattcagacatttcaaataaactggagcagattccgagagtttatgacgttgttacaccaaagattgaggcgtggcgccgagcattggatttagtattgttagtacttcagacagacagtgaaataattactggacatggacacacacagataaattcacaggaattaacgggctttctatttttgtagtgttactggctaagtctttggaaaataatttttcataatatgtcatgctaataataaatatattgatagccaagtcatggtgcctaaaatgccagctattgccaagaagaaaatagttgatgtctgtcaataactgtgcatggtctgagattttaccctacttataagctaacaagttagcctgttactgtttcgtgggatgctacagaatgcataagacacctgggtcagaaacaaaggacttatcgctcacagcaaaagctgtagccagagcttcatgttggttttattcagttcctcatttttctagttcccacaggaggaacacaaagggcccatgatgaaagcctgcacacagtgggttatgttgtaagcttgggttattaactgcttttatagtaagcaaaaaaatcctggtctttgtccaaagggagttattaccccatacttgaagatagcttagtgtaaacacaagcctaggacatggactaggtaaagacaaagtccttgcattcttgacatacccagtaagtatgcagggacactcagagcccatagtggatagtctcttccaacagtctgctcctcagcctgagatgttcttggccaaacttgaattttcacatgagtatgccactctatcagctactctgattaacctgacagtcgggttgtttagtcagtaccaaatttgttcatttggtctcatatagcaattaatgcaggctattatcagacacagcagcaggatgaagccaacctgcagtattaacctcagtcctgtcccccaaggtcttgactcaatcaactctaagttccaagggaggaccaataggtctttttattaggcagccagaatgtagtgaaggacaatttattatactttatgacccaataaagggagctttgactgacgt

SEQ ID NO: 3136 - DNA, 2814 bp, Homo sapiens
  source 1..2814: mol_type = unassigned DNA
cacagaaggcgccgaggctccaccgcgcagccgcaaaaagagcggacgggtctgcgccgccgcaggaggagcaggcggtacctggacgggttcgtcccgggctgtttcgcgtccggcctgaggcggctggggccgcgcaggtagtgtccctgcacttcttgcccgggcgcgtgaggccagctccgctgcgcttgtctccagcttccagccctcctcccctaagccgccgccatcatgctgctgcctgtgttcaccctgaaactgcgccacaaaatcagcccccgaatggtggccatagggcgctacgacgggactcacccgtgcctggcggccgccacccaaacgggcaaggtttttattcataatcctcatacacggaaccagcatgtcagtgcatccagggtcttccagagccccctggaatctgatgtttctcttctcagcattaaccaggcagtcagctgtctgactgcaggcgtattgaaccctgagcttggctatgatgcccttttagtggggacacagactaatcttttggcttatgatgtctacaataattcggatttgttctacagagaggtagcagatggggcaaatgcaattgtgctggggacattgggagacatttcttcccctcttgcgattattggtggcaattgtgctctgcaaggtttcaatcatgaaggaagtgatctcttttggacggttactggagacaatgttaattccttggccttgtgtgactttgatggtgatggaaagaaagagcttcttgttggatctgaggattttgatatccgagtttttaaggaagatgagattgtggcagaaatgacagaaacagagatagtcacctctctttgtcccatgtatggcagtcgatttggttatgccctttccaatggcacagttggagtttatgacaaaacatcccgatactggagaattaaatcgaaaaatcatgccatgagcattcatgcttttgaccttaattctgatggagtgaatgaactgataactggttggtccaatgggaaggttgatgctcgaagtgaccgaactggggaggtcatctttaaggacaatttttcttctgcaattgccggtgtggtagagggagattaccggatggatggccacatacagttaatctgctgctcagtggatggggaaatccggggctacctgcctggcacggctgagatgaggggcaacctcatggacaccagtgcagagcaggacctgatccgagagctgagtcagaagaagcagaatctgttgctggaactccgtaactatgaggaaaatgccaaggctgaattggccagtccactgaacgaggctgatgggcatcggggcataatcccagccaataccaggctccacaccacgctctcagtcagcctggggaatgagacccaaactgctcatacagaattacgcatttccacttctaatgacaccatcatccgagcagtattgatttttgcagaaggaatttttacaggtgaaagccacgtggtacatcccagcattcacaacctctccagttccatctgcatccctattgtgcctcccaaagatgtccctgtggatctgcacttgaaggcattcgtgggttacagaagcagcacccagtttcatgtatttgaatcgacaagacagctccctcgattctccatgtatgcgctgaccagcctggaccctgccagtgagccaatcagttatgttaactttaccattgcagaacgggcacagagggttgttgtatggctcggtcagaactttctgttaccagaagacactcacattcagaatgctccatttcaagtgtgtttcacatctttacggaatggcggccacctgcatataaaaataaaacttagtggagagatcactataaatactgatgatattgatttggctggtgatatcatccagtcaatggcatcattttttgctattgaagaccttcaagtagaagcggattttcctgtctattttgaggaattacgaaaggtgctagttaaggtggatgaatatcattcagtgcatcagaagctcagtgctgatatggctgatcattctaatttgatccgaagtttgctggtcggagctgaggatgctcgtctgatgagggacatgaaaacaatgaagagtcgttatatggaactctatgaccttaatagagacttgctaaatggatataaaattcgctgtaacaatcacacagagctgttgggaaacctcaaagcagtaaatcaagcaattcaaagagcaggtcgtctgcgggttggaaaaccaaagaaccaggtgatcactgcttgtcgggatgcaattcgaagcaataacatcaacacactgttcaaaatcatgcgagtggggacagcttcttcctaggtgaggaaaatacaggtcatgaagttcctggcaaagattttctgttaaaaacctatgctggtttgctttggatcacaccctggtgaaccccgggtgctaagaatgaaaataaccttggtgagttgtacaaattaaagacaaagaactacatgtgaagatagacttgctttctatttttaaatcagtagtagtactgttgctgaataatactaggtttttatggaataggatgaatgcttttgaagtattagggcttcagagtccaattttgcttatttatggtatataaatacatatttttttcttgaaattgcaattgagtttgtacttttcaaatagattatctactttttcattaaaatgtaaagatgttaaactttgtgttgattgattataaaatcaccaccaaatcag

SEQ ID NO: 3137 - DNA, 2490 bp, Homo sapiens
  source 1..2490: mol_type = unassigned DNA
aaccgccgacttccggccgcgcagcggtgggctgagctaaaatggctgaggagagagtcgcgacgagaactcaatttcctgtatctactgagtctcaaaaaccccggcagaaaaaagctccagagtttcctattttggagaagcagaactggttgattcatcttcattatatccggaaagattatgaagcctgcaaggctgttatcaaagaacagcttcaagagactcagggattgtgtgaatatgctatctatgtccaagcattgatatttcgcctagaaggaaatatccaagaatccctagaactcttccagacatgtgcagttcttagtcctcagagtgctgataacctcaagcaggtggccagatctttatttcttttgggaaaacataaagctgccattgaagtatataatgaagcagctaaactcaaccagaaagattgggagatcagccataacctaggagtttgctacatatacctgaagcagttcaacaaggcacaagaccagttgcacaatgccctgaatcttaataggcacgatctgacttatataatgctggggaagatccacttgctggagggagacttggacaaggccattgaagtctacaagaaagcagtggagttctcaccagaaaatacagagcttcttacaactttaggattactctacttacagctcggcatttaccagaaggcatttgaacatcttggcaatgcactgacttatgaccctaccaactacaaggccatcttggcagcaggcagcatgatgcagacccacggggactttgatgttgccctcaccaaatacagagttgtggcttgtgctgttccagaaagtcctccactctggaataacattggaatgtgtttctttggcaagaagaaatatgtggcggccatcagctgcctgaaacgagccaactacttggcaccctttgattggaagattctgtataatttgggccttgtccatttgaccatgcagcagtatgcatcagcttttcattttctcagtgcggccatcaacttccagccaaagatgggggagctctacatgctcttggcagtggctctgaccaatctggaagatatagaaaatgccaagagagcctacgcagaagcagtccacctggataagtgtaaccctttagtaaacctgaactatgctgtgctgctgtacaaccagggcgagaagaagaacgccctggcccaatatcaggagatggagaagaaagtcagcctactcaaggacaatagctctctggaatttgactctgagatggtggagatggctcagaagttgggagctgctctccaggttggggaggcactggtctggaccaaaccagttaaagatcccaaatcaaagcaccagaccacttcaaccagcaaacctgccagtttccagcagcctctgggctctaatcaagctctaggacaggcaatgtcttcagcagctgcatacaggacgctcccctcaggtgctggaggaacatcccagttcacaaagcccccatctcttcctctggagccagagcctgcggtggaatcaagtccaactgaaacatcagaacaaataagagagaaataagaatagaatgaatgaccccaaaatagggttttcttgggcgaggatgtgctggattaggaaaggtgacatgacacaggcagagcagagtggcacccaccacagaatacagtgtgtgttattacgaggagccagcagttgagcctaaggtccttctacctacctggtattggcatttgaggtcggaaaccctctactgccccataagccaggaaaagtgaaaagagaacacagttcctttaagaactggcagcaaggcttgaggccttatgtatgtagctgagtcagcaaggtacatgatgctgtctgctttcaaaaggacttttctctcctagctgactgactccttccttagttcaaggaacagctgagacagacctctgctgagtagctctgtgatgacaaagccttggtttaactgaggtgatcctcaggttgtgaggtttattagtccccaaggcaaacacaaatattagattaataatccaactttaatagtatacatttaaaagaaaaaaaacaaaagccctggaagttgaggccaagcctgctgagtattgcagctgcatttgcccaaagggaatccagaacaagtccctccctgtattttgttcttgagaggggtcagtctagaagctagatcctatcaggatgaggagcagcagcccagggcttgtctggatcagcaccaacgattttaaagaaaaaaggaagagtttcttagatgagtaattgttattgaagatagtcagtgataaccactgaccagatgctatcaatacactatgtgtcctttttagaataaagattacatatcatcattcctttggggaaaattgttattcaggtataaaaacaagagatcataataaaaacctaaaagaacctatga

SEQ ID NO: 3138 - DNA, 2472 bp, Homo sapiens
  source 1..2472: mol_type = unassigned DNA
atggctcttaccgtagtgccatctttttctgtctcgggggtttggaagagaactcaatttcctgtatctactgagtctcaaaaaccccggcagaaaaaagctccagagtttcctattttggagaagcagaactggttgattcatcttcattatatccggaaagattatgaagcctgcaaggctgttatcaaagaacagcttcaagagactcagggattgtgtgaatatgctatctatgtccaagcattgatatttcgcctagaaggaaatatccaagaatccctagaactcttccagacatgtgcagttcttagtcctcagagtgctgataacctcaagcaggtggccagatctttatttcttttgggaaaacataaagctgccattgaagtatataatgaagcagctaaactcaaccagaaagattgggagatcagccataacctaggagtttgctacatatacctgaagcagttcaacaaggcacaagaccagttgcacaatgccctgaatcttaataggcacgatctgacttatataatgctggggaagatccacttgctggagggagacttggacaaggccattgaagtctacaagaaagcagtggagttctcaccagaaaatacagagcttcttacaactttaggattactctacttacagctcggcatttaccagaaggcatttgaacatcttggcaatgcactgacttatgaccctaccaactacaaggccatcttggcagcaggcagcatgatgcagacccacggggactttgatgttgccctcaccaaatacagagttgtggcttgtgctgttccagaaagtcctccactctggaataacattggaatgtgtttctttggcaagaagaaatatgtggcggccatcagctgcctgaaacgagccaactacttggcaccctttgattggaagattctgtataatttgggccttgtccatttgaccatgcagcagtatgcatcagcttttcattttctcagtgcggccatcaacttccagccaaagatgggggagctctacatgctcttggcagtggctctgaccaatctggaagatatagaaaatgccaagagagcctacgcagaagcagtccacctggataagtgtaaccctttagtaaacctgaactatgctgtgctgctgtacaaccagggcgagaagaagaacgccctggcccaatatcaggagatggagaagaaagtcagcctactcaaggacaatagctctctggaatttgactctgagatggtggagatggctcagaagttgggagctgctctccaggttggggaggcactggtctggaccaaaccagttaaagatcccaaatcaaagcaccagaccacttcaaccagcaaacctgccagtttccagcagcctctgggctctaatcaagctctaggacaggcaatgtcttcagcagctgcatacaggacgctcccctcaggtgctggaggaacatcccagttcacaaagcccccatctcttcctctggagccagagcctgcggtggaatcaagtccaactgaaacatcagaacaaataagagagaaataagaatagaatgaatgaccccaaaatagggttttcttgggcgaggatgtgctggattaggaaaggtgacatgacacaggcagagcagagtggcacccaccacagaatacagtgtgtgttattacgaggagccagcagttgagcctaaggtccttctacctacctggtattggcatttgaggtcggaaaccctctactgccccataagccaggaaaagtgaaaagagaacacagttcctttaagaactggcagcaaggcttgaggccttatgtatgtagctgagtcagcaaggtacatgatgctgtctgctttcaaaaggacttttctctcctagctgactgactccttccttagttcaaggaacagctgagacagacctctgctgagtagctctgtgatgacaaagccttggtttaactgaggtgatcctcaggttgtgaggtttattagtccccaaggcaaacacaaatattagattaataatccaactttaatagtatacatttaaaagaaaaaaaacaaaagccctggaagttgaggccaagcctgctgagtattgcagctgcatttgcccaaagggaatccagaacaagtccctccctgtattttgttcttgagaggggtcagtctagaagctagatcctatcaggatgaggagcagcagcccagggcttgtctggatcagcaccaacgattttaaagaaaaaaggaagagtttcttagatgagtaattgttattgaagatagtcagtgataaccactgaccagatgctatcaatacactatgtgtcctttttagaataaagattacatatcatcattcctttggggaaaattgttattcaggtataaaaacaagagatcataataaaaacctaaaagaacctatg

SEQ ID NO: 3139 - DNA, 1876 bp, Homo sapiens
  source 1..1876: mol_type = unassigned DNA
gcagcggtgggctgagctaaaatggctgaggagagagtcgcgacgagaactcaatttcctgtatctactgagtctcaaaaaccccggcagaaaaaagggggagttggagtgagcaatgatttggaataccagaaattcaacttatatatttacagctccagagtttcctattttggagaagcagaactggttgattcatcttcattatatccggaaagattatgaagcctgcaaggctgttatcaaagaacagcttcaagagactcagggattgtgtgaatatgctatctatgtccaagcattgatatttcgcctagaaggaaatatccaagaatccctagaactcttccagacatgtgcagttcttagtcctcagagtgctgataacctcaagcaggtggccagatctttatttcttttgggaaaacataaagctgccattgaagtatataatgaagcagctaaactcaaccagaaagattgggagatcagccataacctaggagtttgctacatatacctgaagcagttcaacaaggcacaagaccagttgcacaatgccctgaatcttaataggcacgatctgacttatataatgctggggaagatccacttgctggagggagacttggacaaggccattgaagtctacaagaaagcagtggagttctcaccagaaaatacagagcttcttacaactttaggattactctacttacagctcggcatttaccagaaggcatttgaacatcttggcaatgcactgacttatgaccctaccaactacaaggccatcttggcagcaggcagcatgatgcagacccacggggactttgatgttgccctcaccaaatacagagttgtggcttgtgctgttccagaaagtcctccactctggaataacattggaatgtgtttctttggcaagaagaaatatgtggcggccatcagctgcctgaaacgagccaactacttggcaccctttgattggaagattctgtataatttgggccttgtccatttgaccatgcagcagtatgcatcagcttttcattttctcagtgcggccatcaacttccagccaaagatgggggagctctacatgctcttggcagtggctctgaccaatctggaagatatagaaaatgccaagagagcctacgcagaagcagtccacctggataagtgtaaccctttagtaaacctgaactatgctgtgctgctgtacaaccagggcgagaagaagaacgccctggcccaatatcaggagatggagaagaaagtcagcctactcaaggacaatagctctctggaatttgactctgagatggtggagatggctcagaagttgggagctgctctccaggttggggaggcactggtctggaccaaaccagttaaagatcccaaatcaaagcaccagaccacttcaaccagcaaacctgccagtttccagcagcctctgggctctaatcaagctctaggacaggcaatgtcttcagcagctgcatacaggacgctcccctcaggtgctggaggaacatcccagttcacaaagcccccatctcttcctctggagccagagcctgcggtggaatcaagtccaactgaaacatcagaacaaataagagagaaataagaatagaatgaatgaccccaaaatagggttttcttgggcgaggatgtgctggattaggaaaggtgacatgacacaggcagagcagagtggcacccaccacagaatacagtgtgtgttattacgaggagccagcagttgagcctaaggtccttctacctacctggtattggcatttgaggtcggaaaccctctactgccccataagccaggaaaagtgaaaagagaacacagttcctt

SEQ ID NO: 3140 - DNA, 1974 bp, Homo sapiens
  source 1..1974: mol_type = unassigned DNA
aaaccgccgacttccggccgcgcagcggtgggctgagctaaaatggctgaggagagagtcgcgacgctccagagtttcctattttggagaagcagaactggttgattcatcttcattatatccggaaagattatgaagcctgcaaggctgttatcaaagaacagcttcaagagactcagggattgtgtgaatatgctatctatgtccaagcattgatatttcgcctagaaggaaatatccaagaatccctagaactcttccagacatgtgcagttcttagtcctcagagtgctgataacctcaagcaggtggccagatctttatttcttttgggaaaacataaagctgccattgaagtatataatgaagcagctaaactcaaccagaaagattggcctaggagatcagccataacctaggagtttgctacatatacctgaagcagttcaacaaggcacaagaccagttgcacaatgccctgaatcttaataggcacgatctgacttatataatgctggggaagatccacttgctggagggagacttggacaaggccattgaagtctacaagaaagcagtggagttctcaccagaaaatacagagcttcttacaactttaggattactctacttacagctcggcatttaccagaaggcatttgaacatcttggcaatgcactgacttatgaccctaccaactacaaggccatcttggcagcaggcagcatgatgcagacccacggggactttgatgttgccctcaccaaatacagagttgtggcttgtgctgttccagaaagtcctccactctggaataacattggaatgtgtttctttggcaagaagaaatatgtggcggccatcagctgcctgaaacgagccaactacttggcaccctttgattggaagattctgtataatttgggccttgtccatttgaccatgcagcagtatgcatcagcttttcattttctcagtgcggccatcaacttccagccaaagatgggggagctctacatgctcttggcagtggctctgaccaatctggaagatatagaaaatgccaagagagcctacgcagaagcagtccacctggataagtgtaaccctttagtaaacctgaactatgctgtgctgctgtacaaccagggcgagaagaagaacgccctggcccaatatcaggagatggagaagaaagtcagcctactcaaggacaatagctctctggaatttgactctgagatggtggagatggctcagaagttgggagctgctctccaggttggggaggcactggtctggaccaaaccagttaaagatcccaaatcaaagcaccagaccacttcaaccagcaaacctgccagtttccagcagcctctgggctctaatcaagctctaggacaggcaatgtcttcagcagctgcatacaggacgctcccctcaggtgctggaggaacatcccagttcacaaagcccccatctcttcctctggagccagagcctgcggtggaatcaagtccaactgaaacatcagaacaaataagagagaaataagaatagaatgaatgaccccaaaatagggttttcttgggcgaggatgtgctggattaggaaaggtgacatgacacaggcagagcagagtggcacccaccacagaatacagtgtgtgttattacgaggagccagcagttgagcctaaggtccttctacctacctggtattggcatttgaggtcggaaaccctctactgccccataagccaggaaaagtgaaaagagaacacagttcctttaagaactggcagcaaggcttgaggccttatgtatgtagctgagtcagcaaggtacatgatgctgtctgctttcaaaaggacttttctctcctagctgactgactccttccttagttcaaggaacagctgagacagacctctgctgagtagctctgtgatgacaaagccttggtttaactga

SEQ ID NO: 3141 - DNA, 3475 bp, Homo sapiens
  source 1..3475: mol_type = unassigned DNA
aaactgcagggattacaggcagaagccaccatgcccggctaataacctgaatctcttgacggtgaagagaaataaggagaggggtaaaatggctaaaggatgtctgtttggaggcaaggaaggtcgcccagaggtcaggcacgctccccttggcggacacagctgggcttctcagagactcctaaatcctgcctcgcatctcaaatcggcttaacgacgcgaaagagctgggcgacgcgcgcgcactctcgcggaagcttgagtctcggcgcccgccgtagacgtcgtgacagaggcggcccgttgccttggagccagagagacgcagctaggcctgcacggctgtggagagatcctgccacgggccttgttcaccatgtcggtgctggatgcgctttgggaggatcgggatgtccgtttcgacctgtccgcgcagcaaatgaaaacaagacctggagaagtccttattgattgtttagattccattgaagacaccaaaggaaataatggagatagaggtagactcttggtaacaaatttaagaattctctggcactctttggcattatcaagagtcaatgtttctgtcggttacaattgcatattgaatattacaacaaggactgctaactctaaattacgaggccaaactgaagctctctatatactaacaaaatgtaacagtactcgttttgaatttatatttacaaatttggttcctggaagccctagactttttacttctgtgatggcagtacacagagcttatgaaacttctaaaatgtatcgtgattttaaattaagaagtgcactaattcagaacaagcaactaagactgttgccacaagaacatgtatatgataaaataaatggagtttggaatttatccagtgatcagggcaatttaggaaccttttttattaccaatgtgagaattgtgtggcatgcaaatatgaatgatagttttaatgtcagtataccatatctgcaaattcgttcaataaagattagagattcaaaatttggtttagctcttgtcatagaaagctctcagcagagtggtggatatgttcttggctttaaaatagatcctgtggaaaaactacaagaatcagttaaggaaatcaattcacttcacaaagtctattctgccagtcccatatttggagttgattatgagatggaagaaaagccccagccgctcgaagctctgacagtcgaacaaattcaagatgatgtagaaatagactctgatggtcacacggatgcttttgtggcttattttgctgatggcaataagcaacaagatcgtgaacctgtattttcagaagaactggggcttgcaatagagaaattgaaggatggattcaccctacagggactttgggaagtaatgagttgattgaccttgagttgagatggatttctattaaagatatctctagtttaaagatactagtcacctgccataagtcatggaatagtttttatatttacagcttttatatttaaaacttgtaagagtttttttaatgattgaggaaaaagtcatttagaaaacttcagttttcggccagcgcgtcgagggaggggccagcgacacatggcctagtaaccgtccggccgcggcgctggcttaagccatggctgagggtagctggattcctcaggcccgggcgctcctacagcagtgcctgcacgcccggctgcaaattcgcccagccaatggggacgttgcggcccagtgggtggaggtccaaagaggactggtgatctacgtgtgctttttcaagggagctgataaagaacttcttcccaaaatggccgaagctggactgtactgctgccatctctggctcactgcaacctccctgcctgattctcctgcctcagcctgccgagtgcctgcgattacaggcgcgcgccgccacacctgactggttttcgtatttttttggtggagacggggtttcgctgtgttggccgggctggtctccagctcctaaccgcgagtgatccgccagcctcggcctcccgaggtgccgggattgcagacggagtctggttcacttagtgctcaatggtgcccaggctggagtgcagtggcgtgatctccgctcgctacaacctccacctcccagctgcctgccttggcctcccgaagtgccaagagtgcagcctctgcccggccgccaccccgtctgggaagtgaggagcgtctctgcctggctgcccattgtctgggacgtgagcagcccctctgcctggctgcccagtctggaaagtgaggagcgtctctgcccggccgccatcccatctaggaagtgaggagcgcctcttcccacccgccatcccatctaggaagtgaggagcttctctgcctggccgcccatcgtctgagatgtggggagcacctctgcccggccgcgaccccatttgggaggtgaggagcaactctgcccagccgccccgtctgagaagtgaggagaccctccgcctggcaaccgccccgtctgataagtaaggagcccctctgcccagcagccgccccgtctgagaagtgaggagcccctctgcccagcagccaccctgtctgggaagtgaggagcgtctccgcccggcagccacccagtccgggagggaggtgggggggtcagtcccccgtccggccagccgccccgtccgggaggtgaggggcgcctctgcccagctgcccctactgggaagtgaggagcccctctgccccgccagccaccccgtccgggagggaggtgggggggtcagccccccgcccggccagccgccccgtccgggagggaggtgggggatcagccccccgcccggctagccgccccgtccgggaggcgaggggcgcctctgcccggctgcccctactgggaagtgaggagcccctctgcccggccagccgccccgtccaggagggaggtgggggggtcagccccccgcccggccagccgcccggtccgggagggaggtgggggggtcagccccccgcccggccagccgccccgtccgggaggttaggggcgcctctgcccggccgcccctactgggaagtgaggagcccctctgcccggccaccaccccgtctgggaggtgtacccaacagctcattgagagcgggcgatgatgacagtggcggctttgtggagtggaggtggggggaaggtggggaaaagattgagaaatcggatggttgccgtgtctgtgtagaaagaagtagacatgggagacttttcattttgttctgtactaagaaaaattcttaccctaaaacttaaagtataataaaaaaaaaaaaacttcagttttctaaaaattatatttaaaattgtaatcaaaatgtacctagtttataaatgtttattttgtacttaatacctgtaaagtcttagttttcagacattaagtgactgtatcatgttcggtttaataaagaatttatgcagcacca

SEQ ID NO: 3142 - DNA, 3107 bp, Homo sapiens
  source 1..3107: mol_type = unassigned DNA
gccttggagccagagagacgcagctaggcctgcacggctgtggagagatcctgccacgggccttgttcaccatgtcggtgctggatgcgctttgggaggatcgggatgtccgtttcgacctgtccgcgcagcaaatgaaaacaagacctggagaagtccttattgattgtttagattccattgaagacaccaaaggaaataatggagatagaggtagactcttggtaacaaatttaagaattctctggcactctttggcattatcaagagtcaatgtttctgtcggttacaattgcatattgaatattacaacaaggactgctaactctaaattacgaggccaaactgaagctctctatatactaacaaaatgtaacagtactcgttttgaatttatatttacaaatttggttcctggaagccctagactttttacttctgtgatggcagtacacagagcttatgaaacttctaaaatgtatcgtgattttaaattaagaagtgcactaattcagaacaagcaactaagactgttgccacaagaacatgtatatgataaaataaatggagtttggaatttatccagtgatcagggcaatttaggaaccttttttattaccaatgtgagaattgtgtggcatgcaaatatgaatgatagttttaatgtcagtataccatatctgcaaattagtggtggatatgttcttggctttaaaatagatcctgtggaaaaactacaagaatcagttaaggaaatcaattcacttcacaaagtctattctgccagtcccatatttggagttgattatgagatggaagaaaagccccagccgctcgaagctctgacagtcgaacaaattcaagatgatgtagaaatagactctgatggtcacacggatgcttttgtggcttattttgctgatggcaataagcaacaagatcgtgaacctgtattttcagaagaactggggcttgcaatagagaaattgaaggatggattcaccctacagggactttgggaagtaatgagttgattgaccttgagttgagatggatttctattaaagatatctctagtttaaagatactagtcacctgccataagtcatggaatagtttttatatttacagcttttatatttaaaacttgtaagagtttttttaatgattgaggaaaaagtcatttagaaaacttcagttttcggccagcgcgtcgagggaggggccagcgacacatggcctagtaaccgtccggccgcggcgctggcttaagccatggctgagggtagctggattcctcaggcccgggcgctcctacagcagtgcctgcacgcccggctgcaaattcgcccagccaatggggacgttgcggcccagtgggtggaggtccaaagaggactggtgatctacgtgtgctttttcaagggagctgataaagaacttcttcccaaaatggccgaagctggactgtactgctgccatctctggctcactgcaacctccctgcctgattctcctgcctcagcctgccgagtgcctgcgattacaggcgcgcgccgccacacctgactggttttcgtatttttttggtggagacggggtttcgctgtgttggccgggctggtctccagctcctaaccgcgagtgatccgccagcctcggcctcccgaggtgccgggattgcagacggagtctggttcacttagtgctcaatggtgcccaggctggagtgcagtggcgtgatctccgctcgctacaacctccacctcccagctgcctgccttggcctcccgaagtgccaagagtgcagcctctgcccggccgccaccccgtctgggaagtgaggagcgtctctgcctggctgcccattgtctgggacgtgagcagcccctctgcctggctgcccagtctggaaagtgaggagcgtctctgcccggccgccatcccatctaggaagtgaggagcgcctcttcccacccgccatcccatctaggaagtgaggagcttctctgcctggccgcccatcgtctgagatgtggggagcacctctgcccggccgcgaccccatttgggaggtgaggagcaactctgcccagccgccccgtctgagaagtgaggagaccctccgcctggcaaccgccccgtctgataagtaaggagcccctctgcccagcagccgccccgtctgagaagtgaggagcccctctgcccagcagccaccctgtctgggaagtgaggagcgtctccgcccggcagccacccagtccgggagggaggtgggggggtcagtcccccgtccggccagccgccccgtccgggaggtgaggggcgcctctgcccagctgcccctactgggaagtgaggagcccctctgccccgccagccaccccgtccgggagggaggtgggggggtcagccccccgcccggccagccgccccgtccgggagggaggtgggggatcagccccccgcccggctagccgccccgtccgggaggcgaggggcgcctctgcccggctgcccctactgggaagtgaggagcccctctgcccggccagccgccccgtccaggagggaggtgggggggtcagccccccgcccggccagccgcccggtccgggagggaggtgggggggtcagccccccgcccggccagccgccccgtccgggaggttaggggcgcctctgcccggccgcccctactgggaagtgaggagcccctctgcccggccaccaccccgtctgggaggtgtacccaacagctcattgagagcgggcgatgatgacagtggcggctttgtggagtggaggtggggggaaggtggggaaaagattgagaaatcggatggttgccgtgtctgtgtagaaagaagtagacatgggagacttttcattttgttctgtactaagaaaaattcttaccctaaaacttaaagtataataaaaaaaaaaaaacttcagttttctaaaaattatatttaaaattgtaatcaaaatgtacctagtttataaatgtttattttgtacttaatacctgtaaagtcttagttttcagacattaagtgactgtatcatgttcggtttaataaagaatttatgcagcacca

SEQ ID NO: 3143 - DNA, 1935 bp, Homo sapiens
  source 1..1935: mol_type = unassigned DNA
gttgccttggagccagagagacgcagctaggcctgcacggctgtggagagatcctgccacgggccttgttcaccatgtcggtgctggatgcgctttgggaggatcgggatgtccgtttcgacctgtccgcgcagcaaatgaaaacaagacctggagaagtccttattgattgtttagattccattgaagacaccaaaggaaataatggagatagaggtagactcttggtaacaaatttaagaattctctggcactctttggcattatcaagagtcaatgtttctgtcggttacaattgcatattgaatattacaacaaggactgctaactctaaattacgaggccaaactgaagctctctatatactaacaaaatgtaacagtactcgttttgaatttatatttacaaatttggttcctggaagccctagactttttacttctgtgatggcagtacacagagcttatgaaacttctaaaatgtatcgtgattttaaattaagaagtgcactaattcagaacaagcaactaagactgttgccacaagaacatgtatatgataaaataaatggagtttggaatttatccagtgatcagggcaatttaggaaccttttttattaccaatgtgagaattgtgtggcatgcaaatatgaatgatagttttaatgtcagtataccatatctgcaaattcgttcaataaagattagagattcaaaatttggtttagctcttgtcatagaaagctctcagcagagtggtggatatgttcttggctttaaaatagatcctgtggaaaaactacaagaatcagttaaggaaatcaattcacttcacaaagtctattctgccagtcccatatttggagttgattatgagatggaagaaaagccccagccgctcgaagctctgacagtcgaacaaattcaagatgatgtagaaatagactctgatggtcacacggatgcttttgtggcttattttgctgatggcaataagctcgatagcatagcatctgaatgggttggacttccacctctgccttcagccaggtgtctcttcggtctgggagaggtggatgataaaatctatgtagttgcaggcaaagaccttcaaacagaggcttcgctggattcagtattatgctatgatcctgtggctgcaaaatggaacgaagtaaaaaaactccctatcaaagtctatggccataatgtgatttcacataaagggatgatatattgtctaggaggaaagacagatgacaaaaaatgtacaaacagggtgtttatcttcaaccccaaaaaaggagattggaaagatctggctccaatgaaaattcctcgttccatgtttggagtagcagtccataaaggcaaaattgtgattgcaggaggtgtcactgaagatggtctttcagcttcagttgaagcttttgaccttacaacaaataaatgggatgtaatgaccgaatttccccaagaaagaagctccatcagtttggtcagcctggctggatctctgtatgcaattggtggttttgctatgattcaactggagtctaaagaatttgcacccactgaagtcaatgacatatggaagtatgaagatgataaaaaagaatgggctgggatgttgaaggaaatacgttatgcttcaggagctagttgcctagcaacacgtttaaatctcttcaaactgtctaaactgtgaacaaggtgacaaaacataatagattgggaggtggtttgtttggtgaatggggctttaatttattctgttttttaaaagcttgtacagacactcatgtagaaattattcaagaagttattgtctaagagatgagcagtaggtaagaaaacctcagtcattgactcttcaatgtaatgatcagagtttaaaaccattttctaataataaattaaatcttcagttgaac

SEQ ID NO: 3144 - DNA, 3752 bp, Homo sapiens
  source 1..3752: mol_type = unassigned DNA
gacgtcacgcaggacgccactgccctgtcgccccgcctgtgcagcccaggacctaggcgcggtagctggggctggcttttgaggggcgcgggcagccttctgactgggtcggaggcctgcgggcccgaagcctctgtccctcctgttcttgtccggcgctgcttagcccctccgcgtagtcatcatggatctgattttaaaccgaatggattatctgcaggtgggagtaacatctcagaagactatgaagctaattcctgcctcaagacacagagctacacaaaaggtggttattggagatcatgatggggtagttatgtgctttggcatgaagaaaggagaagcagcagcagtgttcaagactttacccgggccgaagattgcaaggctggaactgggaggggttatcaacacacctcaggagaaaatttttattgctgcagcatctgagattagaggcttcacaaaaagaggaaaacagttcctctcctttgaaacaaacctcactgaaagcattaaagctatgcacatatctggctcagacctctttctcagtgcaagttacatctataaccattattgtgactgcaaagaccaacattattacctttctggggataaaatcaatgatgtgatctgccttccagtggaaagattatctcgtatcacacctgtattggcctgccaggacagagtgctcagagttttacagggatctgatgtgatgtatgcagttgaagttcctggaccccctactgtcttagcactacacaatggaaatggcggtgactctggagaagaccttttgtttgggacatcagacggaaaacttgcgcttatacagattactacatccaaaccagtacgcaagtgggaaattcaaaatgagaaaaagagaggaggtattttgtgtattgacagctttgacattgtgggtgatggggttaaagatttacttgttgggagagatgacggaatggtggaagtgtatagttttgataatgcaaatgaacctgttctacgatttgatcagatgttgtctgaaagcgtcacatctatccagggtggttgtgtaggaaaagacagctatgatgaaatcgtggtgtccacatattcaggctgggttacaggtctgacaacagagcccattcataaggaaagtggaccaggagaagaactaaaaattaatcaggagatgcagaataaaatttcttccttacggaatgagttggaacatttgcagtataaggtattgcaggaaagagagaattatcaacagtcttctcaatcaagcaaagcaaaatcagcagtaccttcctttggtataaatgataaatttacactaaataaagatgatgccagttacagccttatcttagaggtacagactgcaatagataatgtcttaatacagagtgatgttccaatagatttacttgatgtggataaaaattctgctgttgttagctttagcagctgtgattctgagtcaaacgacaacttccttcttgccacttatcggtgccaggcagatactacaaggctggaactcaagattcgctcaattgaaggccagtatggcacactacaagcatatgtgactccaagaattcaacccaaaacctgtcaggtccgccagtaccacatcaaacctctttcactccatcaaagaactcactttattgatcatgacagacccatgaatacactgaccctaacaggccagttcagttttgctgaagttcactcctgggtggttttttgtctgcctgaagttccagaaaaacctccagcaggagaatgtgtgacattttactttcagaacacctttctagatacacaacttgaaagtacctacagaaaaggagagggagtttttaaatctgacaacatttctactatctccatcctaaaagatgtgctttctaaagaagctacaaaaaggaaaattaacctcaacatatcatacgagataaatgaagtatcagtcaaacacactttaaagctaatccacccaaagctggagtaccagttgcttttggctaagaaagtgcagttaattgatgctttaaaagaattacagattcatgagggaaatacgaactttctgataccagaatatcactgtattctagaagaggcagatcacctacaggaagaatacaaaaagcaacctgcacatcttgaaagactctatggcatgatcactgatcttttcatagataaatttaagtttaaaggcaccaatgtaaaaactaaagtaccccttctattggaaattctggacagttatgaccaaaatgcattgatttcattcttcgatgcagcatgacatacaaataaggtaaagtcccaaagaagtggtctgtttaaatgaaaaatgttaaaagagaattagaagttaactgtgtatgtactttaatttcaaatgcttttttatatctaaaaatatttgagatataatggctttttaaagtaatgcttctatttcttttgacaaattgaactttctaaaactaaaagagtctttttatttttaaaacacaagtagaatgatttaaataggattttaatgaatttttggcaagtggctgttttaatttttaaattgagaagtaatatgtggaaaattaaaatatattcaaatgtattacaaggtacataaacacataaacatgtagaccgctttataggcttcaaaatgtatttttatatattaccttatttgatcttcacaactgttgtaaaatttgtcaaatcatataagaaaactgattctcagtgaaattttgtgattaagaggacatgctaatattttgtaaagctgggaccagaacccaagtactggtacttgctttgtgtcctggttactatgtatgttgccagctagtggaaataacctaccaattgttttttctaggagataggattgatttgcaactgatattccttttgcttggtagtgttttatgactctgctgcagtttgtggaaatgctggacttggctcagtgctataaattgtagccaggaaataagaagagcttacacagagtcgggggatcttaattagacatgctgtaaccagtggagctattcagcgtgcttcaagtgaagagtgcagaaatagtgatgccatcttagattttcctacactagtatcttctagatctctttttatcatatatgacattaaggctacagaagttttgtgcattaatcttaattcatatttattaatttcaagggaatattgaaaggttttaaaatggcatacagataatggaaaataagctttatgtttcaagaagggcagactcacgaattttttagaaaacagtgcttcttaatgatatgctattatacttattagttatgtgcaagctttgtatattcttatatttatatataaatataaaaatttgttaaaggcacgtatagttaagagagttttattttaataaggtcatattgtttttactatgtttaaaaaactttacttctgaaaggaacataattatatctaggtcactagaacgtcattgtgttttttgttggttgccacagcttggggaaaaatagaaaaaaattaatgactgtatttgaatattttgtaatgcactgctatttattatatatatcaacagtagttcaaggtgccatcttaaattaattgcatcttcattaggaaaaataaaaagcataaaacacaatttctggttactatgaataaacgcctaaatgttaagatga

SEQ ID NO: 3145 - DNA, 2570 bp, Homo sapiens
  source 1..2570: mol_type = unassigned DNA
aggacctaggcgcggtagctggggctggcttttgaggggcgcgggcagccttctgactgggtcggaggcctgcgggcccgaagcctctgtccctcctgttcttgtccggcgctgcttagcccctccgcgtagtcatcatggatctgattttaaaccgaatggattatctgcaggtgggagtaacatctcagaagactatgaagctaattcctgcctcaagacacagagctacacaaaaggtggttattggagatcatgatggggtagttatgtgctttggcatgaagaaaggagaagcagcagcagtgttcaagactttacccgggccgaagattgcaaggctggaactgggaggggttatcaacacacctcaggagaaaatttttattgctgcagcatctgagattagaggcttcacaaaaagaggaaaacagttcctctcctttgaaacaaacctcactgaaagcattaaagctatgcacatatctggctcagacctctttctcagtgcaagttacatctataaccattattgtgactgcaaagaccaacattattacctttctggggataaaatcaatgatgtgatctgccttccagtggaaagattatctcgtatcacacctgtattggcctgccaggacagagtgctcagagttttacagggatctgatgtgatgtatgcagttgaagttcctggaccccctactgtcttagcactacacaatggaaatggcggtgactctggagaagaccttttgtttgggacatcagacggaaaacttgcgcttatacagattactacatccaaaccagtacgcaagtgggaaattcaaaatgagaaaaagagaggaggtattttgtgtattgacagctttgacattgtgggtgatggggttaaagatttacttgttgggagagatgacggaatggtggaagtgtatagttttgataatgcaaatgaacctgttctacgatttgatcagatgttgtctgaaagcgtcacatctatccagggtggttgtgtaggaaaagacagctatgatgaaatcgtggtgtccacatattcaggctgggttacaggtctgacaacagagcccattcataaggaaagtggaccaggagaagaactaaaaattaatcaggagatgcagaataaaatttcttccttacggaatgagttggaacatttgcagtataaggtattgcaggaaagagagaattatcaacagtcttctcaatcaagcaaagcaaaatcagcagtaccttcctttggtataaatgataaatttacactaaataaagatgatgccagttacagccttatcttagaggtacagactgcaatagataatgtcttaatacagagtgatgttccaatagatttacttgatgtggataaaaattctgctgttgttagctttagcagctgtgattctgagtcaaacgacaacttccttcttgccacttatcggtgccaggcagatactacaaggctggaactcaagattcgctcaattgaaggccagtatggcacactacaagcatatgtgactccaagaattcaacccaaaacctgtcaggtccgccagtaccacatcaaacctctttcactccatcaaagaactcactttattgatcatgacagacccatgaatacactgaccctaacaggccagttcagttttgctgaagttcactcctgggtggttttttgtctgcctgaagttccagaaaaacctccagcaggagaatgtgtgacattttactttcagaacacctttctagatacacaacttgaaagtacctacagaaaaggagagggagtttttaaatctgacaacatttctactatctccatcctaaaagatgtgctttctaaagaagctacaaaaaggaaaattaacctcaacatatcatacgagataaatgaagtatcagtcaaacacactttaaagctaatccacccaaagctggagtaccagttgcttttggctaagaaagtgcagttaattgatgctttaaaagaattacagattcatgagggaaatacgaactttctgataccagaatatcactgtattctagaagaggcagatcacctacaggaagaatacaaaaagcaacctgcacatcttgaaagactctatggttagtggaccattctagaataccttgccatatttcttttcaactggctatttcccaaggatcatgtaagagaagctgggcagaaagataaaaagattacatcagtcatgattcatgaaccagtcatgaatcagttgacaacaaatttattgcacagaatatttctgtattttgtcaagctacttttaatatttaattcttttacttgataaaatgcaagtatattaagaaataagtatactgtgatgaattaatctatatatatgaacaaacctggtataaaatgaatgtaatctatgaacctttagagcttagactgtatttcacacaaataattgtcatgttttgttgctattgtgaattataaaaatgcagcatttaaaatttttaaggcaaaatttaataaaggatatacagta

SEQ ID NO: 3146 - DNA, 734 bp, Homo sapiens
  source 1..734: mol_type = unassigned DNA
gatgtgctttctaaagaagctacaaaaaggaaaattaacctcaacatatcatacgagataaatgaagtatcagtcaaacacactttaaagctaatccacccaaagctggagtaccagttgcttttggctaagaaagtgcagttaattgatgctttaaaagaattacagattcatgagggaaatacgaactttctgataccagaatatcactgtattctagaagaggcagatcacctacaggaagaatacaaaaagcaacctgcacatcttgaaagactctatggcatgatcactgatcttttcatagataaatttaagtttaaaggcaccaatgtaaaaactaaagtaccccttctattggaaattctggacagttatgaccaaaatgcattgatttcattcttcgatgcagcatgacatacaaataagtgttttatgactctgctgcagtttgtggaaatgctggacttggctcagtgctataaattgtagccaggaaataagaagagcttacacagagtcgggggatcttaattagacatgctgtaaccagtggagctattcagcgtgcttcaagtgaagagtgcagaaatagtgatgccatcttagattttcctacactagtatcttctagatctctttttatcatatatgacattaaggctacagaagttttgtgcattaatcttaattcatatttattaatttcaagggaatattgaaaggttttaaaa

SEQ ID NO: 3147 - DNA, 4027 bp, Homo sapiens
  source 1..4027: mol_type = unassigned DNA
acctgcgcagtggcgtccgttgtaagtgctatgacaacagggcgaagatggctcagagttaggctggagaggggaggtgtcccttccgctgcggccgtcgggtttctgctacatcccattcaccgcctcctccatcctttcctcctcggtgtgagcagcaggacttgcatttgttctcgcctgcctagtgtcttccaagggatagatgccgtttcctctgctggtctctgggggtgacggggggcgcaggggagcttcttgggggaatcactccaactctgtggagctggtggtgctgcctggtggggctctctctttgcccgggacgtggaacaactttcagctggaggacgagagggaatagtgaagctaaaggttgcttttctctgcaccgtccgttcttgctccctctgctccatcactgggaccttgtcaggcgttcataaagcaaaatttgccgaacgagggttcgcagaaaggtggggcagagctcatctgacgtggcatcagtgtgaaagaaaatgtctttatttaaagcccgtgattggtggtctactattctgggagataaagaagaatttgatcaaggctgtttgtgtctggctaatgttgacaatagtggaaatggacaagataaaataattgtgggtagctttatgggatacctaaggatctttagcccccatcctgcaaaaacaggagatggagctcaagccgaagatttgcttctagaagtggatctacgagatccagtacttcaagtggaagtaggaaagtttgtttcaggtaccgaaatgctacatttggctgtgttacattctagaaaactttgtgtctactctgtctcaggaaccttgggtaatgtggaacatgggaaccaatgtcagatgaaattgatgtatgaacataatcttcagagaacagcctgcaatatgacctatggatcatttggtggtgtaaaaggtcgagatttaatttgcatccagtctatggatgggatgctgatggtatttgagcaggagagctatgcttttggaagatttctccctggctttcttctgcctggtcctcttgcctacagttcccgtacagattccttccttactgtctcttcctgccaacaagtggaaagttataagtaccaggtacttgcttttgcaacagatgcagataaaaggcaggagactgaacagcaaaaacttggttctggaaaaagactagttgtggattggactctaaatattggagagcaagcccttgacatatgtattgtctctttcaatcagtcggcatcctctgtttttgttcttggtgagagaaactttttttgccttaaggataatggacaaattcgattcatgaagaagcttgattggagcccaagttgttttctgccatattgctcagtttctgaaggaacaataaatactttgattggaaatcataataacatgctgcatatttatcaagatgtgacactgaagtgggccacccaacttccccacattcctgtagcagtaagagtgggctgtttgcatgatttaaagggagtgatagtcactctgagtgatgatggtcacttgcagtgttcatacctggggacagatccttctctgttccaagctccaaacgttcaatctcgagaactaaactatgatgaacttgatgtagaaatgaaagaacttcagaaaatcatcaaagatgttaacaaatcacaaggtgtttggcccatgactgagagagaagatgacttgaacgtttctgtcgtggtttctcctaactttgattcagtttctcaagcgaccgatgttgaggtgggaactgaccttgtcccttctgtcacggtgaaggtcacactgcagaacagagtgatattgcaaaaagccaaattatcagtctacgtgcaaccaccattagaattgacttgtgatcagttcacctttgaatttatgacaccagatttgactagaacagtaagcttttctgtttatctgaaaagaagttatacaccatcagaattggaaggaaatgctgttgtttcttattccagaccaacagatcgaaatcctgatggcattccgcgagttatccaatgtaaatttagacttcccctaaagttaatttgcctaccaggtcagccttcaaaaactgcaagccacaaaattactattgataccaacaaatctccagtcagtcttcttagtctcttcccaggttttgccagtcagtcagatgatgatcaggtgaatgtaatgggttttcacttcttaggaggtgctcgaattactgttcttgcttccaaaacttctcaacgatatcgcattcagagtgaacaatttgaagatctttggctcataaccaatgagcttattcttcgccttcaagaatattttgaaaaacagggagtcaaagattttgcatgttctttttcgggatctataccccttcaagaatattttgagttgattgatcatcattttgagctacggataaatggtgaaaaattagaagaactcttatctgagagagctgtacaatttcgggccattcaacgccggctactagcaagattcaaagataaaactcctgcccctcttcaacacctggacaccttgttagatggaacctacaagcaggtaattgctctagcagatgcagtggaggaaaaccaaggcaatctgttccagtcattcaccaggctgaagagtgccacccatttggtgattctgctgatcgcgctgtggcagaagcttagtgctgaccaggttgctattctggaagcggcatttctgccgctacaagaagacactcaagaattgggctgggaagaaacggtggatgccgccatttcccacctgttgaagacttgcctgtcgaagagttctaaggagcaggctttgaacctcaacagccagctgaacatacccaaagacacaagccaactgaagaaacatatcaccttgctctgcgatagattatccaaaggtggccgtctctgcctaagtaccgatgcagcagccccacagaccatggtcatgccaggtggttgtactacaatcccagagtcagacctagaagaaagatcagtagaacaagactctacagaactgtttaccaaccacagacatctcactgcagagacacccaggcctgaagtttcacccctccaaggagtctcggaataattcaagtagagttgtttggttgagaggaacatccccatctcaaggccgaacctgtgtgaacctcatgccaagcacagatatagggctggcgcaggtgcttcctaaagctcaccttcctggagatgacatgcatagaaagaggggttgggactttttacttcactaggagaacttgtaacaccatggggaagtcagctgaaacttgtcttgttttgccaggaaaggaagtagttgcctttggtcatccatctgctaatagtcacagaatacagtgaaatgacatagttttgggttagattttataatgcaaagattcagatccaaaataatttcataccccattttttcacagaattcttatatagtaaatgtatcaagtttaataaagcatctcattgtcaaataatatcttggattttatttataattagagggatttatgagtgattgctctacattatttcttcaaaggaaaggaaaggaattgaagactttgctactctctggtaagacttgaatgtgattattttataaataaaagaaccactatgaaactttcatgtgatttgttctattaagctaaacgtggaagaagggaagttttctagtattgtatgaaaatgtttaaatattttcaaggaagctagtacattaacatccccttttcattaccccattgggtggcaccttttaaaaatccaggttattaaaggattcacactttattacagttaaaatttaaggtttttatgtgtaagaagtgaaagaaactttgctaatttcaagttcgaattacagttgtgagattgatttatttaaataaaaatatgcctttgccagtt

SEQ ID NO: 3148 - DNA, 3899 bp, Homo sapiens
  source 1..3899: mol_type = unassigned DNA
agtggcgtccgttgtaagtgctatgacaacagggcgaagatggctcagagttaggctggagaggggaggtgtcccttccgctgcggccgtcgggtttctgctacatcccattcaccgcctcctccatcctttcctcctcggtgtgagcagcaggacttgcatttgttctcgcctgcctagtgtcttccaagggatagatgccgtttcctctgctggtctctgggggtgacggggggcgcaggggagcttcttgggggaatcactccaactctgtggagctggtggtgctgcctggtggggctctctctttgcccgggacgtggaacaactttcagctggaggacgagagggaatagtgaagctaaaggttgcttttctctgcaccgtccgttcttgctccctctgctccatcactgggaccttgtcaggcgttcataaagcaaaatttgccgaacgagggttcgcagaaaggtggggcagagctcatctgacgtggcatcagtgtgaaagaaaatgtctttatttaaagcccgtgattggtggtctactattctgggagataaagaagaatttgatcaaggctgtttgtgtctggctaatgttgacaatagtggaaatggacaagataaaataattgtgggtagctttatgggatacctaaggatctttagcccccatcctgcaaaaacaggagatggagctcaagccgaagatttgcttctagaagtggatctacgagatccagtacttcaagtggaagtaggaaagtttgtttcaggtaccgaaatgctacatttggctgtgttacattctagaaaactttgtgtctactctgtctcaggaaccttgggtaatgtggaacatgggaaccaatgtcagatgaaattgatgtatgaacataatcttcagagaacagcctgcaatatgacctatggatcatttggtggtgtaaaaggtcgagatttaatttgcatccagtctatggatgggatgctgatggtatttgagcaggagagctatgcttttggaagatttctccctggctttcttctgcctggtcctcttgcctacagttcccgtacagattccttccttactgtctcttcctgccaacaagtggaaagttataagtaccaggtacttgcttttgcaacagatgcagataaaaggcaggagactgaacagcaaaaacttggttctggaaaaagactagttgtggattggactctaaatattggagagcaagcccttgacatatgtattgtctctttcaatcagtcggcatcctctgtttttgttcttggtgagagaaactttttttgccttaaggataatggacaaattcgattcatgaagaagcttgattggagcccaagttgttttctgccatattgctcagtttctgaaggaacaataaatactttgattggaaatcataataacatgctgcatatttatcaagatgtgacactgaagtgggccacccaacttccccacattcctgtagcagtaagagtgggctgtttgcatgatttaaagggagtgatagtcactctgagtgatgatggtcacttgcagtgttcatacctggggacagatccttctctgttccaagctccaaacgttcaatctcgagaactaaactatgatgaacttgatgtagaaatgaaagaacttcagaaaatcatcaaagatgttaacaaatcacaaggtgtttggcccatgactgagagagaagatgacttgaacgtttctgtcgtggtttctcctaactttgattcagtttctcaagcgaccgatgttgaggtgggaactgaccttgtcccttctgtcacggtgaaggtcacactgcagaacagagtgatattgcaaaaagccaaattatcagtctacgtgcaaccaccattagaattgacttgtgatcagttcacctttgaatttatgagcattccgcgagttatccaatgtaaatttagacttcccctaaagttaatttgcctaccaggtcagccttcaaaaactgcaagccacaaaattactattgataccaacaaatctccagtcagtcttcttagtctcttcccaggttttgccagtcagtcagatgatgatcaggtgaatgtaatgggttttcacttcttaggaggtgctcgaattactgttcttgcttccaaaacttctcaacgatatcgcattcagagtgaacaatttgaagatctttggctcataaccaatgagcttattcttcgccttcaagaatattttgaaaaacagggagtcaaagattttgcatgttctttttcgggatctataccccttcaagaatattttgagttgattgatcatcattttgagctacggataaatggtgaaaaattagaagaactcttatctgagagagctgtacaatttcgggccattcaacgccggctactagcaagattcaaagataaaactcctgcccctcttcaacacctggacaccttgttagatggaacctacaagcaggtaattgctctagcagatgcagtggaggaaaaccaaggcaatctgttccagtcattcaccaggctgaagagtgccacccatttggtgattctgctgatcgcgctgtggcagaagcttagtgctgaccaggttgctattctggaagcggcatttctgccgctacaagaagacactcaagaattgggctgggaagaaacggtggatgccgccatttcccacctgttgaagacttgcctgtcgaagagttctaaggagcaggctttgaacctcaacagccagctgaacatacccaaagacacaagccaactgaagaaacatatcaccttgctctgcgatagattatccaaaggtggccgtctctgcctaagtaccgatgcagcagccccacagaccatggtcatgccaggtggttgtactacaatcccagagtcagacctagaagaaagatcagtagaacaagactctacagaactgtttaccaaccacagacatctcactgcagagacacccaggcctgaagtttcacccctccaaggagtctcggaataattcaagtagagttgtttggttgagaggaacatccccatctcaaggccgaacctgtgtgaacctcatgccaagcacagatatagggctggcgcaggtgcttcctaaagctcaccttcctggagatgacatgcatagaaagaggggttgggactttttacttcactaggagaacttgtaacaccatggggaagtcagctgaaacttgtcttgttttgccaggaaaggaagtagttgcctttggtcatccatctgctaatagtcacagaatacagtgaaatgacatagttttgggttagattttataatgcaaagattcagatccaaaataatttcataccccattttttcacagaattcttatatagtaaatgtatcaagtttaataaagcatctcattgtcaaataatatcttggattttatttataattagagggatttatgagtgattgctctacattatttcttcaaaggaaaggaaaggaattgaagactttgctactctctggtaagacttgaatgtgattattttataaataaaagaaccactatgaaactttcatgtgatttgttctattaagctaaacgtggaagaagggaagttttctagtattgtatgaaaatgtttaaatattttcaaggaagctagtacattaacatccccttttcattaccccattgggtggcaccttttaaaaatccaggttattaaaggattcacactttattacagttaaaatttaaggtttttatgtgtaagaagtgaaagaaactttgctaatttcaagttcgaattacagttgtgagattgatttatttaaataaaaatatgcctttgccagtt

SEQ ID NO: 3149 - DNA, 3914 bp, Homo sapiens
  source 1..3914: mol_type = unassigned DNA
agtggcgtccgttgtaagtgctatgacaacagggcgaagatggctcagagttaggctggagaggggaggtgtcccttccgctgcggccgtcgggtttctgctacatcccattcaccgcctcctccatcctttcctcctcggtgtgagcagcaggacttgcatttgttctcgcctgcctagtgtcttccaagggatagatgccgtttcctctgctggtctctgggggtgacggggggcgcaggggagcttcttgggggaatcactccaactctgtggagctggtggtgctgcctggtggggctctctctttgcccgggacgtggaacaactttcagctggaggacgagagggaatagtgaagctaaaggttgcttttctctgcaccgtccgttcttgctccctctgctccatcactgggaccttgtcaggcgttcataaagcaaaatttgccgaacgagggttcgcagaaaggtggggcagagctcatctgacgtggcatcagtgtgaaagaaaatgtctttatttaaagcccgtgattggtggtctactattctgggagataaagaagaatttgatcaaggctgtttgtgtctggctaatgttgacaatagtggaaatggacaagataaaataattgtgggtagctttatgggatacctaaggatctttagcccccatcctgcaaaaacaggagatggagctcaagccgaagatttgcttctagaagtggatctacgagatccagtacttcaagtggaagtaggaaagtttgtttcaggtaccgaaatgctacatttggctgtgttacattctagaaaactttgtgtctactctgtctcaggaaccttgggtaatgtggaacatgggaaccaatgtcagatgaaattgatgtatgaacataatcttcagagaacagcctgcaatatgacctatggatcatttggtggtgtaaaaggtcgagatttaatttgcatccagtctatggatgggatgctgatggtatttgagcaggagagctatgcttttggaagatttctccctggctttcttctgcctggtcctcttgcctacagttcccgtacagattccttccttactgtctcttcctgccaacaagtggaaagttataagtaccaggtacttgcttttgcaacagatgcagataaaaggcaggagactgaacagcaaaaacttggttctggaaaaagactagttgtggattggactctaaatattggagagcaagcccttgacatatgtattgtctctttcaatcagtcggcatcctctgtttttgttcttggtgagagaaactttttttgccttaaggataatggacaaattcgattcatgaagaagcttgattggagcccaagttgttttctgccatattgctcagtttctgaaggaacaataaatactttgattggaaatcataataacatgctgcatatttatcaagatgtgacactgaagtgggccacccaacttccccacattcctgtagcagtaagagtgggctgtttgcatgatttaaagggagtgatagtcactctgagtgatgatggtcacttgcagtgttcatacctggggacagatccttctctgttccaagctccaaacgttcaatctcgagaactaaactatgatgaacttgatgtagaaatgaaagaacttcagaaaatcatcaaagatgttaacaaatcacaaggtgtttggcccatgactgagagagaagatgacttgaacgtttctgtcgtggtttctcctaactttgattcagtttctcaagcgaccgatgttgaggtgggaactgaccttgtcccttctgtcacggtgaaggtcacactgcagaacagagtgatattgcaaaaagccaaattatcagtctacgtgcaaccaccattagaattgacttgtgatcagttcacctttgaatttatgagtctgaatgttttaggcattccgcgagttatccaatgtaaatttagacttcccctaaagttaatttgcctaccaggtcagccttcaaaaactgcaagccacaaaattactattgataccaacaaatctccagtcagtcttcttagtctcttcccaggttttgccagtcagtcagatgatgatcaggtgaatgtaatgggttttcacttcttaggaggtgctcgaattactgttcttgcttccaaaacttctcaacgatatcgcattcagagtgaacaatttgaagatctttggctcataaccaatgagcttattcttcgccttcaagaatattttgaaaaacagggagtcaaagattttgcatgttctttttcgggatctataccccttcaagaatattttgagttgattgatcatcattttgagctacggataaatggtgaaaaattagaagaactcttatctgagagagctgtacaatttcgggccattcaacgccggctactagcaagattcaaagataaaactcctgcccctcttcaacacctggacaccttgttagatggaacctacaagcaggtaattgctctagcagatgcagtggaggaaaaccaaggcaatctgttccagtcattcaccaggctgaagagtgccacccatttggtgattctgctgatcgcgctgtggcagaagcttagtgctgaccaggttgctattctggaagcggcatttctgccgctacaagaagacactcaagaattgggctgggaagaaacggtggatgccgccatttcccacctgttgaagacttgcctgtcgaagagttctaaggagcaggctttgaacctcaacagccagctgaacatacccaaagacacaagccaactgaagaaacatatcaccttgctctgcgatagattatccaaaggtggccgtctctgcctaagtaccgatgcagcagccccacagaccatggtcatgccaggtggttgtactacaatcccagagtcagacctagaagaaagatcagtagaacaagactctacagaactgtttaccaaccacagacatctcactgcagagacacccaggcctgaagtttcacccctccaaggagtctcggaataattcaagtagagttgtttggttgagaggaacatccccatctcaaggccgaacctgtgtgaacctcatgccaagcacagatatagggctggcgcaggtgcttcctaaagctcaccttcctggagatgacatgcatagaaagaggggttgggactttttacttcactaggagaacttgtaacaccatggggaagtcagctgaaacttgtcttgttttgccaggaaaggaagtagttgcctttggtcatccatctgctaatagtcacagaatacagtgaaatgacatagttttgggttagattttataatgcaaagattcagatccaaaataatttcataccccattttttcacagaattcttatatagtaaatgtatcaagtttaataaagcatctcattgtcaaataatatcttggattttatttataattagagggatttatgagtgattgctctacattatttcttcaaaggaaaggaaaggaattgaagactttgctactctctggtaagacttgaatgtgattattttataaataaaagaaccactatgaaactttcatgtgatttgttctattaagctaaacgtggaagaagggaagttttctagtattgtatgaaaatgtttaaatattttcaaggaagctagtacattaacatccccttttcattaccccattgggtggcaccttttaaaaatccaggttattaaaggattcacactttattacagttaaaatttaaggtttttatgtgtaagaagtgaaagaaactttgctaatttcaagttcgaattacagttgtgagattgatttatttaaataaaaatatgcctttgccagtt

SEQ ID NO: 3150 - DNA, 4004 bp, Homo sapiens
  source 1..4004: mol_type = unassigned DNA
agtggcgtccgttgtaagtgctatgacaacagggcgaagatggctcagagttaggctggagaggggaggtgtcccttccgctgcggccgtcgggtttctgctacatcccattcaccgcctcctccatcctttcctcctcggtgtgagcagcaggacttgcatttgttctcgcctgcctagtgtcttccaagggatagatgccgtttcctctgctggtctctgggggtgacggggggcgcaggggagcttcttgggggaatcactccaactctgtggagctggtggtgctgcctggtggggctctctctttgcccgggacgtggaacaactttcagctggaggacgagagggaatagtgaagctaaaggttgcttttctctgcaccgtccgttcttgctccctctgctccatcactgggaccttgtcaggcgttcataaagcaaaatttgccgaacgagggttcgcagaaaggtggggcagagctcatctgacgtggcatcagtgtgaaagaaaatgtctttatttaaagcccgtgattggtggtctactattctgggagataaagaagaatttgatcaaggctgtttgtgtctggctaatgttgacaatagtggaaatggacaagataaaataattgtgggtagctttatgggatacctaaggatctttagcccccatcctgcaaaaacaggagatggagctcaagccgaagatttgcttctagaagtggatctacgagatccagtacttcaagtggaagtaggaaagtttgtttcaggtaccgaaatgctacatttggctgtgttacattctagaaaactttgtgtctactctgtctcaggaaccttgggtaatgtggaacatgggaaccaatgtcagatgaaattgatgtatgaacataatcttcagagaacagcctgcaatatgacctatggatcatttggtggtgtaaaaggtcgagatttaatttgcatccagtctatggatgggatgctgatggtatttgagcaggagagctatgcttttggaagatttctccctggctttcttctgcctggtcctcttgcctacagttcccgtacagattccttccttactgtctcttcctgccaacaagtggaaagttataagtaccaggtacttgcttttgcaacagatgcagataaaaggcaggagactgaacagcaaaaacttggttctggaaaaagactagttgtggattggactctaaatattggagagcaagcccttgacatatgtattgtctctttcaatcagtcggcatcctctgtttttgttcttggtgagagaaactttttttgccttaaggataatggacaaattcgattcatgaagaagcttgattggagcccaagttgttttctgccatattgctcagtttctgaaggaacaataaatactttgattggaaatcataataacatgctgcatatttatcaagatgtgacactgaagtgggccacccaacttccccacattcctgtagcagtaagagtgggctgtttgcatgatttaaagggagtgatagtcactctgagtgatgatggtcacttgcagtgttcatacctggggacagatccttctctgttccaagctccaaacgttcaatctcgagaactaaactatgatgaacttgatgtagaaatgaaagaacttcagaaaatcatcaaagatgttaacaaatcacaaggtgtttggcccatgactgagagagaagatgacttgaacgtttctgtcgtggtttctcctaactttgattcagtttctcaagcgaccgatgttgaggtgggaactgaccttgtcccttctgtcacggtgaaggtcacactgcagaacagagtgatattgcaaaaagccaaattatcagtctacgtgcaaccaccattagaattgacttgtgatcagttcacctttgaatttatgacaccagatttgactagaacagtaagcttttctgtttatctgaaaagaagttatacaccatcagaattggaaggaaatgctgttgtttcttattccagaccaacaggcattccgcgagttatccaatgtaaatttagacttcccctaaagttaatttgcctaccaggtcagccttcaaaaactgcaagccacaaaattactattgataccaacaaatctccagtcagtcttcttagtctcttcccaggttttgccagtcagtcagatgatgatcaggtgaatgtaatgggttttcacttcttaggaggtgctcgaattactgttcttgcttccaaaacttctcaacgatatcgcattcagagtgaacaatttgaagatctttggctcataaccaatgagcttattcttcgccttcaagaatattttgaaaaacagggagtcaaagattttgcatgttctttttcgggatctataccccttcaagaatattttgagttgattgatcatcattttgagctacggataaatggtgaaaaattagaagaactcttatctgagagagctgtacaatttcgggccattcaacgccggctactagcaagattcaaagataaaactcctgcccctcttcaacacctggacaccttgttagatggaacctacaagcaggtaattgctctagcagatgcagtggaggaaaaccaaggcaatctgttccagtcattcaccaggctgaagagtgccacccatttggtgattctgctgatcgcgctgtggcagaagcttagtgctgaccaggttgctattctggaagcggcatttctgccgctacaagaagacactcaagaattgggctgggaagaaacggtggatgccgccatttcccacctgttgaagacttgcctgtcgaagagttctaaggagcaggctttgaacctcaacagccagctgaacatacccaaagacacaagccaactgaagaaacatatcaccttgctctgcgatagattatccaaaggtggccgtctctgcctaagtaccgatgcagcagccccacagaccatggtcatgccaggtggttgtactacaatcccagagtcagacctagaagaaagatcagtagaacaagactctacagaactgtttaccaaccacagacatctcactgcagagacacccaggcctgaagtttcacccctccaaggagtctcggaataattcaagtagagttgtttggttgagaggaacatccccatctcaaggccgaacctgtgtgaacctcatgccaagcacagatatagggctggcgcaggtgcttcctaaagctcaccttcctggagatgacatgcatagaaagaggggttgggactttttacttcactaggagaacttgtaacaccatggggaagtcagctgaaacttgtcttgttttgccaggaaaggaagtagttgcctttggtcatccatctgctaatagtcacagaatacagtgaaatgacatagttttgggttagattttataatgcaaagattcagatccaaaataatttcataccccattttttcacagaattcttatatagtaaatgtatcaagtttaataaagcatctcattgtcaaataatatcttggattttatttataattagagggatttatgagtgattgctctacattatttcttcaaaggaaaggaaaggaattgaagactttgctactctctggtaagacttgaatgtgattattttataaataaaagaaccactatgaaactttcatgtgatttgttctattaagctaaacgtggaagaagggaagttttctagtattgtatgaaaatgtttaaatattttcaaggaagctagtacattaacatccccttttcattaccccattgggtggcaccttttaaaaatccaggttattaaaggattcacactttattacagttaaaatttaaggtttttatgtgtaagaagtgaaagaaactttgctaatttcaagttcgaattacagttgtgagattgatttatttaaataaaaatatgcctttgccagtt

SEQ ID NO: 3151 - DNA, 1959 bp, Homo sapiens
  source 1..1959: mol_type = unassigned DNA
agtggcgtccgttgtaagtgctatgacaacagggcgaagatggctcagagttaggctggagaggggaggtgtcccttccgctgcggccgtcgggtttctgctacatcccattcaccgcctcctccatcctttcctcctcggtgtgagcagcaggacttgcatttgttctcgcctgcctagtgtcttccaagggatagatgccgtttcctctgctggtctctgggggtgacggggggcgcaggggagcttcttgggggaatcactccaactctgtggagctggtggtgctgcctggtggggctctctctttgcccgggacgtggaacaactttcagctggaggacgagagggaatagtgaagctaaaggttgcttttctctgcaccgtccgttcttgctccctctgctccatcactgggaccttgtcaggcgttcataaagcaaaatttgccgaacgagggttcgcagaaaggtggggcagagctcatctgacgtggcatcagtgtgaaagaaaatgtctttatttaaagcccgtgattggtggtctactattctgggagataaagaagaatttgatcaaggctgtttgtgtctggctaatgttgacaatagtggaaatggacaagataaaataattgtgggtagctttatgggatacctaaggatctttagcccccatcctgcaaaaacaggagatggagctcaagccgaagatttgcttctagaagtggatctacgagatccagtacttcaagtggaagtaggaaagtttgtttcaggtaccgaaatgctacatttggctgtgttacattctagaaaactttgtgtctactctgtctcaggaaccttgggtaatgtggaacatgggaaccaatgtcagatgaaattgatgtatgaacataatcttcagagaacagcctgcaatatgacctatggatcatttggtggtgtaaaaggtcgagatttaatttgcatccagtctatggatgggatgctgatggtatttgagcaggagagctatgcttttggaagatttctccctggctttcttctgcctggtcctcttgcctacagttcccgtacagattccttccttactgtctcttcctgccaacaagtggaaagttataagtaccaggtacttgcttttgcaacagatgcagataaaaggcaggagactgaacagcaaaaacttggttctggaaaaagactagttgtggattggactctaaatattggagagcaagcccttgacatatgtattgtctctttcaatcagtcggcatcctctgtttttgttcttggtgagagaaactttttttgccttaaggataatggacaaattcgattcatgaagaagcttgattggagcccaagttgttttctgccatattgctcagtttctgaaggaacaataaatactttgattggaaatcataataacatgctgcatatttatcaagatgtgacactgaagtgggccacccaacttccccacattcctgtagcagtaagagtgggctgtttgcatgatttaaagggagtgatagtcactctgagtgatgatggtcacttgcagtgttcatacctggggacagatccttctctgttccaagctccaaacgttcaatctcgagaactaaactatgatgaacttgatgtagaaatgaaagaacttcagaaaatcatcaaagatgttaacaaatcacaaggtgtttggcccatgactgagagagaagatgacttgaacgtttctgtcgtggtttctcctaactttgattcagtttctcaagcgaccgatgttgaggtgggaactgaccttgtcccttctgtcacggtgaaggtcacactgcagaacagagtgatattgcaaaaagccaaattatcagtctacgtgcaaccaccattagaattgacttgtgatcagttcacctttgaatttatgaattttccctcttag

SEQ ID NO: 3152 - DNA, 3914 bp, Homo sapiens
  source 1..3914: mol_type = unassigned DNA
agtggcgtccgttgtaagtgctatgacaacagggcgaagatggctcagagttaggctggagaggggaggtgtcccttccgctgcggccgtcgggtttctgctacatcccattcaccgcctcctccatcctttcctcctcggtgtgagcagcaggacttgcatttgttctcgcctgcctagtgtcttccaagggatagatgccgtttcctctgctggtctctgggggtgacggggggcgcaggggagcttcttgggggaatcactccaactctgtggagctggtggtgctgcctggtggggctctctctttgcccgggacgtggaacaactttcagctggaggacgagagggaatagtgaagctaaaggttgcttttctctgcaccgtccgttcttgctccctctgctccatcactgggaccttgtcaggcgttcataaagcaaaatttgccgaacgagggttcgcagaaaggtggggcagagctcatctgacgtggcatcagtgtgaaagaaaatgtctttatttaaagcccgtgattggtggtctactattctgggagataaagaagaatttgatcaaggctgtttgtgtctggctaatgttgacaatagtggaaatggacaagataaaataattgtgggtagctttatgggatacctaaggatctttagcccccatcctgcaaaaacaggagatggagctcaagccgaagatttgcttctagaagtggatctacgagatccagtacttcaagtggaagtaggaaagtttgtttcaggtaccgaaatgctacatttggctgtgttacattctagaaaactttgtgtctactctgtctcaggaaccttgggtaatgtggaacatgggaaccaatgtcagatgaaattgatgtatgaacataatcttcagagaacagcctgcaatatgacctatggatcatttggtggtgtaaaaggtcgagatttaatttgcatccagtctatggatgggatgctgatggtatttgagcaggagagctatgcttttggaagatttctccctggctttcttctgcctggtcctcttgcctacagttcccgtacagattccttccttactgtctcttcctgccaacaagtggaaagttataagtaccaggtacttgcttttgcaacagatgcagataaaaggcaggagactgaacagcaaaaacttggttctggaaaaagactagttgtggattggactctaaatattggagagcaagcccttgacatatgtattgtctctttcaatcagtcggcatcctctgtttttgttcttggtgagagaaactttttttgccttaaggataatggacaaattcgattcatgaagaagcttgattggagcccaagttgttttctgccatattgctcagtttctgaaggaacaataaatactttgattggaaatcataataacatgctgcatatttatcaagatgtgacactgaagtgggccacccaacttccccacattcctgtagcagtaagagtgggctgtttgcatgatttaaagggagtgatagtcactctgagtgatgatggtcacttgcagtgttcatacctggggacagatccttctctgttccaagctccaaacgttcaatctcgagaactaaactatgatgaacttgatgtagaaatgaaagaacttcagaaaatcatcaaagatgttaacaaatcacaaggtgtttggcccatgactgagagagaagatgacttgaacgtttctgtcgtggtttctcctaactttgattcagtttctcaagcgaccgatgttgaggtgggaactgaccttgtcccttctgtcacggtgaaggtcacactgcagaacagagtgatattgcaaaaagccaaattatcagtctacgtgcaaccaccattagaattgacttgtgatcagttcacctttgaatttatgaatcgaaatcctgatggcattccgcgagttatccaatgtaaatttagacttcccctaaagttaatttgcctaccaggtcagccttcaaaaactgcaagccacaaaattactattgataccaacaaatctccagtcagtcttcttagtctcttcccaggttttgccagtcagtcagatgatgatcaggtgaatgtaatgggttttcacttcttaggaggtgctcgaattactgttcttgcttccaaaacttctcaacgatatcgcattcagagtgaacaatttgaagatctttggctcataaccaatgagcttattcttcgccttcaagaatattttgaaaaacagggagtcaaagattttgcatgttctttttcgggatctataccccttcaagaatattttgagttgattgatcatcattttgagctacggataaatggtgaaaaattagaagaactcttatctgagagagctgtacaatttcgggccattcaacgccggctactagcaagattcaaagataaaactcctgcccctcttcaacacctggacaccttgttagatggaacctacaagcaggtaattgctctagcagatgcagtggaggaaaaccaaggcaatctgttccagtcattcaccaggctgaagagtgccacccatttggtgattctgctgatcgcgctgtggcagaagcttagtgctgaccaggttgctattctggaagcggcatttctgccgctacaagaagacactcaagaattgggctgggaagaaacggtggatgccgccatttcccacctgttgaagacttgcctgtcgaagagttctaaggagcaggctttgaacctcaacagccagctgaacatacccaaagacacaagccaactgaagaaacatatcaccttgctctgcgatagattatccaaaggtggccgtctctgcctaagtaccgatgcagcagccccacagaccatggtcatgccaggtggttgtactacaatcccagagtcagacctagaagaaagatcagtagaacaagactctacagaactgtttaccaaccacagacatctcactgcagagacacccaggcctgaagtttcacccctccaaggagtctcggaataattcaagtagagttgtttggttgagaggaacatccccatctcaaggccgaacctgtgtgaacctcatgccaagcacagatatagggctggcgcaggtgcttcctaaagctcaccttcctggagatgacatgcatagaaagaggggttgggactttttacttcactaggagaacttgtaacaccatggggaagtcagctgaaacttgtcttgttttgccaggaaaggaagtagttgcctttggtcatccatctgctaatagtcacagaatacagtgaaatgacatagttttgggttagattttataatgcaaagattcagatccaaaataatttcataccccattttttcacagaattcttatatagtaaatgtatcaagtttaataaagcatctcattgtcaaataatatcttggattttatttataattagagggatttatgagtgattgctctacattatttcttcaaaggaaaggaaaggaattgaagactttgctactctctggtaagacttgaatgtgattattttataaataaaagaaccactatgaaactttcatgtgatttgttctattaagctaaacgtggaagaagggaagttttctagtattgtatgaaaatgtttaaatattttcaaggaagctagtacattaacatccccttttcattaccccattgggtggcaccttttaaaaatccaggttattaaaggattcacactttattacagttaaaatttaaggtttttatgtgtaagaagtgaaagaaactttgctaatttcaagttcgaattacagttgtgagattgatttatttaaataaaaatatgcctttgccagtt

SEQ ID NO: 3153 - DNA, 4019 bp, Homo sapiens
  source 1..4019: mol_type = unassigned DNA
agtggcgtccgttgtaagtgctatgacaacagggcgaagatggctcagagttaggctggagaggggaggtgtcccttccgctgcggccgtcgggtttctgctacatcccattcaccgcctcctccatcctttcctcctcggtgtgagcagcaggacttgcatttgttctcgcctgcctagtgtcttccaagggatagatgccgtttcctctgctggtctctgggggtgacggggggcgcaggggagcttcttgggggaatcactccaactctgtggagctggtggtgctgcctggtggggctctctctttgcccgggacgtggaacaactttcagctggaggacgagagggaatagtgaagctaaaggttgcttttctctgcaccgtccgttcttgctccctctgctccatcactgggaccttgtcaggcgttcataaagcaaaatttgccgaacgagggttcgcagaaaggtggggcagagctcatctgacgtggcatcagtgtgaaagaaaatgtctttatttaaagcccgtgattggtggtctactattctgggagataaagaagaatttgatcaaggctgtttgtgtctggctaatgttgacaatagtggaaatggacaagataaaataattgtgggtagctttatgggatacctaaggatctttagcccccatcctgcaaaaacaggagatggagctcaagccgaagatttgcttctagaagtggatctacgagatccagtacttcaagtggaagtaggaaagtttgtttcaggtaccgaaatgctacatttggctgtgttacattctagaaaactttgtgtctactctgtctcaggaaccttgggtaatgtggaacatgggaaccaatgtcagatgaaattgatgtatgaacataatcttcagagaacagcctgcaatatgacctatggatcatttggtggtgtaaaaggtcgagatttaatttgcatccagtctatggatgggatgctgatggtatttgagcaggagagctatgcttttggaagatttctccctggctttcttctgcctggtcctcttgcctacagttcccgtacagattccttccttactgtctcttcctgccaacaagtggaaagttataagtaccaggtacttgcttttgcaacagatgcagataaaaggcaggagactgaacagcaaaaacttggttctggaaaaagactagttgtggattggactctaaatattggagagcaagcccttgacatatgtattgtctctttcaatcagtcggcatcctctgtttttgttcttggtgagagaaactttttttgccttaaggataatggacaaattcgattcatgaagaagcttgattggagcccaagttgttttctgccatattgctcagtttctgaaggaacaataaatactttgattggaaatcataataacatgctgcatatttatcaagatgtgacactgaagtgggccacccaacttccccacattcctgtagcagtaagagtgggctgtttgcatgatttaaagggagtgatagtcactctgagtgatgatggtcacttgcagtgttcatacctggggacagatccttctctgttccaagctccaaacgttcaatctcgagaactaaactatgatgaacttgatgtagaaatgaaagaacttcagaaaatcatcaaagatgttaacaaatcacaaggtgtttggcccatgactgagagagaagatgacttgaacgtttctgtcgtggtttctcctaactttgattcagtttctcaagcgaccgatgttgaggtgggaactgaccttgtcccttctgtcacggtgaaggtcacactgcagaacagagtgatattgcaaaaagccaaattatcagtctacgtgcaaccaccattagaattgacttgtgatcagttcacctttgaatttatgacaccagatttgactagaacagtaagcttttctgtttatctgaaaagaagttatacaccatcagaattggaaggaaatgctgttgtttcttattccagaccaacagtgcaaaatagtttaggcattccgcgagttatccaatgtaaatttagacttcccctaaagttaatttgcctaccaggtcagccttcaaaaactgcaagccacaaaattactattgataccaacaaatctccagtcagtcttcttagtctcttcccaggttttgccagtcagtcagatgatgatcaggtgaatgtaatgggttttcacttcttaggaggtgctcgaattactgttcttgcttccaaaacttctcaacgatatcgcattcagagtgaacaatttgaagatctttggctcataaccaatgagcttattcttcgccttcaagaatattttgaaaaacagggagtcaaagattttgcatgttctttttcgggatctataccccttcaagaatattttgagttgattgatcatcattttgagctacggataaatggtgaaaaattagaagaactcttatctgagagagctgtacaatttcgggccattcaacgccggctactagcaagattcaaagataaaactcctgcccctcttcaacacctggacaccttgttagatggaacctacaagcaggtaattgctctagcagatgcagtggaggaaaaccaaggcaatctgttccagtcattcaccaggctgaagagtgccacccatttggtgattctgctgatcgcgctgtggcagaagcttagtgctgaccaggttgctattctggaagcggcatttctgccgctacaagaagacactcaagaattgggctgggaagaaacggtggatgccgccatttcccacctgttgaagacttgcctgtcgaagagttctaaggagcaggctttgaacctcaacagccagctgaacatacccaaagacacaagccaactgaagaaacatatcaccttgctctgcgatagattatccaaaggtggccgtctctgcctaagtaccgatgcagcagccccacagaccatggtcatgccaggtggttgtactacaatcccagagtcagacctagaagaaagatcagtagaacaagactctacagaactgtttaccaaccacagacatctcactgcagagacacccaggcctgaagtttcacccctccaaggagtctcggaataattcaagtagagttgtttggttgagaggaacatccccatctcaaggccgaacctgtgtgaacctcatgccaagcacagatatagggctggcgcaggtgcttcctaaagctcaccttcctggagatgacatgcatagaaagaggggttgggactttttacttcactaggagaacttgtaacaccatggggaagtcagctgaaacttgtcttgttttgccaggaaaggaagtagttgcctttggtcatccatctgctaatagtcacagaatacagtgaaatgacatagttttgggttagattttataatgcaaagattcagatccaaaataatttcataccccattttttcacagaattcttatatagtaaatgtatcaagtttaataaagcatctcattgtcaaataatatcttggattttatttataattagagggatttatgagtgattgctctacattatttcttcaaaggaaaggaaaggaattgaagactttgctactctctggtaagacttgaatgtgattattttataaataaaagaaccactatgaaactttcatgtgatttgttctattaagctaaacgtggaagaagggaagttttctagtattgtatgaaaatgtttaaatattttcaaggaagctagtacattaacatccccttttcattaccccattgggtggcaccttttaaaaatccaggttattaaaggattcacactttattacagttaaaatttaaggtttttatgtgtaagaagtgaaagaaactttgctaatttcaagttcgaattacagttgtgagattgatttatttaaataaaaatatgcctttgccagtt

SEQ ID NO: 3154 - DNA, 1581 bp, Homo sapiens
  source 1..1581: mol_type = unassigned DNA
agtggcgtccgttgtaagtgctatgacaacagggcgaagatggctcagagttaggctggagaggggaggtgtcccttccgctgcggccgtcgggtttctgctacatcccattcaccgcctcctccatcctttcctcctcggtgtgagcagcaggacttgcatttgttctcgcctgcctagtgtcttccaagggatagatgccgtttcctctgctggtctctgggggtgacggggggcgcaggggagcttcttgggggaatcactccaactctgtggagctggtggtgctgcctggtggggctctctctttgcccgggacgtggaacaactttcagctggaggacgagagggaatagtgaagctaaaggttgcttttctctgcaccgtccgttcttgctccctctgctccatcactgggaccttgtcaggcgttcataaagcaaaatttgccgaacgagggttcgcagaaaggtggggcagagctcatctgacgtggcatcagtgtgaaagaaaatgtctttatttaaagcccgtgattggtggtctactattctgggagataaagaagaatttgatcaaggctgtttgtgtctggctaatgttgacaatagtggaaatggacaagataaaataattgtgggtagctttatgggatacctaaggatctttagcccccatcctgcaaaaacaggagatggagctcaagccgaagatttgcttctagaagtggatctacgagatccagtacttcaagtggaagtaggaaagtttgtttcaggtaccgaaatgctacatttggctgtgttacattctagaaaactttgtgtctactctgtctcaggaaccttgggtaatgtggaacatgggaaccaatgtcagatgaaattgatgtatgaacataatcttcagagaacagcctgcaatatgacctatggatcatttggtggtgtaaaaggtcgagatttaatttgcatccagtctatggatgggatgctgatggtatttgagcaggagagctatgcttttggaagatttctccctggctttcttctgcctggtcctcttgcctacagttcccgtacagattccttccttactgtctcttcctgccaacaagtggaaagttataagtaccaggtacttgcttttgcaacagatgcagataaaaggcaggagactgaacagcaaaaacttggttctggaaaaagactagttgtggattggactctaaatattggagagcaagcccttgacatatgtattgtctctttcaatcagtcggcatcctctgtttttgttcttggtgagagaaactttttttgccttaaggataatggacaaattcgattcatgaagaagcttgattggagcccaagttgttttctgccatattgctcagtttctgaaggaacaataaatactttgattggaaatcataataacatgctgcatatttatcaagatgtgacactgaagtgggccacccaacttccccacattcctgtagcagtaagagtgggctgtttgcaattttctttatggaagcatttgttgcctcgatcttccactttagaaaaatga

SEQ ID NO: 3155 - DNA, 613 bp, Homo sapiens
  source 1..613: mol_type = unassigned DNA
cccacccacacgcaccgaggggagagggcggtcacgcggccgggggggcgtggcctgcccccggagcccaggcaggaggagggtcttccttaaggaactgctgccaggacagggcagaggattgcagtaattatcactctctgctaatgaggaccaggccgtggttcactcgagccccgccccagtagcaatctaattccaaccgcggccctctcagaagtcggtccccgcctttgcgcctcagcctctctggactccagcccccagaagtcggcgcggcacggcgtgacctgcgcagtggcgtccgtttgtgaaagaaaatgtctttatttaaagcccgtgattggtggtctactattctgggagataaagaagaatttgatcaaggctgtttgtgtctggctaatgttgacaatagtggaaatggacaagataaaataattgtgggtagctttatgggatacctaaggatctttagcccccatcctgcaaaaacaggagatggagctcaagccgaagatttgcttctagaagtggatctacgagatccagtacttcaagtggaagtaggaaagtttgtttcaggtaccgaaatgctacatttggctgtgtt

SEQ ID NO: 3156 - DNA, 1982 bp, Homo sapiens
  source 1..1982: mol_type = unassigned DNA
tgaccttgtcccttctgtcacggtgaaggtcacactgcagaacagagtgatattgcaaaaagccaaattatcagtctacgtgcaaccaccattagaattgacttgtgatcagttcacctttgaatttatgacaccagatttgactagaacagtaagcttttctgtttatctgaaaagaagttatacaccatcagaattggaaggaaatgctgttgtttcttattccagaccaacagatcgaaatcctgatggcattccgcgagttatccaatgtaaatttagacttcccctaaagttaatttgcctaccaggtcagccttcaaaaactgcaagccacaaaattactattgataccaacaaatctccagtcagtcttcttagtctcttcccaggttttgccagtcagtcagatgatgatcaggtgaatgtaatgggttttcacttcttaggaggtgctcgaattactgttcttgcttccaaaacttctcaacgatatcgcattcagagtgaacaatttgaagatctttggctcataaccaatgagcttattcttcgccttcaagaatattttgaaaaacagggagtcaaagattttgcatgttctttttcgggatctataccccttcaagaatattttgagttgattgatcatcattttgagctacggataaatggtgaaaaattagaagaactcttatctgagagagctgtacaatttcgggccattcaacgccggctactagcaagattcaaagataaaactcctgcccctcttcaacacctggacaccttgttagatggaacctacaagcaggtaattgctctagcagatgcagtggaggaaaaccaaggcaatctgttccagtcattcaccaggctgaagagtgccacccatttggtgattctgctgatcgcgctgtggcagaagcttagtgctgaccaggttgctattctggaagcggcatttctgccgctacaagaagacactcaagaattgggctgggaagaaacggtggatgccgccatttcccacctgttgaagacttgcctgtcgaagagttctaaggagcaggctttgaacctcaacagccagctgaacatacccaaagacacaagccaactgaagaaacatatcaccttgctctgcgatagattatccaaaggtggccgtctctgcctaagtaccgatgcagcagccccacagaccatggtcatgccaggtggttgtactacaatcccagagtcagacctagaagaaagatcagtagaacaagactctacagaactgtttaccaaccacagacatctcactgcagagacacccaggcctggtaagagactggatggccttcacaagcgttagttaagtcagaagcagtgacaatctggtcagtttttgtcataccagagagcattccgcaaagctgcttgttttccaatttcttcattcttccccttagcactggtgcagctgaatttgatcctttgtgtattcctgtcactattcagatcttttctctctctttctctcttactctctttttttccagaagtttcacccctccaaggagtctcggaataattcaagtagagttgtttggttgagaggaacatccccatctcaaggccgaacctgtgtgaacctcatgccaagcacagatatagggctggcgcaggtgcttcctaaagctcaccttcctggagatgacatgcatagaaagaggggttgggactttttacttcactaggagaacttgtaacaccatggggaagtcagctgaaacttgtcttgttttgccaggaaaggaagtagttgcctttggtcatccatctgctaatagtcacagaatacagtgaaatgacatagttttgggttagattttataatgcaaagattcagatccaaaataatttcataccccattttttcacagaattcttatatagtaaatgtatcaagtttaataaagcatctcattgtc

SEQ ID NO: 3157 - DNA, 1717 bp, Homo sapiens
  source 1..1717: mol_type = unassigned DNA
attttctaatttaagtgaaaccactagtgtcagcagacaaacgtgtgagctgaacttgacatccttttcttcaactgctcccttctcaaatattttcaaactagaggagcctttctaaggaaccttgggtaatgtggaacatgggaaccaatgtcagatgaaattgatgtatgaacataatcttcagagaacagcctgcaatatgacctatggatcatttggtggtgtaaaaggtcgagatttaatttgcatccagtctatggatgggatgctgatggtatttgagcaggagagctatgcttttggaagatttctccctggctttcttctgcctggtcctcttgcctacagttcccgtacagattccttccttactgtctcttcctgccaacaagtggaaagttataagtaccaggtacttgcttttgcaacagatgcagataaaaggcaggagactgaacagcaaaaacttggttctggaaaaagactagttgtggattggactctaaatattggagagcaagcccttgacatatgtattgtctctttcaatcagtcggcatcctctgtttttgttcttggtgagagaaactttttttgccttaaggataatggacaaattcgattcatgaagaagcttgattggagcccaagttgttttctgccatattgctcagtttctgaaggaacaataaatactttgattggaaatcataataacatgctgcatatttatcaagatgtgacactgaagtgggccacccaacttccccacattcctgtagcagtaagagtgggctgtttgcatgatttaaagggagtgatagtcactctgagtgatgatggtcacttgcagtgttcatacctggggacagatccttctctgttccaagctccaaacgttcaatctcgagaactaaactatgatgaacttgatgtagaaatgaaagaacttcagaaaatcatcaaagatgttaacaaatcacaaggtgtttggcccatgactgagagagaagatgacttgaacgtttctgtcgtggtttctcctaactttgattcagtttctcaagcgaccgatgttgaggtgggaactgaccttgtcccttctgtcacggtgaaggtcacactgcagaacagagtgatattgcaaaaagccaaattatcagtctacgtgcaaccaccattagaattgacttgtgatcagttcacctttgaatttatgacaccagatttgactagaacagtaagcttttctgtttatctgaaaagaagtatacaccatcagaattggaaggaaatgctgttgtttcttattccagaccaacagatcgaaatcctgatggcattccgcgagttatccaatgtaaatttagacttcccctaaagttaatttgcctaccaggtcagccttcaaaaactgcaagccacaaaattactattgataccaacaaatctccagtcagtcttcttagtctcttcccaggttttgccagtcagtcagatgatgatcaggtgaatgtaatgggttttcacttcttaggaggtgctcgaattactgttcttgcttccaaaacttctcaacgatatcgcattcagagtgaacaatttgaagatctttggctcataaccaatgagcttattcttcgccttcaagaatattttgaaaaacagggagtcaaagattttgcatgttctttttcgggatctataccccttc

SEQ ID NO: 3158 - DNA, 2341 bp, Homo sapiens
  source 1..2341: mol_type = unassigned DNA
acggtgctgacgggcccccggagcggcgagggcgcggagagaggacctccccggccaggtggagagtcatgagccgcgggcagccgccgccgctctccgcggtgctgatgccgccaggtgcgctcctttccgcccgctgctagcgcggcccgggcccgcagctatctgcggtgctgacctggccaccctcagccaccacttgcctggaagaagcgtgcggtttggatttttaaaacgccattctttatttagattccaacatcctcgcgtttcttctgtgccaagggggccctcgggccgtccgtctccccctttgctctccccaacttggcgcgccctccctcccattcctccctgacactcccaccaccccccctcggctcggcggctcggcgcgatgctgcagaagacgcactgagcccttttggatctaatgcgcagaggaggttggcccagagctcccgggctcccccaaggctgaactccgtccaaggtgcccgcaggctccctgcccgccttccccatgccagcccgcagctaggggcaggggcagcggcggctggggttgggggtgggtggggagcttttggggaggacaggtcgcagcttggctatggaaggctccaatggctttgggatcgactccattctctcccaccgcgcgggcagccccgcccttcccaagggggaccccttgctcggggactgccgttcgcccctggagctgagtccacgctcagagagcagcagcgactgctcttcgccagcctctccaggaagggactgtttggagacggggaccccacggcctggcggggcatccggcccaggtttggactcccacctgcagcccgggcagctctcagccccggcccagtcgcgcaccgtcacctcctcctttctgatcagggacatccttgccgactgcaaaccactcgcggcctgtgcaccctactctagcagcgggcagccggcagcccctgagcctgggggccgccttgcggccaaggccgcggaggactttagagacaagctggacaaaagtggcagcaacgcctcatcggactctgagtataaagtgaaggaggagggcgaccgcgagatctccagctccagggacagtcccccggtgcgcctgaaaaagccacgcaaggcgcgcacggccttcaccgaccatcagctggcgcagctggagcgcagcttcgagcggcagaagtacctgagcgtgcaggaccgcatggagctcgccgcctcgctcaacctcaccgacacgcaggtcaagacctggtaccagaaccgcaggactaaatggaagcgacagacggccgtcgggttggagctgctggcggaggcaggcaattactcagcgctccagcggatgttcccgtcgccttatttctacccgcagagtctggtttccaacctggaccccggcgcggcgctctacctgtaccgcggccccagcgcgccgccgcctgctctccagagacctctggtgccccgcatcctcatccacggactccagggcgccagcgagccgcccccgccgctgccccccctggccggcgtcctcccacgcgccgcgcagcctcggtgaggcgcccgtcggctccggggcctcctcccgcgggctcggcgtggccccttccgcccgcctttctgagggcgcaggttcgacgccctttcccgggagggggccctgcccggccctccctggcgccccagcccagtgccccccgaagggccaaatgccaagtccactgaggcccggaccccggactgcgtctccccagcccccctcggcgtcctctctcgcggccgctctgtccgggagccatccccacccgccgggtgtacatacgcgtctctgccactccccacccccagcctctgccggctcccctaggcaacccctttctccccaggagcgggtgcggctgattcccaggcttcgctctctcccacgccccttctacgctccaggtggagaacagcccctctccccgcgcccccgccagggagagaaggggagtgcggagccccgtctccctacccctcgagcacctgggccagcggctgagctgtacataccgtgtgcaaagtgtatatgaagttatttattcgtgacccatgagcccgtgaccgtgtccgtggattagtgagtctgtggcctgtgccctccccactcccaggcggggcaggaaggggccaagggggcttgcccacccaccccgaccccagcccccagcctcagccccggtccgggggcagccaggcctctcgggttctctcttttttaaatgtcgaaataaacttcttacaaatgaccaggcgcctgtcc

SEQ ID NO: 3159 - DNA, 1197 bp, Homo sapiens
  source 1..1197: mol_type = unassigned DNA
aggctgaactccgtccaaggagcttttggggaggacaggtcgcagcttggctatggaaggctccaatggctttgggatcgactccattctctcccaccgcgcgggcagccccgcccttcccaagggggaccccttgctcggggactgccgttcgcccctggagctgagtccacgctcagagagcagcagcgactgctcttcgccagcctctccaggaagggactgtttggagacggggaccccacggcctggcggggcatccggcccaggtttggactcccacctgcagcccgggcagctctcagccccggcccagtcgcgcaccgtcacctcctcctttctgatcagggacatccttgccgactgcaaaccactcgcggcctgtgcaccctactctagcagcgggcagccggcagcccctgagcctgggggccgccttgcggccaaggccgcggaggactttagagacaagctggacaaaagtggcagcaacgcctcatcggactctgagtataaagtgaaggaggagggcgaccgcgagatctccagctccagggacagtcccccggtgcgcctgaaaaagccacgcaaggcgcgcacggccttcaccgaccatcagctggcgcagctggagcgcagcttcgagcggcagaagtacctgagcgtgcaggaccgcatggagctcgccgcctcgctcaacctcaccgacacgcaggtcaagacctggtaccagaaccgcaggactaaatggaagcgacagacggccgtcgggttggagctgctggcggaggcaggcaattactcagcgctccagcggatgttcccgtcgccttatttctacccgcagagtctggtttccaacctggaccccggcgcggcgctctacctgtaccgcggccccagcgcgccgccgcctgctctccagagacctctggtgccccgcatcctcatccacggactccagggcgccagcgagccgcccccgccgctgccccccctggccggcgtcctcccacgcgccgcgcagcctcggtgaggcgcccgtcggctccggggcctcctcccgcgggctcggcgtggccccttccgcccgcctttctgagggcgcaggttcgacgccctttcccgggagggggccctgcccggccctccctggcgccccagcccagtgccccccgaagggccaaatgccaagtc

SEQ ID NO: 3160 - DNA, 1155 bp, Homo sapiens
  source 1..1155: mol_type = unassigned DNA
ccagtgttcccagttcccaccagtccaactgcgaggagtgcgacgtgagtctgagtctgatccctccgaaaaccgtacttccggcgctgtctcggaggcctcccgtcccctcccttgtccgtcttctaactcttccccacgccaggtccgtcaagcctaagtccttgagttccgggtccgggcagcagagaaaggaagtcctctccctggaggcctatctccctcagaactgcgcgagaagcgagaccttagaaggcagggcttcccgcgaaggaccggaaaggagcgcctactaaggacgccgtcgaggtccggggcgcctcaactctatagctctaactggctagaagtgcccaacgtggaatgtttcttttttaaaggcggctcttgaagcgacccggaagcggaagtggaagaaagttctagtggcttgaggtatccgcaggagcggccgggtggcgggaggaaccgttacgggaactgaagttgcggattaagcctgatcaagatgacaacctcccaaaagcaccgagacttcgtggcagagcccatgggggagaagccagtggggagcctggctgggattggtgaagtcctgggcaagaagctggaggaaaggggttttgacaaggcctatgttgtccttggccagtttctggtgctaaagaaagatgaagacctcttccgggaatggctgaaagacacttgtggcgccaacgccaagcagtcccgggactgcttcggatgccttcgagagtggtgcgacgccttcttgtgatgctctctgggaagctctcaatccccagccctcatccagagtttgcagccgagtagggactcctcccctgtcctctacgaaggaaaagattgctattgtcgtactcacctccgacgtactccggggtcttttgggagttttctcccctaaccatttcaacttttttttggattctcgctcttgcatgcctcccccgtcctttttcccttgccagttccctggtgacagttaccagctttcctgaatggattcccggccccatccctcacccccaccctcactttcaatccgtttgataccatttggctccttttttggcagaacagtcactgtccttgtaaagttttttagatcaataaagtcagtggctttcatga

SEQ ID NO: 3161 - DNA, 946 bp, Homo sapiens
  source 1..946: mol_type = unassigned DNA
gtcaagcctaagtccttgagttccgggtccgggcagcagagaaaggaagtcctctccctggaggcctatctccctcagaactgcgcgagaagcgagaccttagaaggcagggcttcccgcgaaggaccggaaaggagcgcctactaaggacgccgtcgaggtccggggcgcctcaactctatagctctaactggctagaagtgcccaacgtggaatgtttcttttttaaaggcggctcttgaagcgacccggaagcggaagtggaagaaagttctagtggcttgagattaagcctgatcaagatgacaacctcccaaaagcaccgagacttcgtggcagagcccatgggggagaagccagtggggagcctggctgggattggtgaagtcctgggcaagaagctggaggaaaggggttttgacaaggcctatgttgtccttggccagtttctggtgctaaagaaagatgaagacctcttccgggaatggctgaaagacacttgtggcgccaacgccaagcagtcccgggactgcttcggatgccttcgagagtggtgcgacgccttcttgtgatgctctctgggaagctctcaatccccagccctcatccagagtttgcagccgagtagggactcctcccctgtcctctacgaaggaaaagattgctattgtcgtactcacctccgacgtactccggggtcttttgggagttttctcccctaaccatttcaacttttttttggattctcgctcttgcatgcctcccccgtcctttttcccttgccagttccctggtgacagttaccagctttcctgaatggattcccggccccatccctcacccccaccctcactttcaatccgtttgataccatttggctccttttttggcagaacagtcactgtccttgtaaagttttttagatcaataaagtcagtggctttca

SEQ ID NO: 3162 - DNA, 670 bp, Homo sapiens
  source 1..670: mol_type = unassigned DNA
gaaccccgcgggcggggagcgggtgtgcgcagcgctaggtgtgcgcttcgccctgtaggtagagagaccctttggttagctttccacgccaagtggccgttccaggcaggcagtgtcgtcttggttcagccaaggtcacagagggagtgatagcttccgcgcagccctggctacggactctgggcatctttccactgccccgcttgcgccacctgttaggcaggatcgtttttcctctggggcaagatcaaaatccagattaagcctgatcaagatgacaacctcccaaaagcaccgagacttcgtggcagagcccatgggggagaagccagtggggagcctggctgggattggtgaagtcctgggcaagaagctggaggaaaggggttttgacaaggcctatgttgtccttggccagtttctggtgctaaagaaagatgaagacctcttccgggaatggctgaaagacacttgtggcgccaacgccaagcagtcccgggactgcttcggatgccttcgagagtggtgcgacgccttcttgtgatgctctctgggaagctctcaatccccagccctcatccagagtttgcagccgagtagggactcctcccctgtcctctacgaaggaaaagattgctattgtcgtactcacctccgacgtactccgggg

SEQ ID NO: 3163 - DNA, 586 bp, Homo sapiens
  source 1..586: mol_type = unassigned DNA
ccgggcagcagagaaaggaagtcctctccctggaggcctatctccctcagaactgcgcgagaagcgagaccttagaaggcagggcttcccgcgaaggaccggaaaggagcgcctactaaggacgccgtcgaggtccggggcgcctcaactctatagctctaactggctagaagtgcccaacgtggaatgtttcttttttaaaggcggctcttgaagcgacccggaagcggaagtggaagaaagttctagtggcttgagagagaccctttggttagctttccacgccaagtggccgttccaggcaggcagtgtcgtcttggttcagccaaggtcacagagggagtgatagcttccgcgcagccctggctacggactctgggcatctttccactgccccgcttgcgccacctgttaggcaggatcgtttttcctctggggcaagatcaaaatccaggtcctgcaggaagaaactcctcttaaaaataattaagcctgatcaagatgacaacctcccaaaagcaccgagacttcgtggcagagcccatgggggagaagccagtggggagcctggctgggattggtgaag

SEQ ID NO: 3164 - DNA, 1135 bp, Homo sapiens
  source 1..1135: mol_type = unassigned DNA
gccgcggagcagggccctgattggaggccagaggggttgcggggagaaggggaggagaggggtcgcaggcgctgtggcgggccctgggggagagcttggccgcgctgcggggagggggcggggtgcagcgcgtgggagccgggccgcgggaaggggcgggccgcagcggcgcgcggtgggggcggagctggggcgcggcgtgaaccccgcgggcggggagcgggtgtgcgcagcgctaggtgtgcgcttcgccctgtaggtagagagaccctttggttagctttccacgccaagtggccgttccaggcaggcagtgtcgtcttggttcagccaaggtcacagagggagtgatagcttccgcgcagccctggctacggactctgggcatctttccactgccccgcttgcgccacctgttaggcaggatcgtttttcctctggggcaagatcaaaatccaggtcctgcaggaagaaactcctcttaaaaataattaagcctgatcaagatgacaacctcccaaaagcaccgagacttcgtggcagagcccatgggggagaagccagtggggagcctggctgggattggtgaagtcctgggcaagaagctggaggaaaggggttttgacaaggcctatgttgtccttggccagtttctggtgctaaagaaagatgaagacctcttccgggaatggctgaaagacacttgtggcgccaacgccaagcagtcccgggactgcttcggatgccttcgagagtggtgcgacgccttcttgtgatgctctctgggaagctctcaatccccagccctcatccagagtttgcagccgagtagggactcctcccctgtcctctacgaaggaaaagattgctattgtcgtactcacctccgacgtactccggggtcttttgggagttttctcccctaaccatttcaacttttttttggattctcgctcttgcatgcctcccccgtcctttttcccttgccagttccctggtgacagttaccagctttcctgaatggattcccggccccatccctcacccccaccctcactttcaatccgtttgataccatttggctccttttttggcagaacagtcactgtccttgtaaagttttttagatcaataa

SEQ ID NO: 3165 - DNA, 3472 bp, Homo sapiens
  source 1..3472: mol_type = unassigned DNA
agagggaaggtgagagggcaaggagtaaaggtggctgggtgtgggtccgttgaagcgagccgcctccagccctgttgaactggtgggcccagggactggagcgggattgaaagggatcttgctctcccttgaagccttgagttgcagcgatttcagtgtcttctctccctgtgtaagcctgtctcggtgtttaggctgaactacagccaccccctctcccgggggtgtgcaggccagggactggccaggcagccatggctgacgagaagaccttccggatcggcttcattgtgctggggcttttcctgctggccctcggtacgttcctcatgagccatgatcggccccaggtctacggcaccttctatgccatgggcagcgtcatggtgatcgggggcatcatctggagcatgtgccagtgctaccccaagatcaccttcgtccctgctgactctgactttcaaggcatcctctccccaaaggccatgggcctgctggagaatgggcttgctgccgagatgaagagccccagtccccagccgccctatgtaaggctgtgggaggaagccgcctatgaccagagcctgcctgacttcagccacatccagatgaaagtcatgagctacagtgaggaccaccgctccttgctggcccctgagatggggcagccgaagctgggaaccagtgatggaggagaaggtggccctggcgacgttcaggcctggatggaggctgccgtggtcatccacaagggctcagacgagagtgaaggggaaagacgcctaactcagagctggcccggccccctggcctgtccccagggccctgcccccttggcttccttccaagatgacctggacatggactccagtgaaggcagcagccccaatgcatctccacatgacagggaggaagcttgttccccacaacaggaacctcagggctgcaggtgcccgctggaccgcttccaagactttgccctgattgatgccccaacgttggaggatgagccccaagaggggcagcagtgggaaatagccctgcccaacaactggcagcggtacccaaggacaaaggtggaggagaaggaggcttcggacacaggtggggaggaacctgagaaggaagaggaagacctgtactatgggctgccagatggagccggggacctcctcccggacaaggagctgggttttgagcctgacacccaaggctgagatgtttgtgctccgtagcttctagtctggaactgctgctgacccctgtgtgacatcacagggcctcagtttccctatctgcaaaatgggatgatatggaggttcaatgagatggtggcattttgagaatggtaaagaaatacacagggaggggatgatgactattagtggactcttgtttttccaatagttagtggtctttggccaacctttgaaggcaaaatatgatttgttgaggtttgcagcagctgaagccctcaaaagcattttccaccttcccccaaagctgacctctgagaggaaccttccttggtgctccctctgggcccctgatcctttgtgaaggccagtcaggtttcccattcctattgtgtcttatagtccacttggtagatggcgtgatccgtctttacacagagggagcctcatctcctcctgggccacattcctcctgcagctcccatcgctccttggccaggacccaaaaccttctgtgactgacccctgctgacctcattctctctgctcctccagttccaagcctagcccccctgcccatcttgcggctcacactcttgcccaagctgttctcctccaccaggatgcccttggctcccttttcagcttggcaaattcgtgctcacccttcaaacccctacacagatgacctcccttggaaaggttttcctgatgtcgctgcctcctggaaccaggtggtcttgcctctctgcgctgcctttgggacctgtatatttgtcagtgtggcatggctgcctgcctcccgttgaagggcagcatcttgactttactcaccttgagatcgcctgtgcccagatgggcctttggcctggcccagaatcggtggtcatcaagggtgtacagaactcaccaggacccaggaacctgttgcagataaaatcactctcccccacgttcccaacttttagactcacagccctcttacttcccagcattcaaacttctaaatggcctgtatgtattcacaaagcaggcaaaaagcccccagaggaacaccaccccccacccctgcctctggaatacatttgctttgacttggaattgtaggtgaaattcatcttcctggcctacttcagtttgaatcagttggctagccaggtgcggtggctcatgcctgtaatctgagcattttgggaggctaaagtgggtggatcacttgaggccaggagttggagagcagcctgggcaacatagcgaaaccctatctctactaaaactacaaaaattagctgggcgtggtggtgcacacctgtagtctcagctacttgggaggctgagctggaggatagcttaagcacaggagatggaagttgcagtgagccgagatcgcaccactgcactccggcctgggtgacagagtgagaccctgcctcaaaacaaaacaattggaattggatggcatttagtgagcatctactatatgccagatattgagctgtgatctctaggggtaaagagacatgaactactgacaccgtgcttgccttcagagggctcacaatctagtgagcttgatttctgtgagtgcagagcagaagctgaggtgggaacagagaagtaaaaaatggacacaccagaggcagaagagtgacagcctcccagctgtttggggcagttgagtatggtggggaaatagctcaagctgtctttgcagcccctgaagacatcactgtaccctattgaaccatctcagggtgatgctattgttacgctgatccctgcaacgcttgcctgtgccccagcccaggatcctggcagctgcagagaaaatggcagtaacactacctcaaaccaggaccacgccctcagagcctgcaccctgggccacctgggagtcagagaccttcacctgggctatggggttctgggttgaggctggggttcccggcctagggaagggcttccgggttgaggccgggggtcctggcctagggaaggagatgcccctgtgtgctgggttacaaggtcatggccctgggaacacacttccttttctttctgggtcatttctgcctctgcagtgaaggatgccacagggtacaccctctctgctgtcatgactcaggacaggagttcctggtcacagctgagtcttcggatgaggtgaggggtagcatgctcctgtgctctgttgcctaaggcagggcagcctacaacccacgttagaaacagcgtcagcactaagggctaaaataaaactactttcaacatttaaa

SEQ ID NO: 3166 - DNA, 1809 bp, Homo sapiens
  source 1..1809: mol_type = unassigned DNA
cggcgtggggagggggcgcagtcccgggttcgaccggccgagccccgcgcgccccgcccgcgccctgcgcctccgcccggccggccggcgggggagggggcatgagccggcgcccgcgcgccgccccgagctgcgggccggcctagagccccgcgcgggccccgcgccggagccaagccgtcgccgccgccgccgccaaaccgcgggcgcagcagtgggcgccgcgatgcagcggccgggggagccgggcgccgcgcgcttcggcccgcccgagggctgcgcggaccaccggccgcaccgctatcgcagcttcatgattgaggagatcctcacggagccacccgggcccaagggcgccgcgcccgcagccgccgctgccgcggcgggcgagctgctgaagttcggcgtgcaggcgctgctggcggcgcggcccttccacagccacctggccgtgctgaaggccgagcaggcggcggtgttcaagttcccactggcgccgctgggctgttcagggctgagctctgcgttgctggcggcagggcccgggctgcccggcgccgcgggtgcgccacacctgccgctcgagttgcagctccgcgggaagctggaggcggcaggccctggggagccaggcaccaaagccaagaaggggcgtcggagccgcactgtgttcaccgagctgcagctgatgggcctggagaaacgcttcgagaagcagaagtacctttccacgccggacagaatagatcttgctgagtccctgggcctgagccagttgcaggtgaagacgtggtaccagaatcggaggatgaagtggaagaaaatagtgctgcagggcggcggcctggagtctcccaccaagcccaaggggcggcccaagaagaactcaattccaacgagcgagcagcttactgagcaggagcgcgccaaggatgcagagaaaccggcggaggtgccgggcgagcccagcgacaggagccgcgaggactgagggcggtatacggtgcggggcctgggatgcccgcgccacccgcagccccctcactcggcggaaacccgcgagccggcccttccgcgtccaagaagtttacttcctaagcctttttattatgatcttgaatgcggacaattggggccaaacgaggaaggacacagacccaaaagccagacccaggtcccagcgcgcttctgggctctaacctgggagactcgcatccagcccggcggaagctacagtctctaccctgagctccgtggcgcagagcgctccacgcgtattcacgccccgctcctcgcctgcacccccaccccgtctggggcctgccctcccggccggggagcctccaggcacacacccgcttctggacgtcggggacccagcggttgggctcaggccacaacggcctgagattgccccggggcaacccgtcggctcggcctggaggccgggtccccgatgtcgctggggcccctaccccctcttgcgaagacggtgactttttttccaataaaatattttatgacacaatcgggctcggtggagcagcttctgaatccgcagggggtgagggtgggggtgggggtgggctcggcaagataagcggaacgcgggcagttgcttcttaaacttcctttcctccggctctgtcgaaggcagctgtgctcttcaccatcaagcccgggctaggcacggcgggcggctcggtggctgcaggatcctaggaatcgcttccactctgggcgtgaggggccagtctgaactccacctcctctcccttgccagccagagagtcgctggcaggagcggtc

SEQ ID NO: 3167 - DNA, 1323 bp, Homo sapiens
  source 1..1323: mol_type = unassigned DNA
gcctggggaactccaggacagaacacggacagggtcgaggagatactccctcccaaatctggggaacggcaacgttgaggagggtctccatctgcgccaccggcgccgaccggcagggcgtggaggttttgcgctgggaggcactggccaagcgcgagcacccccgcggcacgtggtgcggcagtccctggggcagaggagcgcggccgtagctcacccgggtcctcattctctttcttcgcagccgtgctgaaggccgagcaggcggcggtgttcaagttcccactggcgccgctgggctgttcagggctgagctctgcgttgctggcggcagggcccgggctgcccggcgccgcgggtgcgccacacctgccgctcgagttgcagctccgcgggaagctggaggcggcaggccctggggagccaggcaccaaagccaagaaggggcgtcggagccgcactgtgttcaccgagctgcagctgatgggcctggagaaacgcttcgagaagcagaagtacctttccacgccggacagaatagatcttgctgagtccctgggcctgagccagttgcaggtgaagacgtggtaccagaatcggaggatgaagtggaagaaaatagtgctgcagggcggcggcctggagtctcccaccaagcccaaggggcggcccaagaagaactcaattccaacgagcgagcagcttactgagcaggagcgcgccaaggatgcagagaaaccggcggaggtgccgggcgagcccagcgacaggagccgcgaggactgagggcggtatacggtgcggggcctgggatgcccgcgccacccgcagccccctcactcggcggaaacccgcgagccggcccttccgcgtccaagaagtttacttcctaagcctttttattatgatcttgaatgcggacaattggggccaaacgaggaaggacacagacccaaaagccagacccaggtcccagcgcgcttctgggctctaacctgggagactcgcatccagcccggcggaagctacagtctctaccctgagctccgtggcgcagagcgctccacgcgtattcacgccccgctcctcgcctgcacccccaccccgtctggggcctgccctcccggccggggagcctccaggcacacacccgcttctggacgtcggggacccagcggttgggctcaggccacaacggcctgagattgccccggggcaacccgtcggctcggcctggaggccgggtccccgatgtcgctggggcccctaccccctcttgcgaagacggtgactttttttccaataaaatattttatgacacaa

SEQ ID NO: 3168 - DNA, 1810 bp, Homo sapiens
  source 1..1810: mol_type = unassigned DNA
ggggcccaggccccgccgtcgcgccagccccgcggccccagcgggccgggcactcgcagccgcgctcgggccggcggacgctcgcgccggctcaccatgcactgccacgccgagctgaggctgagctcgcccggccagctcaaagcagccaggcggcgctacaagactttcatgatcgacgagatcctctccaaggagacctgcgattactttgagaaactttccctctactccgtgtgcccgtcgctggtcgtgcgacccaagcccctgcattcctgtacgggctccccttccctgcgggcatatccgctcctctcggtgatcacccgccagcccactgtcatctcccacctggtccctgccaccccgggaatcgcccaggcactgtcctgccaccaggtcaccgaggcggtctctgctgaggccccagggggcgaggccctagccagcagcgagtcagagacggaacagcccacgccccgacagaagaagccccgccggagtcgcaccatcttcaccgagctgcagctcatgggcctggagaagaaattccagaagcagaagtatttgtcaaccccagacaggttggacttggctcagtctctgggactcactcagctgcaggtgaagacctggtatcagaatcgcaggatgaaatggaagaaaatggttcttaaaggtggacaggaagcacccacaaaacccaaaggtcgccccaagaagaactccatccccacatcagaagagattgaagctgaagagaagatgaacagccaggcccagggtcaggagcagctggagccctctcaggggcaggaggagctctgtgaagcacaggaaccgaaagcacgtgatgtccccttagagatggcagagccaccagacccgccccaggagttgccaataccctcttcggaacccccaccattaagctaaagtaaaacccttttgagggaagagggagactggggagaagggaaaagagagaaggcagggagagtagggagagaaaaccttccagcagcccagtaaactgcgggcgaagagatctacccgtctccctccctcccacagttaccattggccttgtcatcgcaagcatttgacaaagacttgcttgtcttgggcctgtcacctcctgaaaggctgctttagctgtggatgcccttgattaagggagagagcgcctaggagctgcctgccccagctggggtgacggctgtagggctgggtctatgttgcaagccctatatcctagcatgcagtggaaagtgcttagctctctccctcctgacctctgggcagccagtcatcaaagcagagagacgtggcggcatgtgggcagcatgcccaggttccttgctgactcagcacttatttctgtagttttaaaaaagaatttaatgtttttggttgtatttttttgggggggtgagggtgggcaaaaacatgggggtagttctgagttgttagaaatgtttctgaatcaagtttgtttgaagacacgtgtgcctttgtacccattataagatggtcataagacccaagaactgataagctttggttttttttttgttttgttttgttttttgcttcatttacccattcatgcctagggttccattattggaaccctaagcttgtgggagttatttctatcctactgctcaaggtcatcaccaagatctgatttttcataaaaaacatttgtgaccttcggcataaatgggttaaggtgccatccctgaaactgcaatgcagatatgttcagataacttttattttttaattaaaaataaatctttcaaaa

SEQ ID NO: 3169 - DNA, 2430 bp, Homo sapiens
  source 1..2430: mol_type = unassigned DNA
ggccgagctgcagcccgggctcagtctccgccgccgccgtgaacatggagcccccggacgcaccggcccaggcgcgcggggccccgcggctgctgttgctcgcagtcctgctggcggcgcacccagatgcccaggcggaggtgcgcttgtctgtacccccgctggtggaggtgatgcgaggaaagtctgtcattctggactgcacccctacgggaacccacgaccattatatgctggaatggttccttaccgaccgctcgggagctcgcccccgcctagcctcggctgagatgcagggctctgagctccaggtcacaatgcacgacacccggggccgcagtcccccataccagctggactcccaggggcgcctggtgctggctgaggcccaggtgggcgacgagcgagactacgtgtgcgtggtgagggcaggggcggcaggcactgctgaggccactgcgcggctcaacgtgtttgcaaagccagaggccactgaggtctcccccaacaaagggacactgtctgtgatggaggactctgcccaggagatcgccacctgcaacagccggaacgggaacccggcccccaagatcacgtggtatcgcaacgggcagcgcctggaggtgcccgtagagatgaacccagagggctacatgaccagccgcacggtccgggaggcctcgggcctgctctccctcaccagcaccctctacctgcggctccgcaaggatgaccgagacgccagcttccactgcgccgcccactacagcctgcccgagggccgccacggccgcctggacagccccaccttccacctcaccctgcactatcccacggagcacgtgcagttctgggtgggcagcccgtccaccccagcaggctgggtacgcgagggtgacactgtccagctgctctgccggggggacggcagccccagcccggagtatacgcttttccgccttcaggatgagcaggaggaagtgctgaatgtgaatctcgaggggaacttgaccctggagggagtgacccggggccagagcgggacctatggctgcagagtggaggattacgacgcggcagatgacgtgcagctctccaagacgctggagctgcgcgtggcctatctggaccccctggagctcagcgaggggaaggtgctttccttacctctaaacagcagtgcagtcgtgaactgctccgtgcacggcctgcccacccctgccctacgctggaccaaggactccactcccctgggcgatggccccatgctgtcgctcagttctatcaccttcgattccaatggcacctacgtatgtgaggcctccctgcccacagtcccggtcctcagccgcacccagaacttcacgctgctggtccaaggctcgccagagctaaagacagcggaaatagagcccaaggcagatggcagctggagggaaggagacgaagtcacactcatctgctctgcccgcggccatccagaccccaaactcagctggagccaattggggggcagccccgcagagccaatccccggacggcagggttgggtgagcagctctctgaccctgaaagtgaccagcgccctgagccgcgatggcatctcctgtgaagcctccaacccccacgggaacaagcgccatgtcttccacttcggcaccgtgagcccccagacctcccaggctggagtggccgtcatggccgtggccgtcagcgtgggcctcctgctcctcgtcgttgctgtcttctactgcgtgagacgcaaagggggcccctgctgccgccagcggcgggagaagggggctccgccgccaggggagccagggctgagccactcggggtcggagcaaccagagcagaccggccttctcatgggaggtgcctccggaggagccaggggtggcagcgggggcttcggagacgagtgctgagccaagaacctcctagaggctgtccctggacctggagctgcaggcatcagagaaccagccctgctcacgccatgcccgcccccgccttccctcttccctcttccctctccctgcccagccctcccttccttcctctgccggcaaggcagggacccacagtggctgcctgcctccgggagggaaggagagggagggtgggtgggtgggagggggccttcctccagggaatgtgactctcccaggccccagaatagctcctggacccaagcccaaggcccagcctgggacaaggctccgagggtcggctggccggagctatttttacctcccgcctcccctgctggtccccccacctgacgtcttgctgcagagtctgacactggattcccccccctcaccccgcccctggtcccactcctgcccccgccctacctccgccccaccccatcatctgtggacactggagtctggaataaatgctgtttgtcacatcaacacc

SEQ ID NO: 3170 - DNA, 2434 bp, Homo sapiens
  source 1..2434: mol_type = unassigned DNA
ggccgagctgcagcccgggctcagtctccgccgccgccgtgaacatggagcccccggacgcaccggcccaggcgcgcggggccccgcggctgctgttgctcgcagtcctgctggcggcgcacccagatgcccaggcggaggtgcgcttgtctgtacccccgctggtggaggtgatgcgaggaaagtctgtcattctggactgcacccctacgggaacccacgaccattatatgctggaatggttccttaccgaccgctcgggagctcgcccccgcctagcctcggctgagatgcagggctctgagctccaggtcacaatgcacgacacccggggccgcagtcccccataccagctggactcccaggggcgcctggtgctggctgaggcccaggtgggcgacgagcgagactacgtgtgcgtggtgagggcaggggcggcaggcactgctgaggccactgcgcggctcaacgtgtttgcaaagccagaggccactgaggtctcccccaacaaagggacactgtctgtgatggaggactctgcccaggagatcgccacctgcaacagccggaacgggaacccggcccccaagatcacgtggtatcgcaacgggcagcgcctggaggtgcccgtagagatgaacccagagggctacatgaccagccgcacggtccgggaggcctcgggcctgctctccctcaccagcaccctctacctgcggctccgcaaggatgaccgagacgccagcttccactgcgccgcccactacagcctgcccgagggccgccacggccgcctggacagccccaccttccacctcaccctgcactatcccacggagcacgtgcagttctgggtgggcagcccgtccaccccagcaggctgggtacgcgagggtgacactgtccagctgctctgccggggggacggcagccccagcccggagtatacgcttttccgccttcaggatgagcaggaggaagtgctgaatgtgaatctcgaggggaacttgaccctggagggagtgacccggggccagagcgggacctatggctgcagagtggaggattacgacgcggcagatgacgtgcagctctccaagacgctggagctgcgcgtggcctatctggaccccctggagctcagcgaggggaaggtgctttccttacctctaaacagcagtgcagtcgtgaactgctccgtgcacggcctgcccacccctgccctacgctggaccaaggactccactcccctgggcgatggccccatgctgtcgctcagttctatcaccttcgattccaatggcacctacgtatgtgaggcctccctgcccacagtcccggtcctcagccgcacccagaacttcacgctgctggtccaaggctcgccagagctaaagacagcggaaatagagcccaaggcagatggcagctggagggaaggagacgaagtcacactcatctgctctgcccgcggccatccagaccccaaactcagctggagccaattggggggcagccccgcagagccaatccccggacggcagggttgggtgagcagctctctgaccctgaaagtgaccagcgccctgagccgcgatggcatctcctgtgaagcctccaacccccacgggaacaagcgccatgtcttccacttcggcaccgtgagcccccagacctcccaggctggagtggccgtcatggccgtggccgtcagcgtgggcctcctgctcctcgtcgttgctgtcttctactgcgtgagacgcaaagggggcccctgctgccgccagcggcgggagaagggggctccgtgagtggcctgctatctgcaatgaccaccatagcttaaccccatccccaccctcaaccccaagctcaacccataacctcaaccacatcttatcctccaccccacatcccaccacatccacctccatccccaacccatcctcatccccaactacagccccaaacccagccccagactaatccacagccatccccaactcatcctcatccccaactgcagccccaaacccaacccagggccatccccaaacccatccccaagccaaactcaacaccatccccttccctaatcacctctcctgcccctagctcagcctcatccccaactccatgcctgtctccaatcccaaccctgcccccaatctcccctcaactccaatccataacccccttcaaaccatcctcaactaagctcctctccagccctggccacatccccatcctcccccaacctccagccccaacacccatcatccccctgagctcacccttaactccaatttatcctccaagcctatctctcaccatccagccctcacctagccatttcccaaccctagtcctccaccgtcccgaagccaacttcacccatgtccccatccccaatcttgtccccattcctgactcc

SEQ ID NO: 3171 - DNA, 1294 bp, Homo sapiens
  source 1..1294: mol_type = unassigned DNA
aatatctcaggacccaggaccatgtgatatgggcccaacacctggatgatgttactcttctgcctaggtcatgcgtaaagagggaattagggcatattgcttggcccagtcccgtaatgatatgactctcctgcttgtgccagagccacagaagtgtgcttggtgacataatctttgaggctgtcacatcaccaagattatattgtatcactggaccagcataaagctgacacttctgactatgcccagccttcaaataatactacactgtataattggctcaacacccaggtgatattgttccatttacctgagaccagataaaaagcctaatgatgacgcttgtccccagagccaggacacgtgcaggacaggatcattactctcatccctgccccagattttcacaggtgctgcttacagagggcatcatgacatattgcttgacaaagaacctaagtgatgttaatattctgcataggttgctaaaaaatgggaatgtgagaaataccttgcttcagtccaaagtgggcttgctgacatattatgtgaaactgtacccgggtgaagtgactcttctgactaggcccagcatacaaatgagattatgctgtatcactggctcagtgtcgaggcccagatcacagaagtaattgtgccatatgtggaacaagcagctaagcaatagataacatccatcgtggctctgccttcaaagggaaattttacatatgtcactgggaccatcacccagatgatgtcctgcccactaaaagaattgtgacataacgctgactgcaaaaactgggtaatgcaactctcctctttattctggagtctgccaaaacaagggattatcacatattgcggagtccagcacccaggtgatgtgagtcttctctgtttctctaagattataatgtatcctgagctcaccatccaggtgatgagactctcctgctctgtttctgcccgcaggtaaaattttgtcatatacccagcttcagataccatgcaataatacaactatcatacctggacccaaagaggagagatattttgattctcattgccattcttatggccacaagcaaagtaatggttctcatagtggtataaagttcacacagtattatgacactcccagcgtatcatagaaaatgtgagtagtacaatgagtgttataacagggaacagcaaaccaatgctattgtgattattggattcacacccagctgacgcgactatcattctctcacaagaacagaacctgcaaataaagtactaaatctca

SEQ ID NO: 3172 - DNA, 1206 bp, Homo sapiens
  source 1..1206: mol_type = unassigned DNA
aatatctcaggacccaggaccatgtgatatgggcccaacacctggatgatgttactcttctgcctaggtcatgcgtaaagagggaattagggcatattgcttggcccagtcccgtaatgatatgactctcctgcttgtgccagagccacagaagtgtgcttggtgacataatctttgaggctgtcacatcaccaagattatattgtatcactggaccagcataaagctgacacttctgactatgcccagccttcaaataatactacactgtataattggctcaacacccaggtgatattgttccatttacctgagaccagataaaaagcctaatgatgacgcttgtccccagagccaggacacgtgcaggacaggatcattactctcatccctgccccagattttcacaggtgctgcttacagagggcatcatgacatattgcttgacaaagaacctaagtgatgttaatattctgcataggttgctaaaaaatgggaatgtgagaaataccttgcttcagtccaaagtgggcttgctgacatattatgtgaaactgtacccgggtgaagtgactcttctgactaggcccagcatacaaatgagattatgctgtatcactggctcagtgtcgaggcccagatcacagaagtaattgtgccatatgtggaacaagcagctaagcaatagataacatccatcgtggctctgccttcaaagggaaattttacatatgtcactgggaccatcacccagatgatgtcctgcccactaaaagaattgtgacataacgctgactgcaaaaactgggtaatgcaactctcctctttattctggagtctgccaaaacaagggattatcacatattgcggagtccagcacccaggtaaaattttgtcatatacccagcttcagataccatgcaataatacaactatcatacctggacccaaagaggagagatattttgattctcattgccattcttatggccacaagcaaagtaatggttctcatagtggtataaagttcacacagtattatgacactcccagcgtatcatagaaaatgtgagtagtacaatgagtgttataacagggaacagcaaaccaatgctattgtgattattggattcacacccagctgacgcgactatcattctctcacaagaacagaacctgcaaataaagtactaaatctcaccaaaa

SEQ ID NO: 3173 - DNA, 3368 bp, Homo sapiens
  source 1..3368: mol_type = unassigned DNA
gtttgttaccgttttaatcctattaattaaaacgttaacctgattgggtagaaagcgctgtcccaacaggcgagtcttcttcataataacctactcagagataatgatgtaaaagactcccccgtctgtggcggcggctgtttgatgggtccggaaatctcttgaaggtgaatccaagcaagataaacggtgcggagaggaggcgcggggctgggctcagagcggcggcggcggcggctccactccctccgcgcccaccctcccaccatgcggggccgcggcccatggtgagccccagcagccagcaccatcggctggagacgaagaagaagaagaagaggaggcggcgagcgcgggggaaggcgaaaaagaaaaagaaagaaggggagagggctcccggcagcaccaggaccgacgcgcgcaccagctccggagcccagctcgcgcgcgtctgtggggccgcctgactccggggccgaggcggcggcggcggcagcgggcgcggcggcccgggctgcgcgccggcgcgggaccatggagcgcgggatgcacctcggtgcagcggccgccggcgaggacgacctcttcctgcacaagagcctgagcgcctccacctccaagcgcttggaagcggctttccgctccacgcccccgggcatggacctgtccctggcgccgccgcctcgggaacgcccggcgtcctcctcctcgtcgcccctgggctgcttcgagccggctgaccccgagggggcagggctgctgttgccgccgcctggaggaggcggcggcggcagcgcgggaagtggcggcggcggcggcggcggggtgggtgtccccgggctgctagtaggttcagccggcgttgggggcgaccctagcctaagcagcctgccggccggggccgccctttgcctcaagtacggcgaaagcgcgagccggggctcggtggccgagagcagcggcggcgagcagagccccgacgacgacagcgacggtcgctgcgagctcgtgctgcgggccggagtagccgacccgcgggcctccccgggagcgggaggtggtggcgcgaaggcagccgagggctgctccaatgcccacctccacggcggcgccagcgtccccccggggggcctgggcggcggcggcggcgggggtagcagcagcggtagcagtggcggcggtggcggtagcggtagcggcagcggcggcagcagcagcagcagcagcagcagcagcaagaaatccaaagagcaaaaggcgctgcggcttaacatcaatgcccgagagcgccggcggatgcacgacctgaacgacgcgctggacgagctgcgcgcggtgatcccctacgcgcacagcccctcggtgcgaaagctctccaagatcgccacgctgctgctcgccaagaactacatcctcatgcaggcgcaggccctggaggagatgcggcgcctagtcgcctacctcaaccagggccaggccatctcggctgcctccctgcccagctcggcggctgcagcggcagcagctgctgccctgcacccggcgctcggcgcctacgagcaggcagccggctacccgttcagcgccggactgcccccggctgcctcctgcccggagaagtgcgccctgtttaacagcgtctcctccagcctctgcaaacagtgcacggagaagccttaaacacacccccgaaaaacacaagaccgacccaaaatctagaggaaagcgaaaagctgctccccaccccctttattttggtcctctcgtagttgtgaaacacttgcagagcaaacaaagcagaggcaagaactgaggagaagtatcagagacaaacgggacttttagccttgacatccccagaatctcggtctttggggtggggagggagggaggagggaggtggagttgggatggagtatggatgtcttttttttctcagaaaagtggcaactttggtggcagcctagaccgcgaggaagtggaatcttccttaaaggtgaaacataagttgagaagtagtgcttggttattaagcctggagagtgtttgaatggcaaaatactaatcctactaataattgtggatttggctagtgctgagggggagaggaggggttaggggttgggtagcatgagagatggaatattcattcagacaaatcagaaagggcacttgaaaataaattttgattctgagccaggagaaaaacttgaaatgttgacttaagtgagggggaaataaaacccagagagagagagagagcgagagagagagacatgttactatgaaagacttgtattttttattgtctctgaactttaatcctgtgaaaatgctcaaagttttggcgagagtgatataaaaaaactgactgtggctgaaagaattgcatttaaaaatatttatgtgcaccttgttactttctactctgcaatgatgtattaacaattcatggtatttatttgttattcttcaatgacccttccacatcaacagtatttatcatgtgttaaagtcatgggtcttatgtgcagatttttttaatgcctctaaaattgttttatagattacttatgctgtgtgccaagtgtttaaaggtttatttgccaacaagtatgaagagaaatattgatgtatctgagctgcttaggtttatgaaaggtcacctggatattttcagttgcatcatccctgtatttaaattgagctttaataaattgcttcagtccaaaaattacaggaaaggtgtattcttaattgatgaatgaattgatctcttttttgaaaggggactcctttacattccaaaagggaaaaacatcacagcaatagttgctatacgtaagaacatgctaagcaaatatttttccaggctgtgctgtgcatttttaaaaggtctaatttaattgcttttaatatatatgtacatatatgttattttaactgtggagaattatttaagttaaaagactggtttgatttgcctatggtgtgaaatcctttgttatttttctaaaaaaataaaatttaaaaagaaagaaaactaaggaagaacaagaagctatttacccaaagtgagctttcagttttagttttgcatggctgtttgactgcctttccgccctatgaaaatcaagaaaatcttttttaaaaatggagtcctgctattttccactccttgcagataatacaaattcagtttgtcaggttggatggtgagttgggagctgtgatggatctgttggcgggttttggatgtgtaaagaatgatatatatattaaataggtcaatcagactatgacagctatgtacgaccatttgtatgtgtatctatgtcagaaagaatctttattaaaatattttgatc

SEQ ID NO: 3174 - DNA, 1057 bp, Homo sapiens
  source 1..1057: mol_type = unassigned DNA
tgattggacagcagcgaggtcccaccgggcgcctccgcggcttaaaaccgaagcgggggcgagggggaggtagagcccgccccctgcgcgtcgcggctgggagggagaggaggtgggagagaaggaagaggcggaggaggcagcgggcgccgaggctctgggacccgcaggcaagccagaccgacgcgcagagccgggagcctcatcgcagcggcagcggcagcggcgggctcgggccggcctcgggggctgctcacccacatgagcatccgcccacccggcgagcccccgagcccaggcggcgcggccatggccgagctcaagtcgctgtcgggggacgcgtacctggcactaagccacggctacgcggcggcggctgcgggtctcgcctacggggcggcgcgagaacccgaagcggcccgcggctacggcactccgggcccgggcggcgacctccccgcggcgcctgcacctcgcgccccagctcaggcggcggagagcagcggcgaacagagcggggacgaggacgacgccttcgagcagcggcggcggcggcgcgggccagggagcgcggcggacgggcggcggcggccgcgagagcagcggtctctgcggctcagcatcaacgcgcgcgagcggcggcgcatgcacgacctaaacgacgcgctggacgggctgcgagccgtcatcccctacgcgcacagcccgtcggtgcgcaagctctccaagatcgccacgctgctgctcgccaagaactatatcctcatgcaggcgcaggccctggacgagatgcggcgcctggtggccttcctcaaccagggccagggcctggccgcgcccgtaaacgccgcgcccttgacgcccttcggccaggccactgtgtgccccttctccgcaggcgccgccctggggccctgccctgacaagtgcgccgccttctccgggacgccctccgcgctttgcaaacactgtcacgagaagccgtgaccgcgcgggcccccggccctcccgcacgcgtcctccgatcgcccctgtgactgtctctctgcccggacag

SEQ ID NO: 3175 - DNA, 3473 bp, Homo sapiens
  source 1..3473: mol_type = unassigned DNA
gcggccgcagccgcagacacctgggggccggggctgggggtgggggctccctagcagccgccggagcgttgtccaacacgtgagactcatgtgatgaagccgggggagggcgggcaggtcgctccttccctccccggcagtggccagacgtgcctggagtcacagggtagaacacgtagctccaacccacccactcgctcccatttaacccagcccgcagcctctccattactcctcggcttgcccccccacccccccactccgccctaaccgcccccccctcacccgctccctcccgcctccccgcccgccccacttctcattcacttggctcgcacggcgcagacagaccgcgcagggagcacacaccgccagtctgtgcgctgagtcggagccagaggccgcggggacaccgggccatgcacgcccccaactgaagctgcatctcaaagccgaagattccagcagcccaggggatttcaaagagctcagactcagaggaacatctgcggagagacccccgaagccctctccagggcagtcctcatccagacgctccgctagtgcagacaggagcgcgcagtggccccggctcgccgcgccatggagcggatccccagcgcgcaaccaccccccgcctgcctgcccaaagcaccgggactggagcacggagacctaccagggatgtaccctgcccacatgtaccaagtgtacaagtcaagacggggaataaagcggagcgaggacagcaaggagacctacaaattgccgcaccggctcatcgagaaaaagagacgtgaccggattaacgagtgcatcgcccagctgaaggatctcctacccgaacatctcaaacttacaactttgggtcacttggaaaaagcagtggttcttgaacttaccttgaagcatgtgaaagcactaacaaacctaattgatcagcagcagcagaaaatcattgccctgcagagtggtttacaagctggtgagctgtcagggagaaatgtcgaaacaggtcaagagatgttctgctcaggtttccagacatgtgcccgggaggtgcttcagtatctggccaagcacgagaacactcgggacctgaagtcttcgcagcttgtcacccacctccaccgggtggtctcggagctgctgcagggtggtacctccaggaagccatcagacccagctcccaaagtgatggacttcaaggaaaaacccagctctccggccaaaggttcggaaggtcctgggaaaaactgcgtgccagtcatccagcggactttcgctcactcgagtggggagcagagcggcagcgacacggacacagacagtggctatggaggagaatcggagaagggcgacttgcgcagtgagcagccgtgcttcaaaagtgaccacggacgcaggttcacgatgggagaaaggatcggcgcaattaagcaagagtccgaagaaccccccacaaaaaagaaccggatgcagctttcggatgatgaaggccatttcactagcagtgacctgatcagctccccgttcctgggcccacacccacaccagcctcctttctgcctgcccttctacctgatcccaccttcagcgactgcctacctgcccatgctggagaagtgctggtatcccacctcagtgccagtgctatacccaggcctcaacgcctctgccgcagccctctctagcttcatgaacccagacaagatctcggctcccttgctcatgccccagagactcccttctcccttgccagctcatccgtccgtcgactcttctgtcttgctccaagctctgaagccaatcccccctttaaacttagaaaccaaagactaaactctctaggggatcctgctgctttgctttccttcctcgctacttcctaaaaagcaacaaaaaagtttttgtgaatgctgcaagattgttgcattgtgtatactgagataatctgaggcatggagagcagattcagggtgtgtgtgtgtgtgtgtgtgtgtgtatgtgcgtgtgcgtgcacatgtgtgcctgcgtgttggtataggactttaaagctccttttggcatagggaagtcacgaaggattgcttgacatcaggagacttgggggggattgtagcagacgtctgggcttttccccacccagagaatagcccccttcgatacacatcagctggattttcaaaagcttcaaagtcttggtctgtgagtcactcttcagtttgggagctgggtctgtggctttgatcagaaggtactttcaaaagagggctttccagggctcagctcccaaccagctgttaggaccccacccttttgcctttattgtcgacgtgactcaccagacgtcggggagagagagcagtcagaccgagctttctgctaacatggggaggtagcaggcactggcatagcacggtagtggtttggggaggtttccgcaggtctgctccccacccctgcctcggaagaataaagagaatgtagttccctactcaggctttcgtagtgattagcttactaaggaactgaaaatgggccccttgtacaagctgagctgccccggagggagggaggagttccctgggcttctggcacctgtttctaggcctaaccattagtacttactgtgcagggaaccaaaccaaggtctgagaaatgcggacaccccgagcgagcaccccaaagtgcacaaagctgagtaaaaagctgcccccttcaaacagaactagactcagttttcaattccatcctaaaactccttttaaccaagcttagcttctcaaaggcctaaccaagccttggcaccgccagatcctttctgtaggctaattcctcttgcccaacggcatatggagtgtccttattgctaaaaaggattccgtctccttcaaagaagttttatttttggtccagagtacttgttttcccgatgtgtccagccagctccgcagcagcttttcaaaatgcactatgcctgattgctgatcgtgttttaactttttcttttcctgtttttattttggtattaagtcgttgcctttatttgtaaagctgttataaatatatattatataaatatattaaaaaggaaaatgtttcagatgtttatttgtataattacttgattcacacagtgagaaaaaatgaatgtattcctgtttttgaagagaagaataattttttttttctctagggagaggtacagtgtttatattttggagccttcctgaaggtgtaaaattgtaaatatttttatctatgagtaaatgttaagtagttgttttaaaatacttaataaaataattcttttcctgtggaagagaaagatggtctcctgagttttttaaaatagctcacttggtgtgatatggctgactcccatgtccttctttcttggctgaagcaaaccagttaatctcagtgtaatttcattcagcttttcatgtgctttgtattcaatcagaata

SEQ ID NO: 3176 - DNA, 980 bp, Homo sapiens
  source 1..980: mol_type = unassigned DNA
gagttaccagaaaccacaagagagagagagagcgtgcaagccccaaagcgagcgacatgtccctttggggagcagtccctctgcaccccagagtgaggaggacgcaggggtcagaggtggctacagggcaggcagaggaggcacctgtagggggtggtgggctggtggcccaggagaagtcaggaagggagcccagctggtgacaagagagcccagaggtgcctggggctgagtgtgagagcccggaagatttcagccatgcctcacagctccgacagcagtgactccagcttcagccgctctcctccccctggcaaacaggactcatctgatgatgtgagaagagttcagaggagggagaaaaatcgtattgccgcccagaagagccgacagaggcagacacagaaggccgacaccctgcacctggagagcgaagacctggagaaacagaacgcggctctacgcaaggagatcaagcagctcacagaggaactgaagtacttcacgtcggtgctgaacagccacgagcccctgtgctcggtgctggccgccagcacgccctcgccccccgaggtggtgtacagcgcccacgcattccaccaacctcatgtcagctccccgcgcttccagccctgagcttccgatgcggggagagcagagcctcgggaggggcacacagactgtggcagagctgcgcccatcccgcagaggcccctgtccacctggagacccggagacagaggcctggacaaggagtgaacacgggaactgtcacgactggaagggcgtgaggcctcccagcagtgccgcagcgtttcgaggggcgtgtgctggaccccaccactgtgggttgcaggcccaatgcagaagagtattaagaaagatgctcaagtcccatggcacagagcaaggcgggcagggaacggttatttttctaaataaatgctttaaaagaaaccagtctgacaaggcagtttctc

SEQ ID NO: 3177 - DNA, 980 bp, Homo sapiens
  source 1..980: mol_type = unassigned DNA
ggggcagacgtgggacgggaaggacggctgccgggactggcgcgcggggacactgggccgacgcgtggagtagcggggagagcgggaagcctgagggggcggggccggcgcgaggccgtgggtgcggcacgaggatgccggcggcgggacagcgcccgtaggcagccccacgggcagggcgcgcgggcggggcggggcgggccgggccagaggagcgcccggcatgtcgcaagggctcccggccgccggcagcgtcctgcagaggagcgtcgcggcgcccgggaaccagccgcagccgcagccgcagcagcagagccctgaggatgatgacaggaaggtccgaaggagagaaaaaaaccgagttgctgctcagagaagtcggaagaagcagacccagaaggctgacaagctccatgaggaatatgagagcctggagcaagaaaacaccatgctgcggagagagatcgggaagctgacagaggagctgaagcacctgacagaggcactgaaggagcacgagaagatgtgcccgctgctgctctgccctatgaactttgtgccagtgcctccccggccggaccctgtggccggctgcttgccccgatgaagccggggacactcctctgcccagcaaggagccttggtcattttcatacctgggaggaaggcttttccttcacaattgtatacagggggcacctgtggccaggcctcctcctgggagctccaggaccagccagctgtgttccctgcagactgggctcagcccgacatccaacaggcgccaaactcacagagcccttgtgcagatccagcatggaggccaccctcaggagtgacttctcatccaccctggcagctagtaggttctgctgttatgcagagccatttcctctagaatttggataataaagatgcttattgtctctcccttctccagttctgggaatttacaggcacaatacacttccttttcctgg

SEQ ID NO: 3178 - DNA, 897 bp, Homo sapiens
  source 1..897: mol_type = unassigned DNA
cttgaaggaagtggccttgtgtcacttccggcctccctttagctgccatcttgcgtccccgcgtgtgtgcgcctaatctcaggtggtccacccgagaccccttgagcaccaaccctagtcccccgcgcggccccttattcgctccgacaagatgaaagaaacaatcatgaaccaggaaaaactcgccaaactgcaggcacaagtgcgcattggtgggaaaggaactgctcgcagaaagaagaaggtggttcatagaacagccacagcagatgacaaaaaacttcagttctccttaaagaagttaggggtaaacaatatctctggtattgaagaggtgaatatgtttacaaaccaaggaacagtgatccactttaacaaccctaaagttcaggcatctctggcagcgaacactttcaccattacaggccatgctgagacaaagcagctgacagaaatgctacccagcatcttaaaccagcttggtgcggatagtctgactagtttaaggagactggccgaagctctgcccaaacaatctgtggatggaaaagcaccacttgctactggagaggatgatgatgatgaagttccagatcttgtggagaattttgatgaggcttccaagaatgaggcaaactgaattgagtcaacttctgaagataaaacctgaagaagttactgggagctgctattttatattatgactgctttttaagaaatttttgtttatggatctgataaaatctagatctctaatatttttaagcccaagccccttggacactgcagctcttttcagtttttgcttatacacaattcattctttgcagctaattaagccgaagaagcctgggaatcaagtttgaaacaaagattaataaagttctttgcctagta

SEQ ID NO: 3179 - DNA, 1237 bp, Homo sapiens
  source 1..1237: mol_type = unassigned DNA
gctgccatcttgcgtccccgcgtgtgtgcgcctaatctcaggtggtccacccgagaccccttgagcaccaaccctagtcccccgcgcggccccttattcgctccgacaaggtacaaaaaggctctggacggcggcgtggtaggaggacgggagcgggggcgggaagttccctgaaggagcgagacagggagggacagggcagaggaggagaggaaggcgatgcgacggacaggcgcacccgctcaggctgactctcgggggcgaggtcgagccaggggcggctgccctgggggcgaggcgacgctgtctcaacctccacctcgcggcggaacccgaggacaggagcctcagatgaaagaaacaatcatgaaccaggaaaaactcgccaaactgcaggcacaagtgcgcattggtgggaaaggaactgctcgcagaaagaagaaggtggttcatagaacagccacagcagatgacaaaaaacttcagttctccttaaagaagttaggggtaaacaatatctctggtattgaagaggtgaatatgtttacaaaccaaggaacagtgatccactttaacaaccctaaagttcaggcatctctggcagcgaacactttcaccattacaggccatgctgagacaaagcagctgacagaaatgctacccagcatcttaaaccagcttggtgcggatagtctgactagtttaaggagactggccgaagctctgcccaaacaatctgtggatggaaaagcaccacttgctactggagaggatgatgatgatgaagttccagatcttgtggagaattttgatgaggcttccaagaatgaggcaaactgaattgagtcaacttctgaagataaaacctgaagaagttactgggagctgctattttatattatgactgctttttaagaaatttttgtttatggatctgataaaatctagatctctaatatttttaagcccaagccccttggacactgcagctcttttcagtttttgcttatacacaattcattctttgcagctaattaagccgaagaagcctgggaatcaagtttgaaacaaagattaataaagttctttgcctagtatacagttttatttttttatttcattgacaccgatctgtacacagtaaaaaaaattgcttatagaaagctaatcatggcatgtaatatggctgataacctttggaatttgattaaagatttaaaatcacggtgtagtgtaa

SEQ ID NO: 3180 - DNA, 2004 bp, Homo sapiens
  source 1..2004: mol_type = unassigned DNA
gtgcgcgcgcccggtccgcgcctccgccgctttttatagcggccgcgggcggcggcggcagcggttggaggttgtaggaccggcgaggaataggaatcatggcggctgcgctgttcgtgctgctgggattcgcgctgctgggcacccacggagcctccggggctgccggcttcgtccaggcgccgctgtcccagcagaggtgggtggggggcagtgtggagctgcactgcgaggccgtgggcagcccggtgcccgagatccagtggtggtttgaagggcagggtcccaacgacacctgctcccagctctgggacggcgcccggctggaccgcgtccacatccacgccacctaccaccagcacgcggccagcaccatctccatcgacacgctcgtggaggaggacacgggcacttacgagtgccgggccagcaacgacccggatcgcaaccacctgacccgggcgcccagggtcaagtgggtccgcgcccaggcagtcgtgctagtcctggaacccggcacagtcttcactaccgtagaagaccttggctccaagatactcctcacctgctccttgaatgacagcgccacagaggtcacagggcaccgctggctgaaggggggcgtggtgctgaaggaggacgcgctgcccggccagaaaacggagttcaaggtggactccgacgaccagtggggagagtactcctgcgtcttcctccccgagcccatgggcacggccaacatccagctccacgggcctcccagagtgaaggctgtgaagtcgtcagaacacatcaacgagggggagacggccatgctggtctgcaagtcagagtccgtgccacctgtcactgactgggcctggtacaagatcactgactctgaggacaaggccctcatgaacggctccgagagcaggttcttcgtgagttcctcgcagggccggtcagagctacacattgagaacctgaacatggaggccgaccccggccagtaccggtgcaacggcaccagctccaagggctccgaccaggccatcatcacgctccgcgtgcgcagccacctggccgccctctggcccttcctgggcatcgtggctgaggtgctggtgctggtcaccatcatcttcatctacgagaagcgccggaagcccgaggacgtcctggatgatgacgacgccggctctgcacccctgaagagcagcgggcagcaccagaatgacaaaggcaagaacgtccgccagaggaactcttcctgaggcaggtggcccgaggacgctccctgctccacgtctgcgccgccgccggagtccactcccagtgcttgcaagattccaagttctcacctcttaaagaaaacccaccccgtagattcccatcatacacttccttcttttttaaaaaagttgggttttctccattcaggattctgttccttaggtttttttccttctgaagtgtttcacgagagcccgggagctgctgccctgcggccccgtctgtggctttcagcctctgggtctgagtcatggccgggtgggcggcacagccttctccactggccggagtcagtgccaggtccttgccctttgtggaaagtcacaggtcacacgaggggccccgtgtcctgcctgtctgaagccaatgctgtctggttgcgccatttttgtgcttttatgtttaattttatgagggccacgggtctgtgttcgactcagcctcagggacgactctgacctcttggccacagaggactcacttgcccacaccgagggcgaccccgtcacagcctcaagtcactcccaagccccctccttgtctgtgcatccgggggcagctctggagggggtttgctggggaactggcgccatcgccgggactccagaaccgcagaagcctccccagctcacccctggaggacggccggctctctatagcaccagggctcacgtgggaacccccctcccacccaccgccacaataaagatcgcccccacctccaccctc

SEQ ID NO: 3181 - DNA, 1604 bp, Homo sapiens
  source 1..1604: mol_type = unassigned DNA
agttagcccttcgcgttcggcttagtctgcggtcctcttgcattgcgactccgagtttaacttccaacacacactttcaacctccaagagacgcccccacctgtgtcgccccaatagcgacttttctcaccgtggtcgccgcggaacttcaagggtccttcctacccgcgttgctgagagtctgggtttacgcgtcacctcgggcgggacccgatcctccgctcctgaggcccccacaatgaagcagtcggacgcgtctccccaagaaagggtggactccgacgaccagtggggagagtactcctgcgtcttcctccccgagcccatgggcacggccaacatccagctccacgggcctcccagagtgaaggctgtgaagtcgtcagaacacatcaacgagggggagacggccatgctggtctgcaagtcagagtccgtgccacctgtcactgactgggcctggtacaagatcactgactctgaggacaaggccctcatgaacggctccgagagcaggttcttcgtgagttcctcgcagggccggtcagagctacacattgagaacctgaacatggaggccgaccccggccagtaccggtgcaacggcaccagctccaagggctccgaccaggccatcatcacgctccgcgtgcgcagccacctggccgccctctggcccttcctgggcatcgtggctgaggtgctggtgctggtcaccatcatcttcatctacgagaagcgccggaagcccgaggacgtcctggatgatgacgacgccggctctgcacccctgaagagcagcgggcagcaccagaatgacaaaggcaagaacgtccgccagaggaactcttcctgaggcaggtggcccgaggacgctccctgctccacgtctgcgccgccgccggagtccactcccagtgcttgcaagattccaagttctcacctcttaaagaaaacccaccccgtagattcccatcatacacttccttcttttttaaaaaagttgggttttctccattcaggattctgttccttaggtttttttccttctgaagtgtttcacgagagcccgggagctgctgccctgcggccccgtctgtggctttcagcctctgggtctgagtcatggccgggtgggcggcacagccttctccactggccggagtcagtgccaggtccttgccctttgtggaaagtcacaggtcacacgaggggccccgtgtcctgcctgtctgaagccaatgctgtctggttgcgccatttttgtgcttttatgtttaattttatgagggccacgggtctgtgttcgactcagcctcagggacgactctgacctcttggccacagaggactcacttgcccacaccgagggcgaccccgtcacagcctcaagtcactcccaagccccctccttgtctgtgcatccgggggcagctctggagggggtttgctggggaactggcgccatcgccgggactccagaaccgcagaagcctccccagctcacccctggaggacggccggctctctatagcaccagggctcacgtgggaacccccctcccacccaccgccacaataaagatcgcccccacctccaccctc

SEQ ID NO: 3182 - DNA, 1656 bp, Homo sapiens
  source 1..1656: mol_type = unassigned DNA
gtgcgcgcgcccggtccgcgcctccgccgctttttatagcggccgcgggcggcggcggcagcggttggaggttgtaggaccggcgaggaataggaatcatggcggctgcgctgttcgtgctgctgggattcgcgctgctgggcacccacggagcctccggggctgccggcacagtcttcactaccgtagaagaccttggctccaagatactcctcacctgctccttgaatgacagcgccacagaggtcacagggcaccgctggctgaaggggggcgtggtgctgaaggaggacgcgctgcccggccagaaaacggagttcaaggtggactccgacgaccagtggggagagtactcctgcgtcttcctccccgagcccatgggcacggccaacatccagctccacgggcctcccagagtgaaggctgtgaagtcgtcagaacacatcaacgagggggagacggccatgctggtctgcaagtcagagtccgtgccacctgtcactgactgggcctggtacaagatcactgactctgaggacaaggccctcatgaacggctccgagagcaggttcttcgtgagttcctcgcagggccggtcagagctacacattgagaacctgaacatggaggccgaccccggccagtaccggtgcaacggcaccagctccaagggctccgaccaggccatcatcacgctccgcgtgcgcagccacctggccgccctctggcccttcctgggcatcgtggctgaggtgctggtgctggtcaccatcatcttcatctacgagaagcgccggaagcccgaggacgtcctggatgatgacgacgccggctctgcacccctgaagagcagcgggcagcaccagaatgacaaaggcaagaacgtccgccagaggaactcttcctgaggcaggtggcccgaggacgctccctgctccacgtctgcgccgccgccggagtccactcccagtgcttgcaagattccaagttctcacctcttaaagaaaacccaccccgtagattcccatcatacacttccttcttttttaaaaaagttgggttttctccattcaggattctgttccttaggtttttttccttctgaagtgtttcacgagagcccgggagctgctgccctgcggccccgtctgtggctttcagcctctgggtctgagtcatggccgggtgggcggcacagccttctccactggccggagtcagtgccaggtccttgccctttgtggaaagtcacaggtcacacgaggggccccgtgtcctgcctgtctgaagccaatgctgtctggttgcgccatttttgtgcttttatgtttaattttatgagggccacgggtctgtgttcgactcagcctcagggacgactctgacctcttggccacagaggactcacttgcccacaccgagggcgaccccgtcacagcctcaagtcactcccaagccccctccttgtctgtgcatccgggggcagctctggagggggtttgctggggaactggcgccatcgccgggactccagaaccgcagaagcctccccagctcacccctggaggacggccggctctctatagcaccagggctcacgtgggaacccccctcccacccaccgccacaataaagatcgcccccacctccaccctc

SEQ ID NO: 3183 - DNA, 1761 bp, Homo sapiens
  source 1..1761: mol_type = unassigned DNA
agttagcccttcgcgttcggcttagtctgcggtcctcttgcattgcgactccgagtttaacttccaacacacactttcaacctccaagagacgcccccacctgtgtcgccccaatagcgacttttctcaccgtggtcgccgcggaacttcaagggtccttcctacccgcgttgctgagagtctgggtttacgcgtcacctcgggcgggacccgatcctccgctcctgaggcccccacaatgaagcagtcggacgcgtctccccaagaaagccggcacagtcttcactaccgtagaagaccttggctccaagatactcctcacctgctccttgaatgacagcgccacagaggtcacagggcaccgctggctgaaggggggcgtggtgctgaaggaggacgcgctgcccggccagaaaacggagttcaaggtggactccgacgaccagtggggagagtactcctgcgtcttcctccccgagcccatgggcacggccaacatccagctccacgggcctcccagagtgaaggctgtgaagtcgtcagaacacatcaacgagggggagacggccatgctggtctgcaagtcagagtccgtgccacctgtcactgactgggcctggtacaagatcactgactctgaggacaaggccctcatgaacggctccgagagcaggttcttcgtgagttcctcgcagggccggtcagagctacacattgagaacctgaacatggaggccgaccccggccagtaccggtgcaacggcaccagctccaagggctccgaccaggccatcatcacgctccgcgtgcgcagccacctggccgccctctggcccttcctgggcatcgtggctgaggtgctggtgctggtcaccatcatcttcatctacgagaagcgccggaagcccgaggacgtcctggatgatgacgacgccggctctgcacccctgaagagcagcgggcagcaccagaatgacaaaggcaagaacgtccgccagaggaactcttcctgaggcaggtggcccgaggacgctccctgctccacgtctgcgccgccgccggagtccactcccagtgcttgcaagattccaagttctcacctcttaaagaaaacccaccccgtagattcccatcatacacttccttcttttttaaaaaagttgggttttctccattcaggattctgttccttaggtttttttccttctgaagtgtttcacgagagcccgggagctgctgccctgcggccccgtctgtggctttcagcctctgggtctgagtcatggccgggtgggcggcacagccttctccactggccggagtcagtgccaggtccttgccctttgtggaaagtcacaggtcacacgaggggccccgtgtcctgcctgtctgaagccaatgctgtctggttgcgccatttttgtgcttttatgtttaattttatgagggccacgggtctgtgttcgactcagcctcagggacgactctgacctcttggccacagaggactcacttgcccacaccgagggcgaccccgtcacagcctcaagtcactcccaagccccctccttgtctgtgcatccgggggcagctctggagggggtttgctggggaactggcgccatcgccgggactccagaaccgcagaagcctccccagctcacccctggaggacggccggctctctatagcaccagggctcacgtgggaacccccctcccacccaccgccacaataaagatcgcccccacctccaccctc

SEQ ID NO: 3184 - DNA, 4610 bp, Homo sapiens
  source 1..4610: mol_type = unassigned DNA
ggcgggggcggccatcgtgctgcgcagcctgggcgcttggggagccgcccacttcgccgggtcgcgccccgacggccggagcgtggatgcggcggcgcccgccgagccggggcggacgcggggcggcccgggcccgggagacgcgccggcagccccggcaccgcagcggtcgcaggatggccgaggctatcagctgtactctgaactgtagttgccaaagtttcaaacccgggaaaataaaccaccgtcagtgtgaccaatgcaagcatggatgggtggcccacgctctaagtaagctaaggatcccccccatgtatccaacaagccaggtggagattgtccagtccaatgtagtgtttgatattagcagcctcatgctctatgggacccaggccatccccgttcgcctaaaaatcctactggaccggctcttcagtgtgttgaagcaagatgaggttctccagatcctccatgccttggactggacacttcaggattatatccgtggatacgtactgcaggatgcatcaggaaaggtgttggatcactggagcatcatgaccagtgaggaagaagtggccaccttgcagcagttccttcgttttggagagaccaaatctatagttgaactcatggcaattcaagagaaagaagagcaatccatcatcataccaccttccacagcaaatgtagatatcagggctttcatcgagagctgcagtcacaggagttctagcctccccactcctgtggacaaaggaaaccccagcagtatacacccctttgagaacctcataagcaacatgactttcatgctgcctttccagttcttcaaccctctgcctcctgcactgatagggtcattgcccgaacaatatatgttggagcagggtcatgaccaaagtcaggaccccaaacaggaagtccatgggcccttccctgacagcagcttcttaacttccagttccacaccatttcaggttgaaaaagatcagtgtttaaactgtccggatgctattactaaaaaagaagacagcacccatttaagtgactccagctcatacaacattgtcactaagtttgaaaggacacagttatcccctgaggccaaagtgaagcctgagaggaatagccttggtacaaagaagggccgggtgttctgcactgcatgtgagaagaccttctatgacaaaggcaccctcaaaatccactacaatgccgtccacttgaagatcaagcataagtgcaccatcgaagggtgtaacatggtgttcagctccctaaggagccggaatcgccatagcgccaaccccaaccctcggctgcacatgccaatgaacagaaataaccgggacaaagacctcaggaacagcctgaacctggccagctctgagaactacaagtgcccaggtttcacagtgacgtccccagactgtaggcctcctcccagctaccctggttcaggagaggattccaaaggccaaccagccttcccaaacattgggcaaaatggtgtgctttttcccaacctaaagacagtccagccagtccttcctttctaccgcagtccagccacgcctgccgaggtagcaaacacgcctgggatactcccttccctcccgctgttgtcctcttcaatcccagaacagctcatttcaaacgaaatgccatttgatgcccttcccaagaagaaatccaggaagtccagtatgcctatcaaaatagagaaagaagctgtggaaatagctaatgagaaaagacacaacctcagctcagatgaagacatgcccctacaggtggtcagtgaagatgagcaggaggcctgcagtcctcagtcacacagagtatctgaggagcagcatgtacagtcaggaggcttagggaagcctttccctgaaggggagaggccctgccatcgtgaatcagtaattgagtccagtggagccatcagccaaacccctgagcaggccacacacaattcagagagggagactgagcagacaccagcattgatcatggtgccaagggaggtcgaggatggtggccatgaacactacttcacacctgggatggaaccccaagttcctttttctgactacatggaactgcagcagcgcctgctggctgggggactcttcagtgctttgtccaacaggggaatggcttttccttgtcttgaagattctaaagaactggagcacgtgggtcagcatgcattagcaaggcagatagaagaaaatcgcttccagtgtgacatctgcaagaagacctttaaaaatgcttgtagtgtgaaaattcatcacaagaatatgcatgtcaaagaaatgcacacatgcacagtggagggctgtaatgctacctttccctcccgcaggagcagagacagacacagctcaaacctaaacctccaccaaaaagcattgagccaggaagcattggagagtagtgaagatcatttccgtgcagcttaccttctgaaagatgtggctaaggaagcctatcaggatgtggcttttacacagcaagcctcccagacatctgtcatcttcaaaggaacaagtcgaatgggcagtctggtttacccaataacgcaagtccacagtgccagcctggagagctacaactctggccccttgagcgagggcaccatcctggatttgagcactacctcgagcatgaagtcagagagtagcagccattcttcctgggactctgacggggtgagtgaggaaggcactgtgcttatggaggacagtgatgggaactgtgaagggtcgagccttgtccctggggaagatgagtaccccatctgtgtcctgatggagaaggctgaccagagccttgctagcctgccttctgggttgcccataacctgtcatctctgccaaaagacatacagtaacaaagggacctttagggcccactacaaaactgtgcacctccggcagctccacaaatgcaaagtaccaggctgcaacaccatgttttcgtctgttcgcagtcgaaacagacacagccagaatcccaacctgcacaaaagcctggcctcatctccaagtcacctccagtaacaagatggcaaaccaagtatgctcagataagcttttttcataattcaggaataaagtagtccatagaaatgtttctgtttcatatcatttggggcgagtcaggcaaaagtatttgatttgactttatagttttccacagcacaatgagcaaaagacaaacctcgtgggaagatgacactggggcagcccttcctattatttttcttagcccaagaggtctttcactgatacaaggaaaacttgcagaaatgtgatttttcccagatttgtttacatgttccctgggacagatccaggtctgcagatcgacaccagtgggcccaggacctgggggtggctttaaatgaggcttgcagtgttaaaggtcttggataagaagggtcctggggaagaagactctgtggacaagataccagtccccaaaacagcattttcagttccttcttcaattagtttgaaatccagacctgagtttggaagactgattttttgagaccatccctgtgtttggagtggataattgtccctcccctcagccctgcaccagaggtctcatatgttaccccagggagttctcagaggattgggttggcctctaacatgttccttgttaattcttgttctgtaacatgcattcaagaagctaggggaaaaatatctcatgcacttaaataatggtcttcaatttaatttaaaaatattttgacaatatttaatttgtgcttatgtggtgtttggtgtgagtgcagatattgcactgtgtcacctctggatctctgctcagaagcagaacaagtgatgacctaaatgtcaaaatcactgctcgttttcatttggtgaacttcaaactctgttctttttggtcacctgtggaatgaatgcaagcatgattttggcaggaacatttgtacatattctgccgtagataatgtggttctgatggttgttgtgtattttcagtatcactggatccctcagtcttcaccgttttataaacgtataagattaggatgaacttttgaatttacttggtaggaaaaaaagtaggacattattgccatattgtatgtcttaatatttaacttattcggaaatatattccacactgttacatacattttccatggtagaaaggaagttcagtcagtcctgtggaatgaaaccatctcctaaaattcagcatttgcagcattctaaaagcctgtgtaggtacaaggacattgattttgtattcagaattcaagttaactatcttttaaattcgtggttgatgtaagtaataaaaaacattcttaaagttgagggttataagagagattatttctgtggtctaaaggttaaaaagccaacaacctgttaccaattatttcagctttttttgttttaataagtgtgacaacttaaaacttgtttctatttaaagtgaaatgtatctttcaactgtttagttacccagctgtttaatattccagtcttcccaaagtgaaaagatttgtatacaaatgttttctatgatttaataaaaatatatggcacacc

SEQ ID NO: 3185 - DNA, 3187 bp, Homo sapiens
  source 1..3187: mol_type = unassigned DNA
gtcggttccgtgctgggagccggagttcctcgggatttgtcagccagatgtgacaagattgtggcgaggcgagtgaaggagatctgatattaatcagcgcgtagctccgagccaaactttcacaaatgcggtgtagaaacatgttcttctcatttaaggcatctctttgtggctgcggggctgccaccgctccgagtctgacagctatcagctgtactctgaactgtagttgccaaagtttcaaacccgggaaaataaaccaccgtcagtgtgaccaatgcaagcatggatgggtggcccacgctctaagtaagctaaggatcccccccatgtatccaacaagccaggtggagattgtccagtccaatgtagtgtttgatattagcagcctcatgctctatgggacccaggccatccccgttcgcctaaaaatcctactggaccggctcttcagtgtgttgaagcaagatgaggttctccagatcctccatgccttggactggacacttcaggattatatccgtggatacgtactgcaggatgcatcaggaaaggtgttggatcactggagcatcatgaccagtgaggaagaagtggccaccttgcagcagttccttcgttttggagagaccaaatctatagttgaactcatggcaattcaagagaaagaagagcaatccatcatcataccaccttccacagcaaatgtagatatcagggctttcatcgagagctgcagtcacaggagttctagcctccccactcctgtggacaaaggaaaccccagcagtatacacccctttgagaacctcataagcaacatgactttcatgctgcctttccagttcttcaaccctctgcctcctgcactgatagggtcattgcccgaacaatatatgttggagcagggtcatgaccaaagtcaggaccccaaacaggaagtccatgggcccttccctgacagcagcttcttaacttccagttccacaccatttcaggttgaaaaagatcagtgtttaaactgtccggatgctattactaaaaaagaagacagcacccatttaagtgactccagctcatacaacattgtcactaagtttgaaaggacacagttatcccctgaggccaaagtgaagcctgagaggaatagccttggtacaaagaagggccgggtgttctgcactgcatgtgagaagaccttctatgacaaaggcaccctcaaaatccactacaatgccgtccacttgaagatcaagcataagtgcaccatcgaagggtgtaacatggtgttcagctccctaaggagccggaatcgccatagcgccaaccccaaccctcggctgcacatgccaatgaacagaaataaccgggacaaagacctcaggaacagcctgaacctggccagctctgagaactacaagtgcccaggtttcacagtgacgtccccagactgtaggcctcctcccagctaccctggttcaggagaggattccaaaggccaaccagccttcccaaacattgggcaaaatggtgtgctttttcccaacctaaagacagtccagccagtccttcctttctaccgcagtccagccacgcctgccgaggtagcaaacacgcctgggatactcccttccctcccgctgttgtcctcttcaatcccagaacagctcatttcaaacgaaatgccatttgatgcccttcccaagaagaaatccaggaagtccagtatgcctatcaaaatagagaaagaagctgtggaaatagctaatgagaaaagacacaacctcagctcagatgaagacatgcccctacaggtggtcagtgaagatgagcaggaggcctgcagtcctcagtcacacagagtatctgaggagcagcatgtacagtcaggaggcttagggaagcctttccctgaaggggagaggccctgccatcgtgaatcagtaattgagtccagtggagccatcagccaaacccctgagcaggccacacacaattcagagagggagactgagcagacaccagcattgatcatggtgccaagggaggtcgaggatggtggccatgaacactacttcacacctgggatggaaccccaagttcctttttctgactacatggaactgcagcagcgcctgctggctgggggactcttcagtgctttgtccaacaggggaatggcttttccttgtcttgaagattctaaagaactggagcacgtgggtcagcatgcattagcaaggcagatagaagaaaatcgcttccagtgtgacatctgcaagaagacctttaaaaatgcttgtagtgtgaaaattcatcacaagaatatgcatgtcaaagaaatgcacacatgcacagtggagggctgtaatgctacctttccctcccgcaggagcagagacagacacagctcaaacctaaacctccaccaaaaagcattgagccaggaagcattggagagtagtgaagatcatttccgtgcagcttaccttctgaaagatgtggctaaggaagcctatcaggatgtggcttttacacagcaagcctcccagacatctgtcatcttcaaaggaacaagtcgaatgggcagtctggtttacccaataacgcaagtccacagtgccagcctggagagctacaactctggccccttgagcgagggcaccatcctggatttgagcactacctcgagcatgaagtcagagagtagcagccattcttcctgggactctgacggggtgagtgaggaaggcactgtgcttatggaggacagtgatgggaactgtgaagggtcgagccttgtccctggggaagatgagtaccccatctgtgtcctgatggagaaggctgaccagagccttgctagcctgccttctgggttgcccataacctgtcatctctgccaaaagacatacagtaacaaagggacctttagggcccactacaaaactgtgcacctccggcagctccacaaatgcaaagtaccaggctgcaacaccatgttttcgtctgttcgcagtcgaaacagacacagccagaatcccaacctgcacaaaagcctggcctcatctccaagtcacctccagtaacaagatggcaaaccaagtatgctcagataagcttttttcataattcaggaataaagtagtccatagaaatgtttctgtttcatatcatttggggcgag

SEQ ID NO: 3186 - DNA, 2852 bp, Homo sapiens
  source 1..2852: mol_type = unassigned DNA
gaggcccggaggaactcggagggggagggagagaaaggccgagacggagggagccagcggcggccgaggggctggtccaggcgcggccgctaagaggagaccaagaggcgggggctgcacttgacaaccagcatgccgagatggcacaccttgggcccaccccacctccacatagccttaattacaaatcagaggacaggcttagtgagcaagactggccagcatatttcaaggtcccatgttgtggggttgatacatctcaaattgagtcagaagaggcagaagtggatgtgagagaaagagagacacagagagacagagagccaaagagggcaagagacttgactttaagagactcctgtactgacaactccatgcagttcggaaccagaacgactacggctgaaccagggttcatggggacatggcaaaacgctgatactaacctcttattcagaatgtcccaacaggccatccgttgcacactggtaaactgcacatgtgaatgttttcagccagggaagattaacctgaggacttgtgatcagtgtaaacatggctgggtggcacatgccttggataagctcagcacgcagcacctgtaccaccccacccaagtggagattgtgcagtccaacgtcgtgtttgacatcagcagcctgatgctctatgggacacaagcagtgcctgtgcggctaaagatcctgctggaccgtctcttcagcgtcctgaagcaagaggaggtactgcacatactgcacggccttggctggactctgcgggactatgtccgaggatacatccttcaggatgctgctggcaaggtgctggaccgctgggccatcatgtctcgagaagaggaaatcatcacccttcagcagtttctgcggtttggagaaaccaaatccattgtggagctgatggcaattcaggagaaagaagggcaggccgtggctgtaccatcttcaaagacagactcagatataaggactttcattgagagcaataatcgcaccaggagtcccagcctccttgctcacttagagaacagcaatccttccagcattcatcacttcgaaaacatcccaaacagccttgcatttctgcttccattccagtacataaaccctgtctcagcaccactgctagggttgcctccaaatgggctactgttagagcaaccagggttgaggctgcgggaacccagcctttcaactcagaatgaatataatgagagcagcgaatccgaagtttctcccacaccttataagaatgatcaaacacccaatagaaatgccctgaccagcattactaatgtggagcccaaaaccgagccagcctgtgtctctcccattcagaattctgccccagtcagtgatctaaccaaaactgaacacccaaaaagctcattccggattcatcggatgagaaggatggggtcagcctctaggaaaggaagagtgttctgtaatgcatgtgggaagacattctatgacaaaggtactctcaaaattcattacaatgctgttcacctgaagatcaaacatcgatgcaccattgaaggttgcaacatggtctttagctccctccgaagtcgtaatcgccacagtgcaaaccccaatcctcgccttcacatgcctatgctaaggaataaccgagataaagatttaattcgggccacctcaggagctgccacccctgtcatagcaagtacaaaatcaaatctggcactcacaagccctggccgacccccaatgggttttaccactccccctctagaccctgtcttgcaaaatcctctccctagccagctagtattttctgggctaaagactgtacaaccagttcctccattttatagaagtttactcactccaggggaaatggtgagtcctccaacctccctcccaaccagtcccatcattccaaccagtggtaccatagagcagcaccccccgccaccctctgagccagtagtgccagcagtgatgatggccacccatgagcccagtgctgacctggcacccaagaaaaagcccaggaagtcaagcatgcctgtgaagattgagaaggaaattattgataccgccgatgagtttgatgatgaagatgatgaccccaatgatggtggagctgtggtcaatgacatgagccatgacaatcattgtcactcccaagaggagatgagcccaggcatgtctgtgaaggacttttctaagcataacaggacccggtgcatttcaaggactgaaataaggagggccgacagcatgacttctgaagaccaagaacctgagcgggactatgagaacgagtctgagtcttcggagcccaaactgggcgaggaatccatggaaggggatgagcacattcacagcgaagtgagtgaaaaagtcctgatgaatagtgagaggcctgatgagaaccacagtgagccctctcaccaggacgtcatcaaggtgaaggaagaatttacagaccccacttacgacatgttttacatgagccagtatggactgtacaatggtgggggtgccagcatggccgccttgcatgagagctttacatcgtctctgaattatggcagccctcaaaagttctccccagaaggtgacctatgttctagcccagaccccaaaatctgttatgtgtgcaagaagagtttcaaaagctcctacagtgtgaaacttcactacaggaacgttcacttgaaagagatgcacgtctgcacagtggctggttgcaatgctgcattcccctctcgccgaagccgagacagatactgggagaagagcaatgagcaaaacggtctccttgtatcatggggagagactctgtcaagcctaaagtga

SEQ ID NO: 3187 - DNA, 3393 bp, Homo sapiens
  source 1..3393: mol_type = unassigned DNA
gagagaaaggccgagacggagggagccagcggcggccgaggggctggtccaggcgcggccgctaagaggagaccaagaggcgggggctgcacttgacaaccagcatgccgagatggcacaccttgggcccaccccacctccacatagccttaattacaaatcagaggacaggcttagtgagcaagactggccagcatatttcaaggtcccatgttgtggggttgatacatctcaaattgaggccatccgttgcacactggtaaactgcacatgtgaatgttttcagccagggaagattaacctgaggacttgtgatcagtgtaaacatggctgggtggcacatgccttggataagctcagcacgcagcacctgtaccaccccacccaagtggagattgtgcagtccaacgtcgtgtttgacatcagcagcctgatgctctatgggacacaagcagtgcctgtgcggctaaagatcctgctggaccgtctcttcagcgtcctgaagcaagaggaggtactgcacatactgcacggccttggctggactctgcgggactatgtccgaggatacatccttcaggatgctgctggcaaggtgctggaccgctgggccatcatgtctcgagaagaggaaatcatcacccttcagcagtttctgcggtttggagaaaccaaatccattgtggagctgatggcaattcaggagaaagaagggcaggccgtggctgtaccatcttcaaagacagactcagatataaggactttcattgagagcaataatcgcaccaggagtcccagcctccttgctcacttagagaacagcaatccttccagcattcatcacttcgaaaacatcccaaacagccttgcatttctgcttccattccagtacataaaccctgtctcagcaccactgctagggttgcctccaaatgggctactgttagagcaaccagggttgaggctgcgggaacccagcctttcaactcagaatgaatataatgagagcagcgaatccgaagtttctcccacaccttataagaatgatcaaacacccaatagaaatgccctgaccagcattactaatgtggagcccaaaaccgagccagcctgtgtctctcccattcagaattctgccccagtcagtgatctaaccaaaactgaacacccaaaaagctcattccggattcatcggatgagaaggatggggtcagcctctaggaaaggaagagtgttctgtaatgcatgtgggaagacattctatgacaaaggtactctcaaaattcattacaatgctgttcacctgaagatcaaacatcgatgcaccattgaaggttgcaacatggtctttagctccctccgaagtcgtaatcgccacagtgcaaaccccaatcctcgccttcacatgcctatgctaaggaataaccgagataaagatttaattcgggccacctcaggagctgccacccctgtcatagcaagtacaaaatcaaatctggcactcacaagccctggccgacccccaatgggttttaccactccccctctagaccctgtcttgcaaaatcctctccctagccagctagtattttctgggctaaagactgtacaaccagttcctccattttatagaagtttactcactccaggggaaatggtgagtcctccaacctccctcccaaccagtcccatcattccaaccagtggtaccatagagcagcaccccccgccaccctctgagccagtagtgccagcagtgatgatggccacccatgagcccagtgctgacctggcacccaagaaaaagcccaggaagtcaagcatgcctgtgaagattgagaaggaaattattgataccgccgatgagtttgatgatgaagatgatgaccccaatgatggtggagctgtggtcaatgacatgagccatgacaatcattgtcactcccaagaggagatgagcccaggcatgtctgtgaaggacttttctaagcataacaggacccggtgcatttcaaggactgaaataaggagggccgacagcatgacttctgaagaccaagaacctgagcgggactatgagaacgagtctgagtcttcggagcccaaactgggcgaggaatccatggaaggggatgagcacattcacagcgaagtgagtgaaaaagtcctgatgaatagtgagaggcctgatgagaaccacagtgagccctctcaccaggacgtcatcaaggtgaaggaagaatttacagaccccacttacgacatgttttacatgagccagtatggactgtacaatggtgggggtgccagcatggccgccttgcatgagagctttacatcgtctctgaattatggcagccctcaaaagttctccccagaaggtgacctatgttctagcccagaccccaaaatctgttatgtgtgcaagaagagtttcaaaagctcctacagtgtgaaacttcactacaggaacgttcacttgaaagagatgcacgtctgcacagtggctggttgcaatgctgcattcccctctcgccgaagccgagacagacacagtgccaacataaacctacatcgtaaactgttgaccaaagaactcgatgacatgggcctggactcgtcgcagccctcccttagcaaggacctccgcgatgaatttttggtgaagatatatggtgcccagcaccccatggggctcgatgtcagggaagacgcctcctctcccgcagggactgaagactcccacctgaacgggtatgggagaggcatggcagaggactacatggtccttgacttgagcaccacctccagcctccagtccagcagcagtatccattcctccagagaatccgacgcaggcagcgatgaggggattcttctcgatgacattgacggggcgagtgacagtggggagtcggcacacaaggccgaggcccctgccctccctggcagcctaggggctgaagtttcaggatctcttatgttcagcagcttgtctgggagcaatggtgggatcatgtgcaacatttgccacaaaatgtacagcaacaaggggaccctgagagtgcactacaaaactgtgcatttgagagaaatgcacaagtgcaaagtcccaggttgcaatatgatgttttcctctgtacgaagccgaaatcggcacagtcagaaccctaatctccacaaaaacattcccttcacttcagtagattagtctcagaatggacactacaaatgccagctctcaccagatggcctacgtgtttgaactgccatagtcagtgtgcgcttatgtacttggggtgtgtgtgtgtgtgtgtgtgtgtgtgcatttatgtatgctctgtggctacatatacacacacgtatttccttgagataaacaagataaacact

SEQ ID NO: 3188 - DNA, 5941 bp, Homo sapiens
  source 1..5941: mol_type = unassigned DNA
gcggccgctaagaggagaccaagaggcgggggctgcacttgacaaccagcatgccgagatggcacaccttgggcccaccccacctccacatagccttaattacaaatcagaggacaggcttagtgagcaagactggccagcatatttcaaggtcccatgttgtggggttgatacatctcaaattgagtcagaagaggcagaagtggatgtgagagaaagagagacacagagagacagagagccaaagagggcaagagacttgactttaagagactcctgtactgacaactccatgcagttcggaaccagaacgactacggctgaaccagggttcatggggacatggcaaaacgctgatactaacctcttattcagaatgtcccaacaggccatccgttgcacactggtaaactgcacatgtgaatgttttcagccagggaagattaacctgaggacttgtgatcagtgtaaacatggctgggtggcacatgccttggataagctcagcacgcagcacctgtaccaccccacccaagtggagattgtgcagtccaacgtcgtgtttgacatcagcagcctgatgctctatgggacacaagcagtgcctgtgcggctaaagatcctgctggaccgtctcttcagcgtcctgaagcaagaggaggtactgcacatactgcacggccttggctggactctgcgggactatgtccgaggatacatccttcaggatgctgctggcaaggtgctggaccgctgggccatcatgtctcgagaagaggaaatcatcacccttcagcagtttctgcggtttggagaaaccaaatccattgtggagctgatggcaattcaggagaaagaagggcaggccgtggctgtaccatcttcaaagacagactcagatataaggactttcattgagagcaataatcgcaccaggagtcccagcctccttgctcacttagagaacagcaatccttccagcattcatcacttcgaaaacatcccaaacagccttgcatttctgcttccattccagtacataaaccctgtctcagcaccactgctagggttgcctccaaatgggctactgttagagcaaccagggttgaggctgcgggaacccagcctttcaactcagaatgaatataatgagagcagcgaatccgaagtttctcccacaccttataagaatgatcaaacacccaatagaaatgccctgaccagcattactaatgtggagcccaaaaccgagccagcctgtgtctctcccattcagaattctgccccagtcagtgatctaaccaaaactgaacacccaaaaagctcattccggattcatcggatgagaaggatggggtcagcctctaggaaaggaagagtgttctgtaatgcatgtgggaagacattctatgacaaaggtactctcaaaattcattacaatgctgttcacctgaagatcaaacatcgatgcaccattgaaggttgcaacatggtctttagctccctccgaagtcgtaatcgccacagtgcaaaccccaatcctcgccttcacatgcctatgctaaggaataaccgagataaagatttaattcgggccacctcaggagctgccacccctgtcatagcaagtacaaaatcaaatctggcactcacaagccctggccgacccccaatgggttttaccactccccctctagaccctgtcttgcaaaatcctctccctagccagctagtattttctgggctaaagactgtacaaccagttcctccattttatagaagtttactcactccaggggaaatggtgagtcctccaacctccctcccaaccagtcccatcattccaaccagtggtaccatagagcagcaccccccgccaccctctgagccagtagtgccagcagtgatgatggccacccatgagcccagtgctgacctggcacccaagaaaaagcccaggaagtcaagcatgcctgtgaagattgagaaggaaattattgataccgccgatgagtttgatgatgaagatgatgaccccaatgatggtggagctgtggtcaatgacatgagccatgacaatcattgtcactcccaagaggagatgagcccaggcatgtctgtgaaggacttttctaagcataacaggacccggtgcatttcaaggactgaaataaggagggccgacagcatgacttctgaagaccaagaacctgagcgggactatgagaacgagtctgagtcttcggagcccaaactgggcgaggaatccatggaaggggatgagcacattcacagcgaagtgagtgaaaaagtcctgatgaatagtgagaggcctgatgagaaccacagtgagccctctcaccaggacgtcatcaaggtgaaggaagaatttacagaccccacttacgacatgttttacatgagccagtatggactgtacaatggtgggggtgccagcatggccgccttgcatgagagctttacatcgtctctgaattatggcagccctcaaaagttctccccagaaggtgacctatgttctagcccagaccccaaaatctgttatgtgtgcaagaagagtttcaaaagctcctacagtgtgaaacttcactacaggaacgttcacttgaaagagatgcacgtctgcacagtggctggttgcaatgctgcattcccctctcgccgaagccgagacagacacagtgccaacataaacctacatcgtaaactgttgaccaaagaactcgatgacatgggcctggactcgtcgcagccctcccttagcaaggacctccgcgatgaatttttggtgaagatatatggtgcccagcaccccatggggctcgatgtcagggaagacgcctcctctcccgcagggactgaagactcccacctgaacgggtatgggagaggcatggcagaggactacatggtccttgacttgagcaccacctccagcctccagtccagcagcagtatccattcctccagagaatccgacgcaggcagcgatgaggggattcttctcgatgacattgacggggcgagtgacagtggggagtcggcacacaaggccgaggcccctgccctccctggcagcctaggggctgaagtttcaggatctcttatgttcagcagcttgtctgggagcaatggtgggatcatgtgcaacatttgccacaaaatgtacagcaacaaggggaccctgagagtgcactacaaaactgtgcatttgagagaaatgcacaagtgcaaagtcccaggttgcaatatgatgttttcctctgtacgaagccgaaatcggcacagtcagaaccctaatctccacaaaaacattcccttcacttcagtagattagtctcagaatggacactacaaatgccagctctcaccagatggcctacgtgtttgaactgccatagtcagtgtgcgcttatgtacttggggtgtgtgtgtgtgtgtgtgtgtgtgtgcatttatgtatgctctgtggctacatatacacacacgtatttccttgagataaacaagataaacactaggtgcttttgaatttttttcacttccctttatagttttgggaaaggagtgggatctttgatttcagggtgaaaacagagtacccctttaaacacacacacacacacatgcacatacacacacacacacacacacacacacagtgtgcaactagccccagttttgacagaataattcttggtcttccccaaagagacaatttgttgtacccatgactgttgcctgcaaaaataaaagggaaaaaaaagaaaaaagaaacaaaaaggaacttcttatagttgtcttttgtgaactttaaggttttgaaagaatcttcaattaaagcatggcagattcacctgtaaatatttagccttgaggggccattgatgtaaaacaattgtattgatggttgtttaacttttttgtttaatttttacagttacatccagctgttagatatgcaggaaaagatagtttgctggctagctctattcatttatgttagcattaatgcacatttttaaaaaaagaaaaaaacatggtcttgtttttactacctgttagatatagtgctaaagaggtgctggcatgctttacagcacagatctgattttttaaaatgtcctgtactagtacataaatcccgtcatgcactttttttcatacactacaaggggatgtgtaataaccatgcttcttttttatccttaaactattgccatacttcagtaagtgtcttttttaaaaaaaattcacttgtataaaaatggtctggtcagtatagggcacaaatgccaaacaaagtattagtgttaacacaaaactgccaactttgcacaagtttccagaaaagaaaatacaattagtcactcaacataaccacaggccaatttgttggccaccagaaaaccgctttttaaaaaaacacttggtgattctttcaagtgccgaatgttattagaatcaacattgcatccttcttgcttatacgttaagttacataaaaggaaaacaaaattatgtggtgtgaaacagccaaggcatttattcttcagaggcaggataatatttcaggatacaaaagcccaaattacccgctacggaacaaagatgaatacagtaaaagagtcgaacactcatttccaaggccctaacccttatcctttaaaaagaaatcctctgaactgggtcggtctgttgtatggctgtctaatttgttgcaaattctgcagtcgtactataattcaggcctgtttggtagacaaaatcaaaaggcatttaacagcagcagtacttggaagctttgaaaacatgtgctaaacttgaatggagcaacactcctttctgaaaagccagaagaagggggttttaaagcaggatctctcaatgttcagtgttttgtgtttccccacacgatttgtcagagagaaatgaaagcaagcctgaaaccaagcaattgagagtgagaaagaggagagagactattctccaaaccttttttgttttgttttgtttccgatgtttacacatgttgcctgagctggttaaccacatcggcagcctcagctaccacaacatactgactaaatgatgatatttactcaagttcagtctgcagccaaaaccattagggtgtgcattgcagactgttttgttgtcttttttttttcttttttcctttttttttaagtggaggggaaaagaagagataaacaaggaatattttgtcaaacagtacacaataatttaaagagaatgtatttcttttttgcatttaatggcctcagacatttctttcatcagtctaaaagttagaaatatccctttattttaacttttatgtcgtttccatttttcatgtttttgtaattattttttctatgttcacatcagcattcacttccgttaaatttgccaaaggaaactgttaatatgtttctgttgttattattcctgtaggatttattgtacctcacagtatttattgtttcccaaaataagcatcattagttggggattcagtatttttgttgtgaaaatttcagaaacaatagattcttaaagataagctagctatgtctaggagctttatcttttcacctccttcagaggatgctatggggtccattttaattcttcatttgttctacggggaggaaagaccaaaagtatttgcagtacaaaagaaactatatcaaacactatgttaaatgacaagtgtttatggtaaaaagctgaggaattagtaataatcgtttttgttttcttgtactttgaattccccaaagtcttaattgctttattttggtgttgtgttaaattgaacagacagatgttttcctttgttttataccatataagactctgtacagtatgtttgtgaaagattgaactagaataatgaaagtttgtttgcaaa

SEQ ID NO: 3189 - DNA, 2106 bp, Homo sapiens
  source 1..2106: mol_type = unassigned DNA
ccctctgagccagtagtgccagcagtgatgatggccacccatgagcccagtgctgacctggcacccaagaaaaagcccaggaagtcaagcatgcctgtgaagattgagaaggaaattattgataccgccgatgagtttgatgatgaagatgatgaccccaatgatggtggagctgtggtcaatgacatgagccatgacaatcattgtcactcccaagaggagatgagcccaggcatgtctgtgaaggacttttctaagcataacaggacccggtgcatttcaaggactgaaataaggagggccgacagcatgacttctgaagaccaagaacctgagcgggactatgagaacgagtctgagtcttcggagcccaaactgggcgaggaatccatggaaggggatgagcacattcacagcgaagtgagtgaaaaagtcctgatgaatagtgagaggcctgatgagaaccacagtgagccctctcaccaggacgtcatcaaggtgaaggaagaatttacagaccccacttacgacatgttttacatgagccagtatggactgtacaatggtgggggtgccagcatggccgccttgcatgagagctttacatcgtctctgaattatggcagccctcaaaagttctccccagaaggtgacctatgttctagcccagaccccaaaatctgttatgtgtgcaagaagagtttcaaaagctcctacagtgtgaaacttcactacaggaacgttcacttgaaagagatgcacgtctgcacagtggctggttgcaatgctgcattcccctctcgccgaagccgagacagaaacagaaatttacggatggaaagaaccataggtccaggacatcgagacagcctgcatctccgaagaggaaattctaaccggcctggaacctgctgtcttcatacgggagattctcttgaagagagcgtgatagtcagaattagctgcaaaagattagaaagctgatcttattgtcacaagacacagtgccaacataaacctacatcgtaaactgttgaccaaagaactcgatgacatgggcctggactcgtcgcagccctcccttagcaaggacctccgcgatgaatttttggtgaagatatatggtgcccagcaccccatggggctcgatgtcagggaagacgcctcctctcccgcagggactgaagactcccacctgaacgggtatgggagaggcatggcagaggactacatggtccttgacttgagcaccacctccagcctccagtccagcagcagtatccattcctccagagaatccgacgcaggcagcgatgaggggattcttctcgatgacattgacggggcgagtgacagtggggagtcggcacacaaggccgaggcccctgccctccctggcagcctaggggctgaagtttcaggatctcttatgttcagcagcttgtctgggagcaatggtgggatcatgtgcaacatttgccacaaaatgtacagcaacaaggggaccctgagagtgcactacaaaactgtgcatttgagagaaatgcacaagtgcaaagtcccaggttgcaatatgatgttttcctctgtacgaagccgaaatcggcacagtcagaaccctaatctccacaaaaacattcccttcacttcagtagattagtctcagaatggacactacaaatgccagctctcaccagatggcctacgtgtttgaactgccatagtcagtgtgcgcttatgtacttggggtgtgtgtgtgtgtgtgtgtgtgtgtgcatttatgtatgctctgtggctacatatacacacacgtatttccttgagataaacaagataaacactaggtgcttttgaatttttttcacttccctttatagttttgggaaaggagtgggatctttgatttcagggtgaaaacagagtacccctttaaacacacacacacacacatgcacatacacacacacacacacacacacacacagtgtgcaactagccccagttttgacagaataattcttggtcttccccaaagagacaatttgttgtacccatgactgttgcctgcaaaaataaaagggaaaaaaaagaaaaaagaaacaaaaa

SEQ ID NO: 3190 - DNA, 3673 bp, Homo sapiens
  source 1..3673: mol_type = unassigned DNA
tcagaagaggcagaagtggatgtgagagaaagagagacacagagagacagagagccaaagagggcaagagacttgactttaagagactcctgtactgacaactccatgcagttcggaaccagaacgactacggctgaaccagggttcatggggacatggcaaaacgctgatactaacctcttattcagaatgtcccaacaggccatccgttgcacactggtaaactgcacatgtgaatgttttcagccagggaagattaacctgaggacttgtgatcagtgtaaacatggctgggtggcacatgccttggataagctcagcacgcagcacctgtaccaccccacccaagtggagattgtgcagtccaacgtcgtgtttgacatcagcagcctgatgctctatgggacacaagcagtgcctgtgcggctaaagatcctgctggaccgtctcttcagcgtcctgaagcaagaggaggtactgcacatactgcacggccttggctggactctgcgggactatgtccgaggatacatccttcaggatgctgctggcaaggtgctggaccgctgggccatcatgtctcgagaagaggaaatcatcacccttcagcagtttctgcggtttggagaaaccaaatccattgtggagctgatggcaattcaggagaaagaagggcaggccgtggctgtaccatcttcaaagacagactcagatataaggactttcattgagagcaataatcgcaccaggagtcccagcctccttgctcacttagagaacagcaatccttccagcattcatcacttcgaaaacatcccaaacagccttgcatttctgcttccattccagtacataaaccctgtctcagcaccactgctagggttgcctccaaatgggctactgttagagcaaccagggttgaggctgcgggaacccagcctttcaactcagaatgaatataatgagagcagcgaatccgaagtttctcccacaccttataagaatgatcaaacacccaatagaaatgccctgaccagcattactaatgtggagcccaaaaccgagccagcctgtgtctctcccattcagaattctgccccagtcagtgatctaaccaaaactgaacacccaaaaagctcattccggattcatcggatgagaaggatggggtcagcctctaggaaaggaagagtgttctgtaatgcatgtgggaagacattctatgacaaaggtactctcaaaattcattacaatgctgttcacctgaagatcaaacatcgatgcaccattgaaggttgcaacatggtctttagctccctccgaagtcgtaatcgccacagtgcaaaccccaatcctcgccttcacatgcctatgctaaggaataaccgagataaagatttaattcgggccacctcaggagctgccacccctgtcatagcaagtacaaaatcaaatctggcactcacaagccctggccgacccccaatgggttttaccactccccctctagaccctgtcttgcaaaatcctctccctagccagctagtattttctgggctaaagactgtacaaccagttcctccattttatagaagtttactcactccaggggaaatggtgagtcctccaacctccctcccaaccagtcccatcattccaaccagtggtaccatagagcagcaccccccgccaccctctgagccagtagtgccagcagtgatgatggccacccatgagcccagtgctgacctggcacccaagaaaaagcccaggaagtcaagcatgcctgtgaagattgagaaggaaattattgataccgccgatgagtttgatgatgaagatgatgaccccaatgatggtggagctgtggtcaatgacatgagccatgacaatcattgtcactcccaagaggagatgagcccaggcatgtctgtgaaggacttttctaagcataacaggacccggtgcatttcaaggactgaaataaggagggccgacagcatgacttctgaagaccaagaacctgagcgggactatgagaacgagtctgagtcttcggagcccaaactgggcgaggaatccatggaaggggatgagcacattcacagcgaagtgagtgaaaaagtcctgatgaatagtgagaggcctgatgagaaccacagtgagccctctcaccaggacgtcatcaaggtgaaggaagaatttacagaccccacttacgacatgttttacatgagccagtatggactgtacaatggtgggggtgccagcatggccgccttgcatgagagctttacatcgtctctgaattatggcagccctcaaaagttctccccagaaggtgacctatgttctagcccagaccccaaaatctgttatgtgtgcaagaagagtttcaaaagctcctacagtgtgaaacttcactacaggaacgttcacttgaaagagatgcacgtctgcacagtggctggttgcaatgctgcattcccctctcgccgaagccgagacagaaacagaaatttacggatggaaagaaccataggtccaggacatcgagacagcctgcatctcctgccaacataaacctacatcgtaaactgttgaccaaagaactcgatgacatgggcctggactcgtcgcagccctcccttagcaaggacctccgcgatgaatttttggtgaagatatatggtgcccagcaccccatggggctcgatgtcagggaagacgcctcctctcccgcagggactgaagactcccacctgaacgggtatgggagaggcatggcagaggactacatggtccttgacttgagcaccacctccagcctccagtccagcagcagtatccattcctccagagaatccgacgcaggcagcgatgaggggattcttctcgatgacattgacggggcgagtgacagtggggagtcggcacacaaggccgaggcccctgccctccctggcagcctaggggctgaagtttcaggatctcttatgttcagcagcttgtctgggagcaatggtgggatcatgtgcaacatttgccacaaaatgtacagcaacaaggggaccctgagagtgcactacaaaactgtgcatttgagagaaatgcacaagtgcaaagtcccaggttgcaatatgatgttttcctctgtacgaagccgaaatcggcacagtcagaaccctaatctccacaaaaacattcccttcacttcagtagattagtctcagaatggacactacaaatgccagctctcaccagatggcctacgtgtttgaactgccatagtcagtgtgcgcttatgtacttggggtgtgtgtgtgtgtgtgtgtgtgtgtgcatttatgtatgctctgtggctacatatacacacacgtatttccttgagataaacaagataaacactaggtgcttttgaatttttttcacttccctttatagttttgggaaaggagtgggatctttgatttcagggtgaaaacagagtacccctttaaacacacacacacacacatgcacatacacacacacacacacacacacacacagtgtgcaactagccccagttttgacagaataattcttggtcttccccaaagagacaatttgttgtacccatgactgttgcctgcaaaaataaaagggaaaaaaaagaaaaaagaaacaaaaa

SEQ ID NO: 3191 - DNA, 3814 bp, Homo sapiens
  source 1..3814: mol_type = unassigned DNA
acttgacaaccagcatgccgagatggcacaccttgggcccaccccacctccacatagccttaattacaaatcagaggacaggcttagtgagcaagactggccagcatatttcaaggtcccatgttgtggggttgatacatctcaaattgagtcagaagaggcagaagtggatgtgagagaaagagagacacagagagacagagagccaaagagggcaagagacttgactttaagagactcctgtactgacaactccatgcagttcggaaccagaacgactacggctgaaccagggttcatggggacatggcaaaacgctgatactaacctcttattcagaatgtcccaacaggttccattggcatgtactggcagagtgctgggggcagacttctgcccaaacctggaggagccataccacaggctggaagtccaggccatccgttgcacactggtaaactgcacatgtgaatgttttcagccagggaagattaacctgaggacttgtgatcagtgtaaacatggctgggtggcacatgccttggataagctcagcacgcagcacctgtaccaccccacccaagtggagattgtgcagtccaacgtcgtgtttgacatcagcagcctgatgctctatgggacacaagcagtgcctgtgcggctaaagatcctgctggaccgtctcttcagcgtcctgaagcaagaggaggtactgcacatactgcacggccttggctggactctgcgggactatgtccgaggatacatccttcaggatgctgctggcaaggtgctggaccgctgggccatcatgtctcgagaagaggaaatcatcacccttcagcagtttctgcggtttggagaaaccaaatccattgtggagctgatggcaattcaggagaaagaagggcaggccgtggctgtaccatcttcaaagacagactcagatataaggactttcattgagagcaataatcgcaccaggagtcccagcctccttgctcacttagagaacagcaatccttccagcattcatcacttcgaaaacatcccaaacagccttgcatttctgcttccattccagtacataaaccctgtctcagcaccactgctagggttgcctccaaatgggctactgttagagcaaccagggttgaggctgcgggaacccagcctttcaactcagaatgaatataatgagagcagcgaatccgaagtttctcccacaccttataagaatgatcaaacacccaatagaaatgccctgaccagcattactaatgtggagcccaaaaccgagccagcctgtgtctctcccattcagaattctgccccagtcagtgatctaaccaaaactgaacacccaaaaagctcattccggattcatcggatgagaaggatggggtcagcctctaggaaaggaagagtgttctgtaatgcatgtgggaagacattctatgacaaaggtactctcaaaattcattacaatgctgttcacctgaagatcaaacatcgatgcaccattgaaggttgcaacatggtctttagctccctccgaagtcgtaatcgccacagtgcaaaccccaatcctcgccttcacatgcctatgctaaggaataaccgagataaagatttaattcgggccacctcaggagctgccacccctgtcatagcaagtacaaaatcaaatctggcactcacaagccctggccgacccccaatgggttttaccactccccctctagaccctgtcttgcaaaatcctctccctagccagctagtattttctgggctaaagactgtacaaccagttcctccattttatagaagtttactcactccaggggaaatggtgagtcctccaacctccctcccaaccagtcccatcattccaaccagtggtaccatagagcagcaccccccgccaccctctgagccagtagtgccagcagtgatgatggccacccatgagcccagtgctgacctggcacccaagaaaaagcccaggaagtcaagcatgcctgtgaagattgagaaggaaattattgataccgccgatgagtttgatgatgaagatgatgaccccaatgatggtggagctgtggtcaatgacatgagccatgacaatcattgtcactcccaagaggagatgagcccaggcatgtctgtgaaggacttttctaagcataacaggacccggtgcatttcaaggactgaaataaggagggccgacagcatgacttctgaagaccaagaacctgagcgggactatgagaacgagtctgagtcttcggagcccaaactgggcgaggaatccatggaaggggatgagcacattcacagcgaagtgagtgaaaaagtcctgatgaatagtgagaggcctgatgagaaccacagtgagccctctcaccaggacgtcatcaaggtgaaggaagaatttacagaccccacttacgacatgttttacatgagccagtatggactgtacaatggtgggggtgccagcatggccgccttgcatgagagctttacatcgtctctgaattatggcagccctcaaaagttctccccagaaggtgacctatgttctagcccagaccccaaaatctgttatgtgtgcaagaagagtttcaaaagctcctacagtgtgaaacttcactacaggaacgttcacttgaaagagatgcacgtctgcacagtggctggttgcaatgctgcattcccctctcgccgaagccgagacagacacagtgccaacataaacctacatcgtaaactgttgaccaaagaactcgatgacatgggcctggactcgtcgcagccctcccttagcaaggacctccgcgatgaatttttggtgaagatatatggtgcccagcaccccatggggctcgatgtcagggaagacgcctcctctcccgcagggactgaagactcccacctgaacgggtatgggagaggcatggcagaggactacatggtccttgacttgagcaccacctccagcctccagtccagcagcagtatccattcctccagagaatccgacgcaggcagcgatgaggggattcttctcgatgacattgacggggcgagtgacagtggggagtcggcacacaaggccgaggcccctgccctccctggcagcctaggggctgaagtttcaggatctcttatgttcagcagcttgtctgggagcaatggtgggatcatgtgcaacatttgccacaaaatgtacagcaacaaggggaccctgagagtgcactacaaaactgtgcatttgagagaaatgcacaagtgcaaagtcccaggttgcaatatgatgttttcctctgtacgaagccgaaatcggcacagtcagaaccctaatctccacaaaaacattcccttcacttcagtagattagtctcagaatggacactacaaatgccagctctcaccagatggcctacgtgtttgaactgccatagtcagtgtgcgcttatgtacttggggtgtgtgtgtgtgtgtgtgtgtgtgtgcatttatgtatgctctgtggctacatatacacacacgtatttccttgagataaacaagataaacactaggtgcttttgaatttttttcacttccctttatagttttgggaaaggagtgggatctttgatttcagggtgaaaacagagtacccctttaaacacacacacacacacatgcacatacacacacacacacacacacacacacagtgtgcaactagccccagttttgacagaataattcttggtcttccccaaagagacaatttgttgtacccatgactgttgcctgc

SEQ ID NO: 3192 - DNA, 361 bp, Homo sapiens
  source 1..361: mol_type = unassigned DNA
ggacttttttgttgcattatttaggttgccacatatagtggggatgacagtttgtagatgtgcaggttactggttccattggcatgtactggcagagtgctgggggcagacttctgcccaaacctggaggagccataccacaggctggaagtccaggccatccgttgcacactggtaaactgcacatgtgaatgttttcagccagggaagattaacctgaggacttgtgatcagtgtaaacatggctgggtggcacatgccttggataagctcagcacgcagcacctgtaccaccccacccaagtggagattgtgcagtccaacgtcgtgtttgacatcagcagcctgatgctctatggga

SEQ ID NO: 3193 - DNA, 3841 bp, Homo sapiens
  source 1..3841: mol_type = unassigned DNA
acttgacaaccagcatgccgagatggcacaccttgggcccaccccacctccacatagccttaattacaaatcagaggacaggcttagtgagcaagactggccagcatatttcaaggtcccatgttgtggggttgatacatctcaaattgagtcagaagaggcagaagtggatgtgagagaaagagagacacagagagacagagagccaaagagggcaagagacttgactttaagagactcctgtactgacaactccatgcagttcggaaccagaacgactacggctgaaccagggttcatggggacatggcaaaacgctgatactaacctcttattcagaatgtcccaacaggctggtctcaaactcctgacctcaggtgatccacccgtcttggacttccaaagtgctgggattacaggcgtgagccactgcacccggctgaaagttgctatgatttctaaggccatccgttgcacactggtaaactgcacatgtgaatgttttcagccagggaagattaacctgaggacttgtgatcagtgtaaacatggctgggtggcacatgccttggataagctcagcacgcagcacctgtaccaccccacccaagtggagattgtgcagtccaacgtcgtgtttgacatcagcagcctgatgctctatgggacacaagcagtgcctgtgcggctaaagatcctgctggaccgtctcttcagcgtcctgaagcaagaggaggtactgcacatactgcacggccttggctggactctgcgggactatgtccgaggatacatccttcaggatgctgctggcaaggtgctggaccgctgggccatcatgtctcgagaagaggaaatcatcacccttcagcagtttctgcggtttggagaaaccaaatccattgtggagctgatggcaattcaggagaaagaagggcaggccgtggctgtaccatcttcaaagacagactcagatataaggactttcattgagagcaataatcgcaccaggagtcccagcctccttgctcacttagagaacagcaatccttccagcattcatcacttcgaaaacatcccaaacagccttgcatttctgcttccattccagtacataaaccctgtctcagcaccactgctagggttgcctccaaatgggctactgttagagcaaccagggttgaggctgcgggaacccagcctttcaactcagaatgaatataatgagagcagcgaatccgaagtttctcccacaccttataagaatgatcaaacacccaatagaaatgccctgaccagcattactaatgtggagcccaaaaccgagccagcctgtgtctctcccattcagaattctgccccagtcagtgatctaaccaaaactgaacacccaaaaagctcattccggattcatcggatgagaaggatggggtcagcctctaggaaaggaagagtgttctgtaatgcatgtgggaagacattctatgacaaaggtactctcaaaattcattacaatgctgttcacctgaagatcaaacatcgatgcaccattgaaggttgcaacatggtctttagctccctccgaagtcgtaatcgccacagtgcaaaccccaatcctcgccttcacatgcctatgctaaggaataaccgagataaagatttaattcgggccacctcaggagctgccacccctgtcatagcaagtacaaaatcaaatctggcactcacaagccctggccgacccccaatgggttttaccactccccctctagaccctgtcttgcaaaatcctctccctagccagctagtattttctgggctaaagactgtacaaccagttcctccattttatagaagtttactcactccaggggaaatggtgagtcctccaacctccctcccaaccagtcccatcattccaaccagtggtaccatagagcagcaccccccgccaccctctgagccagtagtgccagcagtgatgatggccacccatgagcccagtgctgacctggcacccaagaaaaagcccaggaagtcaagcatgcctgtgaagattgagaaggaaattattgataccgccgatgagtttgatgatgaagatgatgaccccaatgatggtggagctgtggtcaatgacatgagccatgacaatcattgtcactcccaagaggagatgagcccaggcatgtctgtgaaggacttttctaagcataacaggacccggtgcatttcaaggactgaaataaggagggccgacagcatgacttctgaagaccaagaacctgagcgggactatgagaacgagtctgagtcttcggagcccaaactgggcgaggaatccatggaaggggatgagcacattcacagcgaagtgagtgaaaaagtcctgatgaatagtgagaggcctgatgagaaccacagtgagccctctcaccaggacgtcatcaaggtgaaggaagaatttacagaccccacttacgacatgttttacatgagccagtatggactgtacaatggtgggggtgccagcatggccgccttgcatgagagctttacatcgtctctgaattatggcagccctcaaaagttctccccagaaggtgacctatgttctagcccagaccccaaaatctgttatgtgtgcaagaagagtttcaaaagctcctacagtgtgaaacttcactacaggaacgttcacttgaaagagatgcacgtctgcacagtggctggttgcaatgctgcattcccctctcgccgaagccgagacagacacagtgccaacataaacctacatcgtaaactgttgaccaaagaactcgatgacatgggcctggactcgtcgcagccctcccttagcaaggacctccgcgatgaatttttggtgaagatatatggtgcccagcaccccatggggctcgatgtcagggaagacgcctcctctcccgcagggactgaagactcccacctgaacgggtatgggagaggcatggcagaggactacatggtccttgacttgagcaccacctccagcctccagtccagcagcagtatccattcctccagagaatccgacgcaggcagcgatgaggggattcttctcgatgacattgacggggcgagtgacagtggggagtcggcacacaaggccgaggcccctgccctccctggcagcctaggggctgaagtttcaggatctcttatgttcagcagcttgtctgggagcaatggtgggatcatgtgcaacatttgccacaaaatgtacagcaacaaggggaccctgagagtgcactacaaaactgtgcatttgagagaaatgcacaagtgcaaagtcccaggttgcaatatgatgttttcctctgtacgaagccgaaatcggcacagtcagaaccctaatctccacaaaaacattcccttcacttcagtagattagtctcagaatggacactacaaatgccagctctcaccagatggcctacgtgtttgaactgccatagtcagtgtgcgcttatgtacttggggtgtgtgtgtgtgtgtgtgtgtgtgtgcatttatgtatgctctgtggctacatatacacacacgtatttccttgagataaacaagataaacactaggtgcttttgaatttttttcacttccctttatagttttgggaaaggagtgggatctttgatttcagggtgaaaacagagtacccctttaaacacacacacacacacatgcacatacacacacacacacacacacacacacagtgtgcaactagccccagttttgacagaataattcttggtcttccccaaagagacaatttgttgtacccatgactgttgcctgc

SEQ ID NO: 3194 - DNA, 4841 bp, Homo sapiens
  source 1..4841: mol_type = unassigned DNA
gagagaaaggccgagacggagggagccagcggcggccgaggggctggtccaggcgcggccgctaagaggagaccaagaggcgggggctgcacttgacaaccagcatgccgagatggcacaccttgggcccaccccacctccacatagccttaattacaaatcagaggacaggcttagtgagcaagactggccagcatatttcaaggtcccatgttgtggggttgatacatctcaaattgagtcagaagaggcagaagtggatgtgagagaaagagagacacagagagacagagagccaaagagggcaagagacttgactttaagagactcctgtactgacaactccatgcagttcggaaccagaacgactacggctgaaccagggttcatggggacatggcaaaacgctgatactaacctcttattcagaatgtcccaacaggccatccgttgcacactggtaaactgcacatgtgaatgttttcagccagggaagattaacctgaggacttgtgatcagtgtaaacatggctgggtggcacatgccttggataagctcagcacgcagcacctgtaccaccccacccaagtggagattgtgcagtccaacgtcgtgtttgacatcagcagcctgatgctctatgggacacaagcagtgcctgtgcggctaaagatcctgctggaccgtctcttcagcgtcctgaagcaagaggaggtactgcacatactgcacggccttggctggactctgcgggactatgtccgaggatacatccttcaggatgctgctggcaaggtgctggaccgctgggccatcatgtctcgagaagaggaaatcatcacccttcagcagtttctgcggtttggagaaaccaaatccattgtggagctgatggcaattcaggagaaagaagggcaggccgtggctgtaccatcttcaaagacagactcagatataaggactttcattgagagcaataatcgcaccaggagtcccagcctccttgctcacttagagaacagcaatccttccagcattcatcacttcgaaaacatcccaaacagccttgcatttctgcttccattccagtacataaaccctgtctcagcaccactgctagggttgcctccaaatgggctactgttagagcaaccagggttgaggctgcgggaacccagcctttcaactcagaatgaatataatgagagcagcgaatccgaagtttctcccacaccttataagaatgatcaaacacccaatagaaatgccctgaccagcattactaatgtggagcccaaaaccgagccagcctgtgtctctcccattcagaattctgccccagtcagtgatctaaccaaaactgaacacccaaaaagctcattccggattcatcggatgagaaggatggggtcagcctctaggaaaggaagagtgttctgtaatgcatgtgggaagacattctatgacaaaggtactctcaaaattcattacaatgctgttcacctgaagatcaaacatcgatgcaccattgaaggttgcaacatggtctttagctccctccgaagtcgtaatcgccacagtgcaaaccccaatcctcgccttcacatgcctatgctaaggaataaccgagataaagatttaattcgggccacctcaggagctgccacccctgtcatagcaagtacaaaatcaaatctggcactcacaagccctggccgacccccaatgggttttaccactccccctctagaccctgtcttgcaaaatcctctccctagccagctagtattttctgggctaaagactgtacaaccagttcctccattttatagaagtttactcactccaggggaaatggtgagtcctccaacctccctcccaaccagtcccatcattccaaccagtggtaccatagagcagcaccccccgccaccctctgagccagtagtgccagcagtgatgatggccacccatgagcccagtgctgacctggcacccaagaaaaagcccaggaagtcaagcatgcctgtgaagattgagaaggaaattattgataccgccgatgagtttgatgatgaagatgatgaccccaatgatggtggagctgtggtcaatgacatgagccatgacaatcattgtcactcccaagaggagatgagcccaggcatgtctgtgaaggacttttctaagcataacaggacccggtgcatttcaaggactgaaataaggagggccgacagcatgacttctgaagaccaagaacctgagcgggactatgagaacgagtctgagtcttcggagcccaaactgggcgaggaatccatggaaggggatgagcacattcacagcgaagtgagtgaaaaagtcctgatgaatagtgagaggcctgatgagaaccacagtgagccctctcaccaggacgtcatcaaggtgaaggaagaatttacagaccccacttacgacatgttttacatgagccagtatggactgtacaatggtgggggtgccagcatggccgccttgcatgagagctttacatcgtctctgaattatggcagccctcaaaagttctccccagaaggtgacctatgttctagcccagaccccaaaatctgttatgtgtgcaagaagagtttcaaaagctcctacagtgtgaaacttcactacaggaacgttcacttgaaagagatgcacgtctgcacagtggctggttgcaatgctgcattcccctctcgccgaagccgagacagatactgggagaagagcaatgagcaaaacggtctccttgtatcatggggagagactctgtcaagcctaaagtgagcctcggatcttcctaatgacctcctgctggcccagctggatgcaagacaagctcgtttaagcctctgctgacctttcactcctccactacaagaactgcaccactcatttccaccgtcttcagaactgtgcaccaaatagaccacaaagcttcatggctgacgaatgatttccttttcatgatgcaaagagatttttacaaatttctattgatgagagttaacattaagtctcttgtggcattataacctctgttgcacaaatacaatgcttctatataactcttatttttaccttccttataaaggaacaatctactgttcttgccagcattatcttgaaaattcaggccaaaatatctgagcagaatgcacatactgagtgcaccggtggtatttttcatgaagagaccactttgaaagggtcttcctgatttccacctccctcagaatctatctgaccttctcacagactttattggtgtgaatctttcttatatttaaccatttatttgagatgctcatttttgtagcccatcttttctttttaaaaaacatgggctggtttctacccagaagagggtggtaagactgtacatgtacgttaacattcacttgtataactcagcaaaagattagaaagctgatcttattgtcacaagacacagtgccaacataaacctacatcgtaaactgttgaccaaagaactcgatgacatgggcctggactcgtcgcagccctcccttagcaaggacctccgcgatgaatttttggtgaagatatatggtgcccagcaccccatggggctcgatgtcagggaagacgcctcctctcccgcagggactgaagactcccacctgaacgggtatgggagaggcatggcagaggactacatggtccttgacttgagcaccacctccagcctccagtccagcagcagtatccattcctccagagaatccgacgcaggcagcgatgaggggattcttctcgatgacattgacggggcgagtgacagtggggagtcggcacacaaggccgaggcccctgccctccctggcagcctaggggctgaagtttcaggatctcttatgttcagcagcttgtctgggagcaatggtgggatcatgtgcaacatttgccacaaaatgtacagcaacaaggggaccctgagagtgcactacaaaactgtgcatttgagagaaatgcacaagtgcaaagtcccaggttgcaatatgatgttttcctctgtacgaagccgaaatcggcacagtcagaaccctaatctccacaaaaacattcccttcacttcagtagattagtctcagaatggacactacaaatgccagctctcaccagatggcctacgtgtttgaactgccatagtcagtgtgcgcttatgtacttggggtgtgtgtgtgtgtgtgtgtgtgtgtgcatttatgtatgctctgtggctacatatacacacacgtatttccttgagataaacaagataaacactaggtgcttttgaatttttttcacttccctttatagttttgggaaaggagtgggatctttgatttcagggtgaaaacagagtacccctttaaacacacacacacacacatgcacatacacacacacacacacacacacacacagtgtgcaactagccccagttttgacagaataattcttggtcttccccaaagagacaatttgttgtacccatgactgttgcctgcaaaaataaaagggaaaaaaaagaaaaaagaaacaaaaaggaacttcttatagttgtcttttgtgaactttaaggttttgaaagaatcttcaattaaagcatggcagattcacctgtaaatatttagccttgaggggccattgatgtaaaacaattgtattgatggttgtttaacttttttgtttaatttttacagttacatccagctgttagatatgcaggaaaagatagtttgctggctagctctattcatttatgttagcattaatgcacatttttaaaaaaaga

SEQ ID NO: 3195 - DNA, 2849 bp, Homo sapiens
  source 1..2849: mol_type = unassigned DNA
gaggcccggaggaactcggagggggagggagagaaaggccgagacggagggagccagcggcggccgaggggctggtccaggcgcggccgctaagaggagaccaagaggcgggggctgcacttgacaaccagcatgccgagatggcacaccttgggcccaccccacctccacatagccttaattacaaatcagaggacaggcttagtgagcaagactggccagcatatttcaaggtcccatgttgtggggttgatacatctcaaattgagtcagaagaggcagaagtggatgtgagagaaagagagacacagagagacagagagccaaagagggcaagagacttgactttaagagactcctgtactgacaactccatgcagttcggaaccagaacgactacggctgaaccagggttcatggggacatggcaaaacgctgatactaacctcttattcagaatgtcccaacaggccatccgttgcacactggtaaactgcacatgtgaatgttttcagccagggaagattaacctgaggacttgtgatcagtgtaaacatggctgggtggcacatgccttggataagctcagcacgcagcacctgtaccaccccacccaagtggagattgtgcagtccaacgtcgtgtttgacatcagcagcctgatgctctatgggacacaagcagtgcctgtgcggctaaagatcctgctggaccgtctcttcagcgtcctgaagcaagaggaggtactgcacatactgcacggccttggctggactctgcgggactatgtccgaggatacatccttcaggatgctgctggcaaggtgctggaccgctgggccatcatgtctcgagaagaggaaatcatcacccttcagcagtttctgcggtttggagaaaccaaatccattgtggagctgatggcaattcaggagaaagaagggcaggccgtggctgtaccatcttcaaagacagactcagatataaggactttcattgagagcaataatcgcaccaggagtcccagcctccttgctcacttagagaacagcaatccttccagcattcatcacttcgaaaacatcccaaacagccttgcatttctgcttccattccagtacataaaccctgtctcagcaccactgctagggttgcctccaaatgggctactgttagagcaaccagggttgaggctgcgggaacccagcctttcaactcagaatgaatataatgagagcagcgaatccgaagtttctcccacaccttataagaatgatcaaacacccaatagaaatgccctgaccagcattactaatgtggagcccaaaaccgagccagcctgtgtctctcccattcagaattctgccccagtcagtgatctaaccaaaactgaacacccaaaaagctcattccggattcatcggatgagaaggatggggtcagcctctaggaaaggaagagtgttctgtaatgcatgtgggaagacattctatgacaaaggtactctcaaaattcattacaatgctgttcacctgaagatcaaacatcgatgcaccattgaaggttgcaacatggtctttagctccctccgaagtcgtaatcgccacagtgcaaaccccaatcctcgccttcacatgcctatgctaaggaataaccgagataaagatttaattcgggccacctcaggagctgccacccctgtcatagcaagtacaaaatcaaatctggcactcacaagccctggccgacccccaatgggttttaccactccccctctagaccctgtcttgcaaaatcctctccctagccagctagtattttctgggctaaagactgtacaaccagttcctccattttatagaagtttactcactccaggggaaatggtgagtcctccaacctccctcccaaccagtcccatcattccaaccagtggtaccatagagcagcaccccccgccaccctctgagccagtagtgccagcagtgatgatggccacccatgagcccagtgctgacctggcacccaagaaaaagcccaggaagtcaagcatgcctgtgaagattgagaaggaaattattgataccgccgatgagtttgatgatgaagatgatgaccccaatgatggtggagctgtggtcaatgacatgagccatgacaatcattgtcactcccaagaggagatgagcccaggcatgtctgtgaaggacttttctaagcataacaggacccggtgcatttcaaggactgaaataaggagggccgacagcatgacttctgaagaccaagaacctgagcgggactatgagaacgagtctgagtcttcggagcccaaactgggcgaggaatccatggaaggggatgagcacattcacagcgaagtgagtgaaaaagtcctgatgaatagtgagaggcctgatgagaaccacagtgagccctctcaccaggacgtcatcaaggtgaaggaagaatttacagaccccacttacgacatgttttacatgagccagtatggactgtacaatggtgggggtgccagcatggccgccttgcatgagagctttacatcgtctctgaattatggcagccctcaaaagttctccccagaaggtgacctatgttctagcccagaccccaaaatctgttatgtgtgcaagaagagtttcaaaagctcctacagtgtgaaacttcactacaggaacgttcacttgaaagagatgcacgtctgcacagtggctggttgcaatgctgcattcccctctcgccgaagccgagacagaaacagaaatttacggatggaaagaaccataggtccaggacatcgagacagcctgcatctccgtagcaca

SEQ ID NO: 3196 - DNA, 2481 bp, Homo sapiens
  source 1..2481: mol_type = unassigned DNA
agtgtagtcactgctggtctgctggtaaggagtttcgtgggagggtgttgagaatgaaacacacagagctgtatcccgcttcgggtgaatgaatgggaggcaatatacaaaatagccttggataagctcagcacgcagcacctgtaccaccccacccaagtggagattgtgcagtccaacgtcgtgtttgacatcagcagcctgatgctctatgggacacaagcagtgcctgtgcggctaaagatcctgctggaccgtctcttcagcgtcctgaagcaagaggaggtactgcacatactgcacggccttggctggactctgcgggactatgtccgaggatacatccttcaggatgctgctggcaaggtgctggaccgctgggccatcatgtctcgagaagaggaaatcatcacccttcagcagtttctgcggtttggagaaaccaaatccattgtggagctgatggcaattcaggagaaagaagggcaggccgtggctgtaccatcttcaaagacagactcagatataaggactttcattgagagcaataatcgcaccaggagtcccagcctccttgctcacttagagaacagcaatccttccagcattcatcacttcgaaaacatcccaaacagccttgcatttctgcttccattccagtacataaaccctgtctcagcaccactgctagggttgcctccaaatgggctactgttagagcaaccagggttgaggctgcgggaacccagcctttcaactcagaatgaatataatgagagcagcgaatccgaagtttctcccacaccttataagaatgatcaaacacccaatagaaatgccctgaccagcattactaatgtggagcccaaaaccgagccagcctgtgtctctcccattcagaattctgccccagtcagtgatctaaccaaaactgaacacccaaaaagctcattccggattcatcggatgagaaggatggggtcagcctctaggaaaggaagagtgttctgtaatgcatgtgggaagacattctatgacaaaggtactctcaaaattcattacaatgctgttcacctgaagatcaaacatcgatgcaccattgaaggttgcaacatggtctttagctccctccgaagtcgtaatcgccacagtgcaaaccccaatcctcgccttcacatgcctatgctaaggaataaccgagataaagatttaattcgggccacctcaggagctgccacccctgtcatagcaagtacaaaatcaaatctggcactcacaagccctggccgacccccaatgggttttaccactccccctctagaccctgtcttgcaaaatcctctccctagccagctagtattttctgggctaaagactgtacaaccagttcctccattttatagaagtttactcactccaggggaaatggtgagtcctccaacctccctcccaaccagtcccatcattccaaccagtggtaccatagagcagcaccccccgccaccctctgagccagtagtgccagcagtgatgatggccacccatgagcccagtgctgacctggcacccaagaaaaagcccaggaagtcaagcatgcctgtgaagattgagaaggaaattattgataccgccgatgagtttgatgatgaagatgatgaccccaatgatggtggagctgtggtcaatgacatgagccatgacaatcattgtcactcccaagaggagatgagcccaggcatgtctgtgaaggacttttctaagcataacaggacccggtgcatttcaaggactgaaataaggagggccgacagcatgacttctgaagaccaagaacctgagcgggactatgagaacgagtctgagtcttcggagcccaaactgggcgaggaatccatggaaggggatgagcacattcacagcgaagtgagtgaaaaagtcctgatgaatagtgagaggcctgatgagaaccacagtgagccctctcaccaggacgtcatcaaggtgaaggaagaatttacagaccccacttacgacatgttttacatgagccagtatggactgtacaatggtgggggtgccagcatggccgccttgcatgagagctttacatcgtctctgaattatggcagccctcaagttctccccagaaggtgacctatgttctagcccagaccccaaaatctgttatgtgtgcaagaagagtttcaaaagctcctacagtgtgaaacttcactacaggaacgttcacttgaaagagatgcacgtctgcacagtggctggttgcaatgctgcattcccctctcgccgaagccgagacagcaaaagattagaaagctgatcttattgtcacaagacacagtgccaacataaacctacatcgtaaactgttgaccaaagaactcgatgacatgggcctggactcgtcgcagccctcccttagcaaggacctccgcgatgaatttttggtgaagatatatggtg

SEQ ID NO: 3197 - DNA, 3015 bp, Homo sapiens
  source 1..3015: mol_type = unassigned DNA
atgactgatgacgtcaaagaaccttctagattttctcttctactggccatccgttgcacactggtaaactgcacatgtgaatgttttcagccagggaagattaacctgaggacttgtgatcagtgtaaacatggctgggtggcacatgccttggataagctcagcacgcagcacctgtaccaccccacccaagtggagattgtgcagtccaacgtcgtgtttgacatcagcagcctgatgctctatgggacacaagcagtgcctgtgcggctaaagatcctgctggaccgtctcttcagcgtcctgaagcaagaggaggtactgcacatactgcacggccttggctggactctgcgggactatgtccgaggatacatccttcaggatgctgctggcaaggtgctggaccgctgggccatcatgtctcgagaagaggaaatcatcacccttcagcagtttctgcggtttggagaaaccaaatccattgtggagctgatggcaattcaggagaaagaagggcaggccgtggctgtaccatcttcaaagacagactcagatataaggactttcattgagagcaataatcgcaccaggagtcccagcctccttgctcacttagagaacagcaatccttccagcattcatcacttcgaaaacatcccaaacagccttgcatttctgcttccattccagtacataaaccctgtctcagcaccactgctagggttgcctccaaatgggctactgttagagcaaccagggttgaggctgcgggaacccagcctttcaactcagaatgaatataatgagagcagcgaatccgaagtttctcccacaccttataagaatgatcaaacacccaatagaaatgccctgaccagcattactaatgtggagcccaaaaccgagccagcctgtgtctctcccattcagaattctgccccagtcagtgatctaaccaaaactgaacacccaaaaagctcattccggattcatcggatgagaaggatggggtcagcctctaggaaaggaagagtgttctgtaatgcatgtgggaagacattctatgacaaaggtactctcaaaattcattacaatgctgttcacctgaagatcaaacatcgatgcaccattgaaggttgcaacatggtctttagctccctccgaagtcgtaatcgccacagtgcaaaccccaatcctcgccttcacatgcctatgctaaggaataaccgagataaagatttaattcgggccacctcaggagctgccacccctgtcatagcaagtacaaaatcaaatctggcactcacaagccctggccgacccccaatgggttttaccactccccctctagaccctgtcttgcaaaatcctctccctagccagctagtattttctgggctaaagactgtacaaccagttcctccattttatagaagtttactcactccaggggaaatggtgagtcctccaacctccctcccaaccagtcccatcattccaaccagtggtaccatagagcagcaccccccgccaccctctgagccagtagtgccagcagtgatgatggccacccatgagcccagtgctgacctggcacccaagaaaaagcccaggaagtcaagcatgcctgtgaagattgagaaggaaattattgataccgccgatgagtttgatgatgaagatgatgaccccaatgatggtggagctgtggtcaatgacatgagccatgacaatcattgtcactcccaagaggagatgagcccaggcatgtctgtgaaggacttttctaagcataacaggacccggtgcatttcaaggactgaaataaggagggccgacagcatgacttctgaagaccaagaacctgagcgggactatgagaacgagtctgagtcttcggagcccaaactgggcgaggaatccatggaaggggatgagcacattcacagcgaagtgagtgaaaaagtcctgatgaatagtgagaggcctgatgagaaccacagtgagccctctcaccaggacgtcatcaaggtgaaggaagaatttacagaccccacttacgacatgttttacatgagccagtatggactgtacaatggtgggggtgccagcatggccgccttgcatgagagctttacatcgtctctgaattatggcagccctcaaaagttctccccagaaggtgacctatgttctagcccagaccccaaaatctgttatgtgtgcaagaagagtttcaaaagctcctacagtgtgaaacttcactacaggaacgttcacttgaaagagatgcacgtctgcacagtggctggttgcaatgctgcattcccctctcgccgaagccgagacagacacagtgccaacataaacctacatcgtaaactgttgaccaaagaactcgatgacatgggcctggactcgtcgcagccctcccttagcaaggacctccgcgatgaatttttggtgaagatatatggtgcccagcaccccatggggctcgatgtcagggaagacgcctcctctcccgcagggactgaagactcccacctgaacgggtatgggagaggcatggcagaggactacatggtccttgacttgagcaccacctccagcctccagtccagcagcagtatccattcctccagagaatccgacgcaggcagcgatgaggggattcttctcgatgacattgacggggcgagtgacagtggggagtcggcacacaaggccgaggcccctgccctccctggcagcctaggggctgaagtttcaggatctcttatgttcagcagcttgtctgggagcaatggtgggatcatgtgcaacatttgccacaaaatgtacagcaacaaggggaccctgagagtgcactacaaaactgtgcatttgagagaaatgcacaagtgcaaagtcccaggttgcaatatgatgttttcctctgtacgaagccgaaatcggcacagtcagaaccctaatctccacaaaaacattcccttcacttcagtagattag

SEQ ID NO: 3198 - DNA, 15955 bp, Homo sapiens
  source 1..15955: mol_type = unassigned DNA
gagccgagctgggagatggcggcggcagcggcggcgccgagagtgtgagcaccgcccgggagccgccggcccgggcgcagcgcgaccccgaccccgcccgcccgcctgcccgccatgggcaacgaggtcagcctggagggcggcgctggcgacgggccgctgccgcccggcggcgccggccccggcccgggccccggccccggccccggcgcaggaaagccgccttcagcaccggccggtggcggacagctccccgcggcgggagcagcgcggtcgaccgcggtaccaccggtccctggccccggccccggccccggtcccggccctggcccgggcagcacttcccggagactggaccccaaggaacccctgggtaaccagagagcagcttccccaactccgaagcaggcttctgctaccactcctggccatgagagcccccgagagacaagggcacagggaccagcaggccaggaggctgatggtccccgcaggacgctgcaggtagacagcaggacacagagatcagggcggtccccctcagtgtcaccggacagaggcagcacccccacatcaccctactccgtccctcagatcgccccccttcccagcagcacgctgtgtcccatatgcaagacttcggacctcacgtcgacccccagccagccaaacttcaacacctgcacccagtgtcacaacaaggtctgcaaccagtgtgggttcaaccccaaccctcatctcacccaggtgaaggagtggctctgtctgaactgtcagatgcagagggctctgggaatggacatgaccactgcacctcgctccaagagccagcagcagctgcactccccagccctgtctcctgcccactccccggccaaacagcccctggggaagccagaccaagagagatctcggggcccaggaggaccacagcctgggtcccgccaggctgagacagccagggccacctcagtgccggggcctgcccaagcagctgcccctccagaggtggggagggtgtctcctcagccccctcaacccaccaagccttccacagctgagcccaggccacctgcaggagaggccccggccaaaagtgccaccgcagtgcccgctgggcttggtgccactgagcagacccaggagggcctcactggtaagctcttcggccttggcgcgtcactgctaacccaggcgagcaccctcatgtctgtgcagcccgaggctgacacccagggccagcctgcccccagcaaggggacacctaagatcgtcttcaatgatgccagcaaggaggctggcccaaaacccttgggctcagggcccgggcctgggccagcacctggagccaaaactgagcctggggctagaatgggtcctggatctggacctggagccctgccgaaaactgggggaacaaccagtccaaagcatggcagagcagaacatcaggcagcatcgaaggctgctgccaagccaaagaccatgccgaaggaaagggccatctgcccactgtgccaagccgagctcaacgtgggcagcaagagcccagccaactataacacatgcaccacctgcaggctccaggtgtgcaacctgtgtggcttcaacccaacaccccacctggtggagaaaacagagtggctctgtctgaactgccaaaccaagcggctactggagggcagcctaggagagccgacccccctgccgccgcccacctcacagcagccccctgtaggggcccctcaccgtgcatctggaacatcccctctgaagcagaaagggccacaggggctgggccagccttcaggccccctgcctgccaaggccagccctctatccaccaaggccagccctctgcccagcaaggccagcccccaggccaagcccctcagggcttctgaacccagcaagaccccaagcagtgtccaggaaaagaagacccgagtccccactaaagctgagcccatgccgaagccacctccagagactaccccaacccctgcgactcctaaagtaaagagtggggtgaggagggctgaacctgccacccctgtcgtcaaggctgttccagaagcccccaagggtggggaggcggaggacctggtgggcaagccttactctcaggatgcgtctcggagcccacagagcctcagtgacacaggctattcctctgacggcatctctagctcccagagtgagatcacaggagtcgtgcagcaggaggtggaacagctggacagtgcaggggtgacagggccacatccacccagcccctccgagatccacaaggtggggagcagcatgcggcctttgctgcaggcccagggcctggccccaagtgagcggagcaagccactctccagcggtactggcgaggagcagaagcagcggccccactccttgtccatcacgcctgaggcctttgactctgatgaggagctggaggatatcctggaggaagacgaagactctgctgagtggaggcgccggagagagcagcaggacactgccgagtcctcagacgactttggcagccaattgaggcacgactatgtggaggacagcagtgagggtggcctgtcccctcttccaccccagcccccagcccgggcagcagaactgactgatgaggatttcatgcgacggcagattctcgagatgagcgccgaggaagacaacctggaggaggatgacactgccacctccgggcgtggcctggccaaacatggcacccagaaaggtggccccagacccaggcctgagcctagccaagaaccagcagcactgcccaagaggcgcctgccccacaatgccaccacgggctatgaggagctgctccctgagggaggctcagcagaggctaccgatggcagtgggaccctgcagggtgggctccgtcgcttcaagaccattgagctcaacagcacgggaagttatggtcatgagttggacctgggccaaggcccagaccccagtctggaccgggagcctgagctggagatggagagcctaacgggctcccctgaggaccgctcccgtggtgagcactcctctacattgcctgcctccacacccagctacacctcgggcacctctcccacctctctgtcctccctagaggaggacagtgacagcagccccagccgcaggcagcgtctagaagaagcaaagcagcagcgcaaggcccggcaccgctcccacgggcccctgctacccaccatcgaggactcctcagaggaggaggagctgcgggaggaagaggagctgcttcgtgagcaagagaagatgcgggaggtggagcagcagcgcatccgcagcacggcccgcaagacccggcgggacaaggaagaactgcgggcccagcggaggcgagagcgctccaagacaccacccagtaacttgtcacccatcgaggatgcctccccgacggaggagctgaggcaggcggccgagatggaggagctacaccgctcctcctgctctgagtactcaccctcaccctcccttgactctgaggctgaggccttggatggtggccctagccggctttacaagtcaggcagtgagtacaacctgcccaccttcatgtccctctactcaccaaccgagacaccctccggcagctccaccactcccagttccggacggccgctcaagagcgctgaggaggcttatgaggagatgatgcgcaaagctgagctgctccagaggcagcaaggccaggcagcaggggcccggggaccccatggcggcccctctcagcccacaggcccccggggcctgggctccttcgaatatcaagacactacagaccgtgagtatggccaggctgctcagcctgccgcagagggcacgccagccagcctgggagcagccgtgtacgaagaaatccttcagacatcacagagcatagtccgcatgcggcaggcctcctcacgagacctggcttttgctgaggacaaaaagaaggagaagcagtttctaaatgctgagagtgcatacatggacccaatgaagcaaaatggtggcccccttacccctggtaccagtcccacccagctcgctgcccctgtgtccttctctacccccacctcctcagacagcagcgggggccgagttattcccgatgtccgtgtcactcagcattttgcaaaggagactcaggaccccctcaagctgcacagctctcctgcctcccccagctcagcctccaaggagataggcatgcccttttcccagggccctgggaccccagccaccacagctgtggctccttgtccagctgggctgccacgaggatatatgactccagcctccccagcaggctccgagcgtagtccttcaccatcttccacagcccacagctatggacacagcccaaccactgcaaactatgggtcccaaactgaggatctaccccaggcccccagtggccttgctgcagctggacgagctgctagagagaagcccttgagtgcgagtgacggtgagggtggcactcctcagccttcccgggcatattcctactttgcaagctccagcccacctctctccccgtcttccccctcagagagtcccacattctcccctggcaagatgggcccaagggccacagcagagttctctacacagacgccaagtccagcccctgcctcagacatgccacggagccctggtgcccccactccatcacctatggtagcccagggtacacaaacaccacatcgacccagcacgcctcgcctggtgtggcaggagtcctctcaagaggctccctttatggtcatcacgctggcatctgacgcctccagccagaccaggatggtacatgccagtgcctccacctccccgctctgctcacctactgaaacccagcccaccacccatggctacagccagacaacacctccgagtgtgtctcagctgcccccagagccacctgggccacctggctttccacgggtgcccagtgctggtgcagatgggcccctggcactatatggctggggtgccctccctgctgagaacatctccctgtgccggatctcctctgtccctgggacgtctagggttgagccaggccccaggacccctggcactgcagtggtagacctccgtacagctgtcaagcccactcccatcatcctcactgaccagggcatggacctcacctctcttgctgtggaagcgaggaagtatggtcttgccctggatccaatcccaggacggcagtcgaccgccgtgcagcccttggttatcaacctcaatgcccaggagcataccttccttgctactgccaccaccgtgagcatcaccatggcctcgtctgtgttcatggctcaacaaaagcagcctgtggtctatggagacccctaccagagccgccttgactttggccagggtgggggtagccctgtgtgcctggcccaggtcaaacaagtagagcaggctgtccagacagccccataccgaagtgggccccggggaagacccagggaggccaagtttgccagatataacctacccaaccaagtagctcctctggccagaagagacgttttgatcactcagatgggcaccgcccagagcattggcctcaagccaggcccagtgccagagccaggtgccgagccccaccgggccacccctgcagagctgcggtcacatgctctgccaggtgccaggaagccacacacagtggtggtgcagatgggagagggcacagcaggcactgtgaccacactgctcccagaggagcctgcgggtgccctggaccttaccgggatgaggcctgagagccagctggcatgctgtgacatggtctacaagctcccctttggcagcagctgcactggcaccttccacccggcccccagtgtgcctgagaagagcatggcagatgctgccccacctggccaaagcagcagccccttctatggtccccgggaccctgagcctcctgagcccccaacctaccgggcacagggggtggtggggcctgggccccatgaggagcagaggccctacccacaaggcctgcctggtaggctgtactcctccatgtctgacaccaatttggctgaggctggcctcaactaccatgcccagaggatcgggcagctcttccagggtcctggacgagactcggctatggacctcagctcactgaagcactcctacagcctgggctttgcggatggacgctacctagggcagggcttgcagtatggctcagtcacggacctgcgtcatcctacagaccttttggctcacccgcttcccatgcggcgctatagctcagtgtcgaacatctactcagaccacaggtacggcccacggggagatgcagttggcttccaggaggccagcctggcccagtacagtgccaccacagcccgtgaaatcagtcgcatgtgcgctgccctcaactccatggaccagtatggtgggcggcatggcagtggtggtggtggccctgaccttgtgcagtaccagccccagcacgggcccgggctcagtgctccacagagtctggttcccctcagacctggactccttggtaaccccacctttccagagggccacccaagtcctgggaacttggcccagtatgggcctgcagcaggccaaggaacagcagtcagacagctgctgccgtccacagccactgtacgtgcagctgatggcatgatctactcgactatcaataccccaattgctgcaacactgcccatcaccacccagcctgcctcagtcctgcggcccatggtgcgtggtggcatgtacaggccttacgcatctggtggaatcacagccgtgccactcaccagtctgacacgtgtgcccatgattgccccccgggtacctcttggacccacagggctgtaccgctatcctgcaccaagtagatttcccattgcttccagtgttccacctgcagaagggcctgtctatctggggaaacctgctgctgccaaggcccctggggctgggggcccttcaaggccagagatgccagtaggggctgcacgggaagagcctcttcccacaaccacccctgctgccatcaaggaggctgcaggagccccagctcctgccccactagctggccagaagccaccagcagatgctgctcctgggggtggcagtggggccctcagccggccagggttcgagaaagaggaagcatcacaggaggagaggcagcggaagcaacaggagcagctgctccagctagagcgggagcgggtggagttggagaagctgcgacaacttcggctgcaagaggagctagagcgggaacgtgtggagctgcagaggcaccgtgaggaggagcagctgctggtgcagcgggagttgcaggagctgcagaccatcaagcaccatgtgctgcagcagcagcaagaggaacgccaggctcaatttgcactgcagcgggaacagctagcgcagcagcgtctgcagctggagcagatccagcagctgcagcagcagctgcagcagcagctagaggagcagaagcagcggcagaaggctccctttcctgcagcctgtgaggcacctggccgagggcctcccctagcggctgctgagttggcccagaatggccagtattggcccccccttacacatgcagccttcattgccatggcagggcctgaaggacttgggcagcctcgtgagcctgtgctgcaccggggtctccccagctctgcctcagacatgtcactgcaaacggaggagcagtgggaggccagccgtagtggcatcaagaagcggcactccatgccacgcctgcgggatgcctgtgagctagagtctgggactgagccctgtgtggtcaggaggattgccgacagcagcgtgcagacagacgatgaggatggggagagccgctacctcttgagtcggcgacgccgggcacggcggagtgctgactgcagtgtgcagacggacgacgaagacagtgctgagtgggagcagccagtgcgccgccgcaggtctcgtcttccccgccactcagactcaggctctgacagcaagcacgatgccactgcctcatcatccagtgctgctgccactgtgagggccatgagcagcgtgggcatccagaccatcagtgactgctccgtgcagacggagcctgaccagctgcccagggtctctccagccatccacatcacagctgccaccgatcccaaggtggagatcgtcaggtacatatcggcgccagagaagactgggcgtggggagagcctggcctgccagacggagccagatgggcaggcccagggtgtagccgggccgcagcttgtagggccaactgccatcagcccctacctgcctggcatccagatcgtcaccccagggcctctgggcagatttgaaaaaaagaagccagatcccctggagattgggtaccaggcccacctgcctccggagtctctctcacagcttgtgagccgccagcctcccaagtcccctcaggtcctctactcaccagtctcacccctgtcccctcaccggctcctggacacctcctttgcttccagtgagaggctgaacaaagctcacgtgagtccccagaagcacttcacggctgacagcgctctccgccagcagacgctgcctcgccccatgaagaccctgcagcggtccctgtctgaccctaagcccctcagccccaccgccgaagagtctgccaaagagagattctccctctaccagcaccaggggggactgggtagccaggtgtcggcgttgccacccaacagcctggtccgcaaggtgaagcggacactgcccagcccccctccagaggaggctcaccttcccctggctggccaggcctccccacagctgtatgcagccagcctgctgcagcgagggctgacggggcccaccactgtccctgctaccaaggccagcctgctccgggagctggaccgggacctgcggctggtggagcatgagtccaccaaactgcgcaagaagcaggcagagctggatgaggaggagaaggagattgacgccaagctcaagtacctggagttgggtatcacacaacgcaaagagtctttggccaaagaccggggtggccgtgactacccacccttgcgtggtcttggcgagcatcgtgactacctatcggacagtgagctcaaccagctgcggctccagggctgcaccactcccgctggccagtttgtggacttccctgccactgccgctgctcctgccaccccctctggtcccactgccttccagcagccccgcttccagcctccagccccacagtattctgcaggcagtggtgggccaactcagaacggattcccagcccaccaggcccccacctaccctggccccagcacgtacccagctcctgcctttcctcctggtgccagttacccagctgagcctggcctgccaaaccagcaggctttccgccccacaggccactatgcaggccaaacacccatgccaaccacacagagcaccctttttccagtccccgctgatagccgtgccccactgcagaagccacgccagacatcgctagccgacttggagcagaaggtgcccaccaactatgaggtgatcgccagccccgttgtgcccatgtcttcagccccatctgaaaccagctacagtggcccagcagtgagcagcggctatgagcagggcaaggtccctgaggtgccccgggctggtgaccgtggcagtgtgagccagagcccagcccccacctacccctctgactcacactataccagtctggagcagaacgttcctcgaaactacgtaatgattgatgacatcagtgaactgaccaaggacagcacctctactgctcctgatagccaacggctggagcccctggggccaggcagcagtgggcgtccagggaaggagcctggagaaccaggtgtccttgacgggcccacactgccctgctgctatgccagaggagaagaggaatctgaggaggactcatacgatccccgcgggaagggtggccacctccggagcatggagagcaatggtcgaccagccagtacccactactatggtgacagtgactacaggcatggggctcgagtagagaagtatggtccagggcccatggggcccaagcatccctccaagagcctggctccagctgccatctcctcaaagcgcagcaagcaccggaagcagggcatggagcaaaagatatccaagttctcgcctattgaagaggccaaagacgtagagtcagacctggcgtcctaccccccacctgcagtcagcagcagcctggtctctcggggcaggaagttccaggatgaaatcacctatgggctcaagaagaacgtgtatgagcagcaaaaatactatgggatgtccagccgggacgcagtggaggacgaccgcatttatggcgggagcagccggtcccgggcaccttctgcatacagtggggagaagctgtccagccacgacttcagtggctggggcaaggggtacgaaagggaacgggaggctgtggagcgacttcaaaaagcgggccccaagccctcatccctaagtatggcccacagccgggtacgaccccccatgcggagccaggcctctgaagaggagagccccgtcagtcctttggggaggccccgccctgccggagggcccctccctcccggcggggatacctgcccacagttctgctccagccactccatgcctgatgtccaggaacatgtcaaggacggacctcgggcccacgcatataagcgtgaggagggctacatcctggatgattcccattgcgtggtttccgacagcgaagcgtatcacctgggccaggaggagacggactggtttgataagccccgggatgcccgctctgaccggttcaggcaccacgggggccatgcagtttcctcctcctcccagaagcgaggccctgccaggcacagctaccatgactacgatgaaccccctgaggagggcctgtggcctcatgatgagggtggcccaggccgccatgcctcagccaaggaacaccggcacggtgaccacgggcggcactcaggccgccacactggtgaggagccgggacggcgtgctgccaaaccacacgctcgggacctgggtcgccatgaggcccggccccactctcagcccagctctgctccagctatgccgaagaagggtcagcctgggtatcccagctctgctgagtactcacagccatcccgtgcttcatccgcataccatcatgcctctgacagcaagaagggctcccggcaagcccactccgggcccgctgcactgcagtcaaaggcagaaccccaggcgcagccgcagctgcaaggtcggcaggcagctccaggaccacagcagtcacagtcaccatcatccaggcaaataccctctggggcagcatcacgccagccacagacacagcagcagcagcaaggtcttgggctgcagcccccacagcaggctctgacacaggctcggctgcagcaacagagccagccaaccacccggggctcagcccctgctgccagccagcctgcagggaagcctcagccaggccccagcacagccacaggtcctcaaccagcaggaccgccacgggcagaacagacaaatggctctaaagggacagccaaagcaccgcaacaggggagggctcctcaggcccagccagcaccaggacctggacctgcaggtgtgaaggctggagccaggcctggaggaaccccaggggctcccgccggccagccaggtgccgatggggagagcgtgttctccaagatcctccctggcggggcagccgagcaagctggcaaactgacggaagctgtctctgcttttggcaaaaaattttcctcattctggtgaccatgcccagcatggctcttgaagaaatgaagagaggtatcattgctgtggaaaaatctctggagtcagaggcctgggcgcagctctggactctgcgtataacacatctacaatctggcaaacccttggcccaaagactcaccaggtgggacgtggcaggcaggcctcagttgaggacgtgatgttttctcacagcagctgcctgggtgaagcatctgctggacaagtcggaccactggccaggggacctttgattgtctttccagagatgctgctctctgcagggcaccaccttcaaggcacagcccttgttgggagggagaaccctctccagaaaccctgccaccatggtgtcttgccgtacttcccacagccgcctttttgcggcctggccggccaggcttcccgtgcgttatacacagagtttgggcacacactgccctccctccgagatgccagaagtttttccacagccttggagaggggctttgactgagggctgggggccctgggctccgtttccttcacattccagctggcccggatccctctgtggcacagggccctgcccgtcacatgccctctgggtgacatcggagcagacctccatgtggccaggggttgggagaactttacaaacattaggacctaacactgtctcatcgctgaaataagaggccatagcaccgaaaagcagcgtgggcgccggctgaggcttctcccagcccgtgggtggcagcgtgctagcacactgccaccatctcaaagccatccccctagccatcgtgagcatcccagcggcaccgccattgtctcaaccagccggctcctcgtctgtacacctggggatttcttttgatttcaagaacagccttaatcattccagtttgatttacgtgtatacctcataaacatttttcttttgtttctctctccccctttctctcttctcttggctcactcccttgcctctccccctccaccaccaccttgtgactgatggtttggtttcctctctgctctgcccctgctcagcacagggagaatgttgacttagaagcaatagggggcagcaggccaccaagagcacaaccccagggcgaggtctggggaggcctcccagcccgcctctgtttactgtgcaattccagtcgttcttaagccatcaccagtgggtgtactcagagcagaggggccaggacttctgccagccaagggaaaggcccagagccctgtgcgggggaatgtggcactgtctatccatccggtggactgggcagcattcctccccagggctcttcccttgggggcctcctttcatctggggcacagccacaagtctcatctctaacgttctatgcaatgaaatataaaccctcaatgacaactgttaatatttaataaattccatgttatgtataaggagttaattgcaaacatgcaattgagaaactggatagatacactcataaaacccccacccctccccaccccacccctgctcccattgtgtgtgtgaaattctcagtctgtggcatgtttgacctgtggcaggactcgctgctgccaggtgagtcaccgcctgtcctgcagtggagcatgcacagctcgcagcctctttgcacgatttcatccattttaaatgcttgaccctcttgcttggagttctttttgcctcagaacctctccttcaggagcacttctagctgacttctgcacaagctagtgaggacctgccagaattgttgcctgagcgtgccaggctgcagggcaggcagtaaaaggcccccacataccctgcagttttctctgtccaggacagcaggtaaaaaggaatccccagagcagacgcaatggtaggagcctgcacaggatgtgtgtgtatggacattctgaaggtttgctgtaggatatctgtctgtctgtcattttcccttcctaccccaaccctgagccagaggcatctgacagccctttcccagagggcaccacgcaagggcagagctgggcggcatccacagccagagaggcagaggcaagagcagagccaggctgtgcccgagggaccccagctcttgactgcacctgtttcatgcctctcctctgtggctaggaggctcaaaggactgtgagccaggagatctgggctggagctagggggtcaatggatgctcaggaagagctgggcctttggcacttgtggtgagaacagttgacagtggtcatctggaactgttcatataaacagtggcttcaagctaagtttcttgtgaagtttctcaatagcaaatcttacagaaggtcctgtgtgaccctctctgcatctgtccccaggacctatgctccctgctcacccccttctccaaagcccaagcgtcccgctgctcatcagcttttttaccattgagccaggagtgcggcaggcagtacctgcctgacccttcaaggcctgaccttcgtccagagtgctctggtttgcaccatgcatttctcaggggtccgcatttctcatgcttttctataagatctacacaccccttcagagagggctcctcgctcacctctggtagctatggatgggacaggaagctgccaacctttgtgttggacttaacacccttgcctttctgggacttggcctcaccccacccatggaatacctgcctcatcccaaagatcaggtatgggctgaatgcagccatctgagcaagggctgagggaagccatcacctaacacctctggccacccaggaccaggtctgtgtggggatgtgccttggagaccaaggcaatagtcctttccactacaggccaggggatgggacaagaagtagggaacaggcagggaaatgttaggaggtcagcctccagcaggcctagtctcaggctctaaagtactgacttttcagcaaatttcctttctggccaagccctctgagtttgaaattctgacatctgccactcctcatcccccactgtacccacaggatacatcatcgcccctctgtgaaggtggctggagcaggcctctggtccatggactgtccttcctggcccttgcatggatgcagttgtgactctggggacaatgcagccagaagctgagggaccagcacttggtgccttggaaagtagagagcaacagacacatctccaaatgggcaaggagtctctagcatgcagcccaggccttctccatacccctctccccagcatcatgagcaagggcattgcctcctctctctgctcacttcagggcccagtgcactcacttcacagtgacagccctcccctacaatccttgggcagagcatgtggtctgagggcccacagtgaaagaacagcagtggtggcaactatgccttgccttctggagcctgtagggagttttccaggcaggtcctttgccaggacagcatggtcctgccctgttgtcccgtctgctctcctcttacccacccccatgctgtaaatacttgtcatcatggactccaacagggttagagggacaggcctaatcaactgaaactcctcggagatgccatctctgtctccctgggtgccagcagccctgctgccatgtgcactggggtggcactggagagccatggcagtcgtgagatattgtatgtgtatgcacatgatcatgtgtgtatgtgcgtgcgtgcgtgcgtgtgtgtgtgtgtgtgtgtttctgcctcattcagtttctggggtcaaatcagctccttctctccaagtgcactaccctggagagtggtggccactcaataccttttcctctagctttcatgtcttgtttttgctttccccttcctcctccctctctccctttctttccttctctccttctttatttgaggggggaagagtgctgtacaaagtcaaacaaacaagtttacagttgtaagtgcaatgacccgagtcctccacatgaccttgtgaattgtgtgctgtccttctgtgctctgtgagaactcgtggtacttcagtgtccctccccctgtattgtgacaaggtaattctgtggtatcagaataaaaggacttgatataaacaa

SEQ ID NO: 3199 - DNA, 2974 bp, Homo sapiens
  source 1..2974: mol_type = unassigned DNA
aaaggattcatcctaaagttaaggatggttcagtaaatcggatggaagatgatgaaaaattaagcaattagaaaaaaactgtccttgtgtaatgtgtcaacatggaaacaggacataatgtaaacatcagaatcccttgctgtgattctggtttttgtggctctggttacattgtttttttgtgtgtgtttttttttttttttgctttcccgtttcttaaacattggcgttcccaagtttctccttggtcctcctgtcatttttatctactctcgtagcttcaaataccatctagtttatagtttatttagcatgttgtccaagccaccgtcttgggcccagggctctacctgtagcttttcatccacacttctcaggttgcttcttacacagcgccatagtagttaaaatacggtctggggatagtcgtctcttcatcagtctcccccgacgacctgcgcaggcgtggcttgaggaaacgcccgctgtgggcggagccacccgaaaggctccggtcgggggcgggaacaggatcggcccgcgggctggcgtcgataggctgccgcagagacagggcgggctctgctaagcgacgcgcctcgccgtggggcggtgcctgcgcctgagcctctacgagagggaaggaacgctgctccgagctccgcgtcgcgtcgcgtagattcgcgtcgccgtcgacctcagaggcggggccggaagcgctacggtttgacccccgagtccctctgttcccgaaggggcggccgtctttctcccgacccgctccgcctcctctccttcttccccattacccggaggccgaagcccccagccagggcggggcggcgcagcccgagctcccggacccggaagaagcgccatctcccgcctccaccatggagcccaccgcaccgtccctcaccgaggaggacctcactgaagtgaagaaggacgccttagaaaatttacgtgtatacctgtgtgagaaaatcatagctgagagacattttgatcatctacgtgcaaaaaaaatactcagtagagaagacactgaagaaatttcttgtcgaacatcaagtagaaaaagggctggaaaattgttagactacttacaggaaaacccaaaaggtctggacacccttgttgaatctattcggcgagaaaaaacacagaacttcctgatacagaagattacagatgaagtgctgaaacttagaaatataaaactagaacatctgaaaggactaaaatgtagcagttgtgaaccttttccagatggagccacgaacaacctctccagatcaaattcagatgagagtaatttctctgaaaaactgagggcatccactgtcatgtaccatccagaaggagaatccagcacgacgccctttttttctactaattcttctctgaatttgcctgttctagaagtaggcagaactgaaaataccatcttctcttcaactacacttcccagacctggggacccaggggctcctcctttgccaccagatctacagttagaagaagaaggaacttgtgcaaactctagtgagatgtttcttcccttaagatcacgtactgtttcacgacaatgacactttattgccttttaatttttaatgatgacaaaaaatgttttaaagaatatgactttttataaaatggctgtaatcatttgtttacatttgatgcatgtcttttaaaatgcaatgtaagcatactttgtaaataggatttttagaattaaaaaagcatacttctaggatagctaactgtaaatcatgttgatcatgtactttttagtaatttctttttttcctttttaaggtctttcagtacttttttaaatattttctattttaagactgattttaatagggaatatatctctatttgagaatagacccttactaggaagaacgttttttcctcagtgcatttgtgctagaaattttcaagagtctaatagtctttgccagtcattcagcagcaaattttcagcattaagctgttcctgttcagtaataaaaccggtcactgatgggaaaactgccaatatagaaaaataaaaatctcttttccactccattgtcgtataggcatgtaaacagcctctttttgatactggaggaacacttgatggagtgtgagccacctaagatctcggtttgccaaaattcatttctaattaaccttactaattatactactttgttaggattttcacattcttggcttaatcattttcattcctaaagaaaaatatcttggcctaaacctcagttattacatgtaatttgatgaggtattttttccttttttcttttttttttttttttttttttgagacagtcttgctctatcgcccaggctggagtgcagtggcgcattctaggctcactgcaacttctgcctcccatgcttacgtgatcctctcacctcagcctctcaagtaatatagctgagactacaagtgtgtgccaccatgcctcactaatttttgtattatttttgtagagacggtgttttgccatgttggccaggctggtcttgaactcctggactcaagcaacctacccagcgtggcctcccaaagtgctgggattacagacacgagccacctcacctagcctgatgagatttttaaaaaatattttctctgtacttttcattctcttttaatgaggaccaatgtacagttgaaataactggaacaaattatttttggtgtgtgtgacaattctgtttttaatgctatttgaacaagtgggccattagccagatttgtctttttgttgtaaaacaaaatttgactaattttacatgtttataaatcttatgctctcactgtttgtttttatttaaattacaattttatctgtttcctgacattgtctcctatatatttctattattaattgcaaaaacatagaaatggaaattttgctatcaacaataaaatttttttaaagta

SEQ ID NO: 3200 - DNA, 2819 bp, Homo sapiens
  source 1..2819: mol_type = unassigned DNA
tttttctttcaaaaatttgtttagtattgtagttaggctgtttgtgtgtatgcatgtgtatgtgtgtatgagtgcgtttgtgtgtgaccaaaacagtaactggcaaacgtaacaacaggaaattgtagggcagggtctgggaaaaggggaggaacccaaggtactgacaagcccagaccggactcccccgaagtgagcaggcagcaaaggctgagagtgccagctgcctgggcactgacggaccccacccacggaaacgatgccttatgaggaagctaacccgggccacttaccgacgacctgcgcaggcgtggcttgaggaaacgcccgctgtgggcggagccacccgaaaggctccggtcgggggcgggaacaggatcggcccgcgggctggcgtcgataggctgccgcagagacagggcgggctctgctaagcgacgcgcctcgccgtggggcggtgcctgcgcctgagcctctacgagagggaaggaacgctgctccgagctccgcgtcgcgtcgcgtagattcgcgtcgccgtcgacctcagaggcggggccggaagcgctacggtttgacccccgagtccctctgttcccgaaggggcggccgtctttctcccgacccgctccgcctcctctccttcttccccattacccggaggccgaagcccccagccagggcggggcggcgcagcccgagctcccggacccggaagaagcgccatctcccgcctccaccatggagcccaccgcaccgtccctcaccgaggaggacctcactgaagtgaagaaggacgccttagaaaatttacgtgtatacctgtgtgagaaaatcatagctgagagacattttgatcatctacgtgcaaaaaaaatactcagtagagaagacactgaagaaatttcttgtcgaacatcaagtagaaaaagggctggaaaattgttagactacttacaggaaaacccaaaaggtctggacacccttgttgaatctattcggcgagaaaaaacacagaacttcctgatacagaagattacagatgaagtgctgaaacttagaaatataaaactagaacatctgaaaggactaaaatgtagcagttgtgaaccttttccagatggagccacgaacaacctctccagatcaaattcagatgagagtaatttctctgaaaaactgagggcatccactgtcatgtaccatccagaaggagaatccagcacgacgccctttttttctactaattcttctctgaatttgcctgttctagaagtaggcagaactgaaaataccatcttctcttcaactacacttcccagacctggggacccaggggctcctcctttgccaccagatctacagttagaagaagaaggaacttgtgcaaactctagtgagatgtttcttcccttaagatcacgtactgtttcacgacaatgacactttattgccttttaatttttaatgatgacaaaaaatgttttaaagaatatgactttttataaaatggctgtaatcatttgtttacatttgatgcatgtcttttaaaatgcaatgtaagcatactttgtaaataggatttttagaattaaaaaagcatacttctaggatagctaactgtaaatcatgttgatcatgtactttttagtaatttctttttttcctttttaaggtctttcagtacttttttaaatattttctattttaagactgattttaatagggaatatatctctatttgagaatagacccttactaggaagaacgttttttcctcagtgcatttgtgctagaaattttcaagagtctaatagtctttgccagtcattcagcagcaaattttcagcattaagctgttcctgttcagtaataaaaccggtcactgatgggaaaactgccaatatagaaaaataaaaatctcttttccactccattgtcgtataggcatgtaaacagcctctttttgatactggaggaacacttgatggagtgtgagccacctaagatctcggtttgccaaaattcatttctaattaaccttactaattatactactttgttaggattttcacattcttggcttaatcattttcattcctaaagaaaaatatcttggcctaaacctcagttattacatgtaatttgatgaggtattttttccttttttcttttttttttttttttttttttgagacagtcttgctctatcgcccaggctggagtgcagtggcgcattctaggctcactgcaacttctgcctcccatgcttacgtgatcctctcacctcagcctctcaagtaatatagctgagactacaagtgtgtgccaccatgcctcactaatttttgtattatttttgtagagacggtgttttgccatgttggccaggctggtcttgaactcctggactcaagcaacctacccagcgtggcctcccaaagtgctgggattacagacacgagccacctcacctagcctgatgagatttttaaaaaatattttctctgtacttttcattctcttttaatgaggaccaatgtacagttgaaataactggaacaaattatttttggtgtgtgtgacaattctgtttttaatgctatttgaacaagtgggccattagccagatttgtctttttgttgtaaaacaaaatttgactaattttacatgtttataaatcttatgctctcactgtttgtttttatttaaattacaattttatctgtttcctgacattgtctcctatatatttctattattaattgcaaaaacatagaaatggaaattttgctatcaacaataaaatttttttaaagta

SEQ ID NO: 3201 - DNA, 774 bp, Homo sapiens
  source 1..774: mol_type = unassigned DNA
ctctccttcttccccattacccggaggccgaagcccccagccagggcggggcggcgcagcccgagctcccggacccggaagaagcgccatctcccgcctccaccatggagcccaccgcaccgtccctcaccgaggaggacctcactgaagtgaagaaggacgccttagaaaatttacgtgtatacctgtgtgagaaaatcatagctgagagacattttgatcatctacgtgcaaaaaaaatactcagtagagaagacactgaagaaatttcttgtcgaacatcaagtagaaaaagggctggaaaattgttagactacttacaggaaaacccaaaaggtctggacacccttgttgaatctattcggcgagaaaaaacacagaacttcctgatacagaagattacagatgaagtgctgaaacttagaaatataaaactagaacatctgaaagatggagccacgaacaacctctccagatcaaattcagatgagagtaatttctctgaaaaactgagggcatccactgtcatgtaccatccagaaggagaatccagcacgacgccctttttctactaattcttctctgaatttgcctgttctagaagtaggcagaactgaaaataccatcttctcttcaactacacttcccagacctggggacccaggggctcctcctttgccaccagatctacagttagaagaagaaggaacttgtgcaaactctagtgagatgtttcttcccttaagatcacgtactgtttcacgacaatgacac

SEQ ID NO: 3202 - DNA, 5942 bp, Homo sapiens
  source 1..5942: mol_type = unassigned DNA
ttttttttttttttttgcttaaaaaaaagccatgacggctctcccacaattcatcttccctgcgccatctttgtattatttctaatttattttggatgtcaaaaggcactgatgaagatattttctctggagtctccttctttctaacccggctctcccgatgtgaaccgagccgtcgtccgcccgccgccgccgccgccgccgccgccgcccgccccgcagcccaccatgtctcgccgcaagcaaggcaaaccccagcacttaagcaaacgggaattctcgcccgagcctcttgaagccattcttacagatgatgaaccagaccacggcccgttgggagctccagaaggggatcatgacctcctcacctgtgggcagtgccagatgaacttcccattgggggacattcttatttttatcgagcacaaacggaaacaatgcaatggcagcctctgcttagaaaaagctgtggataagccaccttccccttcaccaatcgagatgaaaaaagcatccaatcccgtggaggttggcatccaggtcacgccagaggatgacgattgtttatcaacgtcatctagaggaatttgccccaaacaggaacacatagcagataaacttctgcactggaggggcctctcctcccctcgttctgcacatggagctctaatccccacgcctgggatgagtgcagaatatgccccgcagggtatttgtaaagatgagcccagcagctacacatgtacaacttgcaaacagccattcaccagtgcatggtttctcttgcaacacgcacagaacactcatggattaagaatctacttagaaagcgaacacggaagtcccctgaccccgcgggttggtatcccttcaggactaggtgcagaatgtccttcccagccacctctccatgggattcatattgcagacaataacccctttaacctgctaagaataccaggatcagtatcgagagaggcttccggcctggcagaagggcgctttccacccactccccccctgtttagtccaccaccgagacatcacttggacccccaccgcatagagcgcctgggggcggaagagatggccctggccacccatcacccgagtgcctttgacagggtgctgcggttgaatccaatggctatggagcctcccgccatggatttctctaggagacttagagagctggcagggaacacgtctagcccaccgctgtccccaggccggcccagccctatgcaaaggttactgcaaccattccagccaggtagcaagccgcccttcctggcgacgccccccctccctcctctgcaatccgcccctcctccctcccagcccccggtcaagtccaagtcatgcgagttctgcggcaagacgttcaaatttcagagcaacctggtggtgcaccggcgcagccacacgggcgagaagccctacaagtgcaacctgtgcgaccacgcgtgcacccaggccagcaagctgaagcgccacatgaagacgcacatgcacaaatcgtcccccatgacggtcaagtccgacgacggtctctccaccgccagctccccggaacccggcaccagcgacttggtgggcagcgccagcagcgcgctcaagtccgtggtggccaagttcaagagcgagaacgaccccaacctgatcccggagaacggggacgaggaggaagaggaggacgacgaggaagaggaagaagaggaggaagaggaggaggaggagctgacggagagcgagagggtggactacggcttcgggctgagcctggaggcggcgcgccaccacgagaacagctcgcggggcgcggtcgtgggcgtgggcgacgagagccgcgccctgcccgacgtcatgcagggcatggtgctcagctccatgcagcacttcagcgaggccttccaccaggtcctgggcgagaagcataagcgcggccacctggccgaggccgagggccacagggacacttgcgacgaagactcggtggccggcgagtcggaccgcatagacgatggcactgttaatggccgcggctgctccccgggcgagtcggcctcggggggcctgtccaaaaagctgctgctgggcagccccagctcgctgagccccttctctaagcgcatcaagctcgagaaggagttcgacctgcccccggccgcgatgcccaacacggagaacgtgtactcgcagtggctcgccggctacgcggcctccaggcagctcaaagatcccttccttagcttcggagactccagacaatcgccttttgcctcctcgtcggagcactcctcggagaacgggagtttgcgcttctccacaccgcccggggagctggacggagggatctcggggcgcagcggcacgggaagtggagggagcacgccccatattagtggtccgggcccgggcaggcccagctcaaaagagggcagacgcagcgacacttgtgagtactgtgggaaagtcttcaagaactgtagcaatctcactgtccacaggagaagccacacgggcgaaaggccttataaatgcgagctgtgcaactatgcctgtgcccagagtagcaagctcaccaggcacatgaaaacgcatggccaggtggggaaggacgtttacaaatgtgaaatttgtaagatgccttttagcgtgtacagtaccctggagaaacacatgaaaaaatggcacagtgatcgagtgttgaataatgatataaaaactgaatagaggtatattaatacccctccctcactcccacctgacaccccctttttcaccactccccttccccatcgccctccagccccactccctgtaggatttttttctagtcccatgtgatttaaacaaacaaacaaacaaacagaagtaacgaagctaagaatatgagagtgcttgtcaccagcacacctgttttttttctttttctttttcttttttctttttccttttttttttttttcctttatgttctcaccgtttgaatgcatgatctgtatggggcaatactattgcattttacgcaaactttgagcctttctcttgtgcaataatttacatgttgtgtatgtttttttttaaacttagacagcatgtatggtatgttatggctattttaaattgtccctaattcgttgctgagcaaacatgttgctgtttccagttccgttctgagagaaaaagagagagagagagaaaaagaccatgctgcatacattctgtaatacatatcatgtacagttttattttataacgtgaggaggaaaaacagtctttggattaaccctctatagacagaatagatagcactgaaaaaaaatctctatgagctaaatgtctgtctctaaagggttaaatgtatcaattggaaaggaagaaaaaaggccttgaattgacaaattaacagaaaaacagaacaagtttattctatcatttggttttaaaatatgagtgccttggatctattaaaaccacatcgatggttctttctacttgttataaacttgtagcttaattcagcattgggtgaggtaataaaccttaggaactagcatataattctatattgtatttctcacaacaatggctacctaaaaagatgacccattatgtcctagttaatcatcatttttcctttagtttaattttataaacaaaactgattataccagtataaaagctactttgctcctggtgagagcttaaaagaaatgggctgttttgcccaaagttttattttttttaaacaatgattaaattgaatgtgtaatgtgcaaaagccctggaacgcaattaaatacactagtaaggagttcattttatgaagatatttgctttaataatgtctttttaaaaatactggcaccaaaagaaatagatccagatctacttggttgtcaagtggacaatcaaatgataaactttaagaccttgtataccatattgaaaggaagaggctgacaataaggtttgacagaggggaacagaagaaaataatatgatttattagcacaacgtggtactatttgccatttaaaactagaacaggtatataagctaatattgatacaatgatgattaactatgaattcttaagacttgcatttaaatgtgacattcttaaaaaaagaagagaaagaattttaagagtagcagtatatatgtctgtgctccctaaaagttgtacttcatttcttttccatacactgtgtgctatttgtgttaacatggaagaggattcattgtttttatttttatttttttaattttttcttttttattaagctagcatctgccccagttggtgttcaaatagcacttgactctgcctgtgatatctgtatcttttctctaatcagagatacagaggttgagtataaaataaacctgctcagataggacaattaagtgcactgtacaattttcccagtttacaggtctatacttaagggaaaagttgcaagaatgctgaaaaaaaattgaacacaatctcattgaggagcattttttaaaaactaaaaaaaaaaaaactttgccagccatttacttgactattgagcttacttacttggacgcaacattgcaagcgctgtgaatggaaacagaatacacttaacatagaaatgaatgattgctttcgcttctacagtgcaaggatttttttgtacaaaacttttttaaatataaatgttaagaaaaattttttttaaaaaacacttcattatgtttaggggggaactgcattttagggttccattgtcttggtggtgttacaagacttgttatccatttaaaaatggtagtggaaattctatgccttggatacacaccgctcttcaggttgtaaaaaaaaaaaacatacattggggaaaggtttaagattatatagtacttaaatataggaaaatgcacactcatgttgattcctatgctaaaatacatttatggtcttttttctgtatttctagaatggtatttgaattaaatgttcatctagtgttaggcactatagtatttatattgaagcttgtatttttaactgttgcttgttctcttaaaaggtatcaatgtaccttttttggtagtggaaaaaaaaaagacaggctgccacagtatatttttttaatttggcaggataatatagtgcaaattatttgtatgcttcaaaaaaaaaaaaaagagagaaacaaaaaagtgtgacattacagatgagaagccatataatggcggtttgggggagcctgctagaatgtcacatggatggctgtcataggggttgtacatatccttttttgttcctttttcctgctgccatactgtatgcagtactgcaagctaataacgttggtttgttatgtagtgtgctttttgtccctttccttctatcaccctacattccagcatcttaccttcatatgcagtaaaagaaagaaagaaaaaaaaaggaaaaaaaaaaaaaaaccaatgttttgcagtttttttcattgccaaaaactaaatggtgctttatatttagattggaaagaatttcatatgcaaagcatattaaagagaaagcccgctttagtcaatacttttttgtaaatggcaatgcagaatattttgttattggccttttctattcctgtaatgaaagctgtttgtcgtaacttgaaattttatcttttactatgggagtcactatttattattgcttatgtgccctgttcaaaacagaggcacttaatttgatcttttatttttctttgtttttatttttttttttatttagatgaccaaaggtcattacaacctggctttttattgtatttgtttctggtctttgttaagttctattggaaaaaccactgtctgtgtttttttggcagttgtctgcattaacctgttcatacacccattttgtccctttattgaaaaaataaaaaaaattaaag

SEQ ID NO: 3203 - DNA, 3959 bp, Homo sapiens
  source 1..3959: mol_type = unassigned DNA
tttttttttttttttttgcttaaaaaaaagccatgacggctctcccacaattcatcttccctgcgccatctttgtattatttctaatttattttggatgtcaaaaggcactgatgaagatattttctctggagtctccttctttctaacccggctctcccgatgtgaaccgagccgtcgtccgcccgccgccgccgccgccgccgccgccgcccgccccgcagcccaccatgtctcgccgcaagcaaggcaaaccccagcacttaagcaaacgggaattctcgcccgagcctcttgaagccattcttacagatgatgaaccagaccacggcccgttgggagctccagaaggggatcatgacctcctcacctgtgggcagtgccagatgaacttcccattgggggacattcttatttttatcgagcacaaacggaaacaatgcaatggcagcctctgcttagaaaaagctgtggataagccaccttccccttcaccaatcgagatgaaaaaagcatccaatcccgtggaggttggcatccaggtcacgccagaggatgacgattgtttatcaacgtcatctagaggaatttgccccaaacaggaacacatagcagataaacttctgcactggaggggcctctcctcccctcgttctgcacatggagctctaatccccacgcctgggatgagtgcagaatatgccccgcagggtatttgtaaagatgagcccagcagctacacatgtacaacttgcaaacagccattcaccagtgcatggtttctcttgcaacacgcacagaacactcatggattaagaatctacttagaaagcgaacacggaagtcccctgaccccgcgggttggtatcccttcaggactaggtgcagaatgtccttcccagccacctctccatgggattcatattgcagacaataacccctttaacctgctaagaataccaggatcagtatcgagagaggcttccggcctggcagaagggcgctttccacccactccccccctgtttagtccaccaccgagacatcacttggacccccaccgcatagagcgcctgggggcggaagagatggccctggccacccatcacccgagtgcctttgacagggtgctgcggttgaatccaatggctatggagcctcccgccatggatttctctaggagacttagagagctggcagggaacacgtctagcccaccgctgtccccaggccggcccagccctatgcaaaggttactgcaaccattccagccaggtagcaagccgcccttcctggcgacgccccccctccctcctctgcaatccgcccctcctccctcccagcccccggtcaagtccaagtcatgcgagttctgcggcaagacgttcaaatttcagagcaacctggtggtgcaccggcgcagccacacgggcgagaagccctacaagtgcaacctgtgcgaccacgcgtgcacccaggccagcaagctgaagcgccacatgaagacgcacatgcacaaatcgtcccccatgacggtcaagtccgacgacggtctctccaccgccagctccccggaacccggcaccagcgacttggtgggcagcgccagcagcgcgctcaagtccgtggtggccaagttcaagagcgagaacgaccccaacctgatcccggagaacggggacgaggaggaagaggaggacgacgaggaagaggaagaagaggaggaagaggaggaggaggagctgacggagagcgagagggtggactacggcttcgggctgagcctggaggcggcgcgccaccacgagaacagctcgcggggcgcggtcgtgggcgtgggcgacgagagccgcgccctgcccgacgtcatgcagggcatggtgctcagctccatgcagcacttcagcgaggccttccaccaggtcctgggcgagaagcataagcgcggccacctggccgaggccgagggccacagggacacttgcgacgaagactcggtggccggcgagtcggaccgcatagacgatggcactgttaatggccgcggctgctccccgggcgagtcggcctcggggggcctgtccaaaaagctgctgctgggcagccccagctcgctgagccccttctctaagcgcatcaagctcgagaaggagttcgacctgcccccggccgcgatgcccaacacggagaacgtgtactcgcagtggctcgccggctacgcggcctccaggcagctcaaagatcccttccttagcttcggagactccagacaatcgccttttgcctcctcgtcggagcactcctcggagaacgggagtttgcgcttctccacaccgcccggggagctggacggagggatctcggggcgcagcggcacgggaagtggagggagcacgccccatattagtggtccgggcccgggcaggcccagctcaaaagagggcagacgcagcgacacttgttcttcacacacccccattcggcgtagtacccagagagctcaagatgtgtggcagttttcggatggaagctcgagagcccttaagttctgagaaaatttgaagcccccaggggtggggtggacgcgtgccgcccagtcgacgtcagcgtggtctgtcatcctgctagtttgtgatgttttctgacagtagcctccaagaagccgttgtgcgaagacagagtcctgcagagtccttccagcctaggcctgcagcgccattttatttatattttttaataaaaagtaaaaacaaaaaaacagacccacattggaacagtgaatcagtcccatagagagggcccgtggaccatcgctgtcatgagtgatgccctggcccttctgaaaccagccaacctaattacctgtattgtggaaatgcgcatgagtccccaaccccttgtttctatacattctatgttgtcttttaaaaagtgtgcttaacattgacacaataaatgttggagctttaggtggtgtttgcttgttctttaatttttaatgcttataagacaatgaggctgcttatgattttgtacttctgtacctgtttcctacagacacccatcgggtgggtaggaggaacagatttgagaaatgggcaggagatgtaggaggggaactaggttaccgcttatcagatggcataaattttcaaggagaatcaaaatgcaaaacttgggaataaatcatagcaatatcataattaatgtagtagtaatattgctgtttattaatgctgaagtgtggttttcctaactgtctgacttataatttgcataccattaaataatgcataatatggcacgccgaatcctgtttttcaaatatatgcttttggtggctaccatgcaggatttgaatttgtcttttaatttagcttaggaaagaacatcactgggcgagcggtaaatcctaaagaaggtgataaatgtcagtagtttcttattaaatattctaattttaggttcccaaaccttcaggaaatatatcttaatgcagacaaacaaacataaaacttctttagtacttacatcaggaaatttggggcagattttagaggggggaaattataggaggaaagaagttcacatcagaacagacaatcacagcaatgctctattccttagaaattagtgccacaaataagttacatctacaaacaggtggtaaaaattctttctggcccagttaatttgcacagaacttttctcagtttggtattttttactgcttggagatccagaagagaattagaaacaacatagcaaattaaaataggtttgtcaataatagagctcagacacctgtgtgctgtagattcacatacaggccgtgaacctaagtggggaaaatcctacctatccaccttctggctagattacctagcttagtgaaaagatagccaaataattggcatgtgaattatttcctgcttattcataataaataatgactgtcta

SEQ ID NO: 3204 - DNA, 2697 bp, Homo sapiens
  source 1..2697: mol_type = unassigned DNA
tctttgtattatttctaatttattttggatgtcaaaaggcactgatgaagatattttctctggagtctccttctttctaacccggctctcccgatgtgaaccgagccgtcgtccgcccgccgccgccgccgccgccgccgccgcccgccccgcagcccaccatgtctcgccgcaagcaaggcaaaccccagcacttaagcaaacgggaattctcgcccgagcctcttgaagccattcttacagatgatgaaccagaccacggcccgttgggagctccagaaggggatcatgacctcctcacctgtgggcagtgccagatgaacttcccattgggggacattcttatttttatcgagcacaaacggaaacaatgcaatggcagcctctgcttagaaaaagctgtggataagccaccttccccttcaccaatcgagatgaaaaaagcatccaatcccgtggaggttggcatccaggtcacgccagaggatgacgattgtttatcaacgtcatctagaggaatttgccccaaacaggaacacatagcaggtaaagatgagcccagcagctacacatgtacaacttgcaaacagccattcaccagtgcatggtttctcttgcaacacgcacagaacactcatggattaagaatctacttagaaagcgaacacggaagtcccctgaccccgcgggttggtatcccttcaggactaggtgcagaatgtccttcccagccacctctccatgggattcatattgcagacaataacccctttaacctgctaagaataccaggatcagtatcgagagaggcttccggcctggcagaagggcgctttccacccactccccccctgtttagtccaccaccgagacatcacttggacccccaccgcatagagcgcctgggggcggaagagatggccctggccacccatcacccgagtgcctttgacagggtgctgcggttgaatccaatggctatggagcctcccgccatggatttctctaggagacttagagagctggcagggaacacgtctagcccaccgctgtccccaggccggcccagccctatgcaaaggttactgcaaccattccagccaggtagcaagccgcccttcctggcgacgccccccctccctcctctgcaatccgcccctcctccctcccagcccccggtcaagtccaagtcatgcgagttctgcggcaagacgttcaaatttcagagcaacctggtggtgcaccggcgcagccacacgggcgagaagccctacaagtgcaacctgtgcgaccacgcgtgcacccaggccagcaagctgaagcgccacatgaagacgcacatgcacaaatcgtcccccatgacggtcaagtccgacgacggtctctccaccgccagctccccggaacccggcaccagcgacttggtgggcagcgccagcagcgcgctcaagtccgtggtggccaagttcaagagcgagaacgaccccaacctgatcccggagaacggggacgaggaggaagaggaggacgacgaggaagaggaagaagaggaggaagaggaggaggaggagctgacggagagcgagagggtggactacggcttcgggctgagcctggaggcggcgcgccaccacgagaacagctcgcggggcgcggtcgtgggcgtgggcgacgagagccgcgccctgcccgacgtcatgcagggcatggtgctcagctccatgcagcacttcagcgaggccttccaccaggtcctgggcgagaagcataagcgcggccacctggccgaggccgagggccacagggacacttgcgacgaagactcggtggccggcgagtcggaccgcatagacgatggcactgttaatggccgcggctgctccccgggcgagtcggcctcggggggcctgtccaaaaagctgctgctgggcagccccagctcgctgagccccttctctaagcgcatcaagctcgagaaggagttcgacctgcccccggccgcgatgcccaacacggagaacgtgtactcgcagtggctcgccggctacgcggcctccaggcagctcaaagatcccttccttagcttcggagactccagacaatcgccttttgcctcctcgtcggagcactcctcggagaacgggagtttgcgcttctccacaccgcccggggagctggacggagggatctcggggcgcagcggcacgggaagtggagggagcacgccccatattagtggtccgggcccgggcaggcccagctcaaaagagggcagacgcagcgacacttgtgagtactgtgggaaagtcttcaagaactgtagcaatctcactgtccacaggagaagccacacgggcgaaaggccttataaatgcgagctgtgcaactatgcctgtgcccagagtagcaagctcaccaggcacatgaaaacgcatggccaggtggggaaggacgtttacaaatgtgaaatttgtaagatgccttttagcgtgtacagtaccctggagaaacacatgaaaaaatggcacagtgatcgagtgttgaataatgatataaaaactgaatagaggtatattaatacccctccctcactcccacctgacaccccctttttcaccactccccttccccatcgccctccagccccactccctgtaggatttttttctagtcccatgtgatttaaacaaacaaaca

SEQ ID NO: 3205 - DNA, 2427 bp, Homo sapiens
  source 1..2427: mol_type = unassigned DNA
tttttttcatctctctctctctctctccctctatctctcttctctctctctccctctttttttttttttttttttttttttttttgcttaaaaaaaagccatgacggctctcccacaattcatcttccctgcgccatctttgtattatttctaatttattttggatgtcaaaaggcactgatgaagatattttctctggagtctccttctttctaacccggctctcccgatgtgaaccgagccgtcgtccgcccgccgccgccgccgccgccgccgccgcccgccccgcagcccaccatgtctcgccgcaagcaaggcaaaccccagcacttaagcaaacgggaattctcgcccgagcctcttgaagccattcttacagatgatgaaccagaccacggcccgttgggagctccagaaggggatcatgacctcctcacctgtgggcagtgccagatgaacttcccattgggggacattcttatttttatcgagcacaaacggaaacaatgcaatggcagcctctgcttagaaaaagctgtggataagccaccttccccttcaccaatcgagatgaaaaaagcatccaatcccgtggaggttggcatccaggtcacgccagaggatgacgattgtttatcaacgtcatctagaggaatttgccccaaacaggaacacatagcagataaacttctgcactggaggggcctctcctcccctcgttctgcacatggagctctaatccccacgcctgggatgagtgcagaatatgccccgcagggtatttgtaaagatgagcccagcagctacacatgtacaacttgcaaacagccattcaccagtgcatggtttctcttgcaacacgcacagaacactcatggattaagaatctacttagaaagcgaacacggaagtcccctgaccccgcgggttcttcacacacccccattcggcgtagtacccagagagctcaagatgtgtggcagttttcggatggaagctcgagagcccttaagttctgagaaaatttgaagcccccaggggtggggtggacgcgtgccgcccagtcgacgtcagcgtggtctgtcatcctgctagtttgtgatgttttctgacagtagcctccaagaagccgttgtgcgaagacagagtcctgcagagtccttccagcctaggcctgcagcgccattttatttatattttttaataaaaagtaaaaacaaaaaaacagacccacattggaacagtgaatcagtcccatagagagggcccgtggaccatcgctgtcatgagtgatgccctggcccttctgaaaccagccaacctaattacctgtattgtggaaatgcgcatgagtccccaaccccttgtttctatacattctatgttgtcttttaaaaagtgtgcttaacattgacacaataaatgttggagctttaggtggtgtttgcttgttctttaatttttaatgcttataagacaatgaggctgcttatgattttgtacttctgtacctgtttcctacagacacccatcgggtgggtaggaggaacagatttgagaaatgggcaggagatgtaggaggggaactaggttaccgcttatcagatggcataaattttcaaggagaatcaaaatgcaaaacttgggaataaatcatagcaatatcataattaatgtagtagtaatattgctgtttattaatgctgaagtgtggttttcctaactgtctgacttataatttgcataccattaaataatgcataatatggcacgccgaatcctgtttttcaaatatatgcttttggtggctaccatgcaggatttgaatttgtcttttaatttagcttaggaaagaacatcactgggcgagcggtaaatcctaaagaaggtgataaatgtcagtagtttcttattaaatattctaattttaggttcccaaaccttcaggaaatatatcttaatgcagacaaacaaacataaaacttctttagtacttacatcaggaaatttggggcagattttagaggggggaaattataggaggaaagaagttcacatcagaacagacaatcacagcaatgctctattccttagaaattagtgccacaaataagttacatctacaaacaggtggtaaaaattctttctggcccagttaatttgcacagaacttttctcagtttggtattttttactgcttggagatccagaagagaattagaaacaacatagcaaattaaaataggtttgtcaataatagagctcagacacctgtgtgctgtagattcacatacaggccgtgaacctaagtggggaaaatcctacctatccaccttctggctagattacctagcttagtgaaaagatagccaaataattggcatgtgaattatttcctgcttattcataataaataatgactgtcta

SEQ ID NO: 3206 - DNA, 3805 bp, Homo sapiens
  source 1..3805: mol_type = unassigned DNA
atgtcaaaaggcactgatgaagatattttctctggagtctccttctttctaacccggctctcccgatgtgaaccgagccgtcgtccgccgcccgccccgcagcccaccatgtctcgccgcaagcaaggcaaaccccagcacttaagcaaacgggaattctcgcccgagcctcttgaagccattcttacagatgatgaaccagaccacggcccgttgggagctccagaaggggatcatgacctcctcacctgtgggcagtgccagatgaacttcccattgggggacattcttatttttatcgagcacaaacggaaacaatgcaatggcagcctctgcttagaaaaagctgtggataagccaccttccccttcaccaatcgagatgaaaaaagcatccaatcccgtggaggttggcatccaggtcacgccagaggatgacgattgtttatcaacgtcatctagaggaatttgccccaaacaggaacacatagcagataaacttctgcactggaggggcctctcctcccctcgttctgcacatggagctctaatccccacgcctgggatgagtgcagaatatgccccgcagggtatttgtaaagatgagcccagcagctacacatgtacaacttgcaaacagccattcaccagtgcatggtttctcttgcaacacgcacagaacactcatggattaagaatctacttagaaagcgaacacggaagtcccctgaccccgcgggttggtatcccttcaggactaggtgcagaatgtccttcccagccacctctccatgggattcatattgcagacaataacccctttaacctgctaagaataccaggatcagtatcgagagaggcttccggcctggcagaagggcgctttccacccactccccccctgtttagtccaccaccgagacatcacttggacccccaccgcatagagcgcctgggggcggaagagatggccctggccacccatcacccgagtgcctttgacagggtgctgcggttgaatccaatggctatggagcctcccgccatggatttctctaggagacttagagagctggcagggaacacgtctagcccaccgctgtccccaggccggcccagccctatgcaaaggttactgcaaccattccagccaggtagcaagccgcccttcctggcgacgccccccctccctcctctgcaatccgcccctcctccctcccagcccccggtcaagtccaagtcatgcgagttctgcggcaagacgttcaaatttcagagcaacctggtggtgcaccggcgcagccacacgggcgagaagccctacaagtgcaacctgtgcgaccacgcgtgcacccaggccagcaagctgaagcgccacatgaagacgcacatgcacaaatcgtcccccatgacggtcaagtccgacgacggtctctccaccgccagctccccggaacccggcaccagcgacttggtgggcagcgccagcagcgcgctcaagtccgtggtggccaagttcaagagcgagaacgaccccaacctgatcccggagaacggggacgaggaggaagaggaggacgacgaggaagaggaagaagaggaggaagaggaggaggaggagctgacggagagcgagagggtggactacggcttcgggctgagcctggaggcggtcgtgggcgtgggcgacgagagccgcgccctgcccgacgtcatgcagggcatggtgctcagctccatgcagcacttcagcgaggccttccaccaggtcctgggcgagaagcataagcgcggccacctggccgaggccgagggccacagggacacttgcgacgaagactcggtggccggcgagtcggaccgcatagacgatggcactgttaatggccgcggctgctccccgggcgagtcggcctcggggggcctgtccaaaaagctgctgctgggcagccccagctcgctgagccccttctctaagcgcatcaagctcgagaaggagttcgacctgcccccggccgcgatgcccaacacggagaacgtgtactcgcagtggctcgccggctacgcggcctccaggcagctcaaagatcccttccttagcttcggagactccagacaatcgccttttgcctcctcgtcggagcactcctcggagaacgggagtttgcgcttctccacaccgcccggggagctggacggagggatctcggggcgcagcggcacgggaagtggagggagcacgccccatattagtggtccgggcccgggcaggcccagctcaaaagagggcagacgcagcgacacttgttcttcacacacccccattcggcgtagtacccagagagctcaagatgtgtggcagttttcggatggaagctcgagagcccttaagttctgagaaaatttgaagcccccaggggtggggtggacgcgtgccgcccagtcgacgtcagcgtggtctgtcatcctgctagtttgtgatgttttctgacagtagcctccaagaagccgttgtgcgaagacagagtcctgcagagtccttccagcctaggcctgcagcgccattttatttatattttttaataaaaagtaaaaacaaaaaaacagacccacattggaacagtgaatcagtcccatagagagggcccgtggaccatcgctgtcatgagtgatgccctggcccttctgaaaccagccaacctaattacctgtattgtggaaatgcgcatgagtccccaaccccttgtttctatacattctatgttgtcttttaaaaagtgtgcttaacattgacacaataaatgttggagctttaggtggtgtttgcttgttctttaatttttaatgcttataagacaatgaggctgcttatgattttgtacttctgtacctgtttcctacagacacccatcgggtgggtaggaggaacagatttgagaaatgggcaggagatgtaggaggggaactaggttaccgcttatcagatggcataaattttcaaggagaatcaaaatgcaaaacttgggaataaatcatagcaatatcataattaatgtagtagtaatattgctgtttattaatgctgaagtgtggttttcctaactgtctgacttataatttgcataccattaaataatgcataatatggcacgccgaatcctgtttttcaaatatatgcttttggtggctaccatgcaggatttgaatttgtcttttaatttagcttaggaaagaacatcactgggcgagcggtaaatcctaaagaaggtgataaatgtcagtagtttcttattaaatattctaattttaggttcccaaaccttcaggaaatatatcttaatgcagacaaacaaacataaaacttctttagtacttacatcaggaaatttggggcagattttagaggggggaaattataggaggaaagaagttcacatcagaacagacaatcacagcaatgctctattccttagaaattagtgccacaaataagttacatctacaaacaggtggtaaaaattctttctggcccagttaatttgcacagaacttttctcagtttggtattttttactgcttggagatccagaagagaattagaaacaacatagcaaattaaaataggtttgtcaataatagagctcagacacctgtgtgctgtagattcacatacaggccgtgaacctaagtggggaaaatcctacctatccaccttctggctagattacctagcttagtgaaaagatagccaaataattggcatgtgaattatttcctgcttattcataataaataatgactgtcta

SEQ ID NO: 3207 - DNA, 2291 bp, Homo sapiens
  source 1..2291: mol_type = unassigned DNA
gcttaaaaaaaagccatgacggctctcccacaattcatcttccctgcgccatctttgtattatttctaatttattttggatgtcaaaaggcactgatgaagatattttctctggagtctccttctttctaacccggctctcccgatgtgaaccgagccgtcgtccgcccgccgccgccgccgccgccgccgccgcccgccccgcagcccaccatgtctcgccgcaagcaaggcaaaccccagcacttaagcaaacgggaattctcgcccgagcctcttgaagccattcttacagatgatgaaccagaccacggcccgttgggagctccagaaggggatcatgacctcctcacctgtgggcagtgccagatgaacttcccattgggggacattcttatttttatcgagcacaaacggaaacaatgcaatggcagcctctgcttagaaaaagctgtggataagccaccttccccttcaccaatcgagatgaaaaaagcatccaatcccgtggaggttggcatccaggtcacgccagaggatgacgattgtttatcaacgtcatctagaggaatttgccccaaacaggaacacatagcaggtaacccaagggggagctcagagaagagtccaggctgccagtgcaaaggtccagccctgtcgccaaggagaccctcagggaaatgcacaggcctccagctattcccacggcccctgtagctgagcgccagcttcttcctgggccaagctgaggctgtttcctgccgtgtccattctcctagcaacgcttctctttggccagtttgccatagtacctgagataaacttctgcactggaggggcctctcctcccctcgttctgcacatggagctctaatccccacgcctgggatgagtgcagaatatgccccgcagggtatttgtaaagatgagcccagcagctacacatgtacaacttgcaaacagccattcaccagtgcatggtttctcttgcaacacgcacagaacactcatggattaagaatctacttagaaagcgaacacggaagtcccctgaccccgcggagcaacctggtggtgcaccggcgcagccacacgggcgagaagccctacaagtgcaacctgtgcgaccacgcgtgcacccaggccagcaagctgaagcgccacatgaagacgcacatgcacaaatcgtcccccatgacggtcaagtccgacgacggtctctccaccgccagctccccggaacccggcaccagcgacttggtgggcagcgccagcagcgcgctcaagtccgtggtggccaagttcaagagcgagaacgaccccaacctgatcccggagaacggggacgaggaggaagaggaggacgacgaggaagaggaagaagaggaggaagaggaggaggaggagctgacggagagcgagagggtggactacggcttcgggctgagcctggaggcggcgcgccaccacgagaacagctcgcggggcgcggtcgtgggcgtgggcgacgagagccgcgccctgcccgacgtcatgcagggcatggtgctcagctccatgcagcacttcagcgaggccttccaccaggtcctgggcgagaagcataagcgcggccacctggccgaggccgagggccacagggacacttgcgacgaagactcggtggccggcgagtcggaccgcatagacgatggcactgttaatggccgcggctgctccccgggcgagtcggcctcggggggcctgtccaaaaagctgctgctgggcagccccagctcgctgagccccttctctaagcgcatcaagctcgagaaggagttcgacctgcccccggccgcgatgcccaacacggagaacgtgtactcgcagtggctcgccggctacgcggcctccaggcagctcaaagatcccttccttagcttcggagactccagacaatcgccttttgcctcctcgtcggagcactcctcggagaacgggagtttgcgcttctccacaccgcccggggagctggacggagggatctcggggcgcagcggcacgggaagtggagggagcacgccccatattagtggtccgggcccgggcaggcccagctcaaaagagggcagacgcagcgacacttgttcttcacacacccccattcggcgtagtacccagagagctcaagatgtgtggcagttttcggatggaagctcgagagcccttaagttctgagaaaatttgaagcccccaggggtggggtggacgcgtgccgcccagtcgacgtcagcgtggtctgtcatcctgcta

SEQ ID NO: 3208 - DNA, 2660 bp, Homo sapiens
  source 1..2660: mol_type = unassigned DNA
ggatgtcaaaaggcactgatgaagatattttctctggagtctccttctttctaacccggctctcccgatgtgaaccgagccgtcgtccgcccgccgccgccgccgccgccgccgccgcccgccccgcagcccaccatgtctcgccgcaagcaaggcaaaccccagcacttaagcaaacgggaattctcgcccgagcctcttgaagccattcttacagatgatgaaccagaccacggcccgttgggagctccagaaggggatcatgacctcctcacctgtgggcagtgccagatgaacttcccattgggggacattcttatttttatcgagcacaaacggaaacaatgcaatggcagcctctgcttagaaaaagctgtggataagccaccttccccttcaccaatcgagatgaaaaaagcatccaatcccgtggaggttggcatccaggtcacgccagaggatgacgattgtttatcaacgtcatctagaggaatttgccccaaacaggaacacatagcaggtaaagatgagcccagcagctacacatgtacaacttgcaaacagccattcaccagtgcatggtttctcttgcaacacgcacagaacactcatggattaagaatctacttagaaagcgaacacggaagtcccctgaccccgcgggttggtatcccttcaggactaggtgcagaatgtccttcccagccacctctccatgggattcatattgcagacaataacccctttaacctgctaagaataccaggatcagtatcgagagaggcttccggcctggcagaagggcgctttccacccactccccccctgtttagtccaccaccgagacatcacttggacccccaccgcatagagcgcctgggggcggaagagatggccctggccacccatcacccgagtgcctttgacagggtgctgcggttgaatccaatggctatggagcctcccgccatggatttctctaggagacttagagagctggcagggaacacgtctagcccaccgctgtccccaggccggcccagccctatgcaaaggttactgcaaccattccagccaggtagcaagccgcccttcctggcgacgccccccctccctcctctgcaatccgcccctcctccctcccagcccccggtcaagtccaagtcatgcgagttctgcggcaagacgttcaaatttcagagcaacctggtggtgcaccggcgcagccacacgggcgagaagccctacaagtgcaacctgtgcgaccacgcgtgcacccaggccagcaagctgaagcgccacatgaagacgcacatgcacaaatcgtcccccatgacggtcaagtccgacgacggtctctccaccgccagctccccggaacccggcaccagcgacttggtgggcagcgccagcagcgcgctcaagtccgtggtggccaagttcaagagcgagaacgaccccaacctgatcccggagaacggggacgaggaggaagaggaggacgacgaggaagaggaagaagaggaggaagaggaggaggaggagctgacggagagcgagagggtggactacggcttcgggctgagcctggaggcggcgcgccaccacgagaacagctcgcggggcgcggtcgtgggcgtgggcgacgagagccgcgccctgcccgacgtcatgcagggcatggtgctcagctccatgcagcacttcagcgaggccttccaccaggtcctgggcgagaagcataagcgcggccacctggccgaggccgagggccacagggacacttgcgacgaagactcggtggccggcgagtcggaccgcatagacgatggcactgttaatggccgcggctgctccccgggcgagtcggcctcggggggcctgtccaaaaagctgctgctgggcagccccagctcgctgagccccttctctaagcgcatcaagctcgagaaggagttcgacctgcccccggccgcgatgcccaacacggagaacgtgtactcgcagtggctcgccggctacgcggcctccaggcagctcaaagatcccttccttagcttcggagactccagacaatcgccttttgcctcctcgtcggagcactcctcggagaacgggagtttgcgcttctccacaccgcccggggagctggacggagggatctcggggcgcagcggcacgggaagtggagggagcacgccccatattagtggtccgggcccgggcaggcccagctcaaaagagggcagacgcagcgacacttgtgagtactgtgggaaagtcttcaagaactgtagcaatctcactgtccacaggagaagccacacgggcgaaaggccttataaatgcgagctgtgcaactatgcctgtgcccagagtagcaagctcaccaggcacatgaaaacgcatggccaggttcttcacacacccccattcggcgtagtacccagagagctcaagatgtgtggcagttttcggatggaagctcgagagcccttaagttctgagaaaatttgaagcccccaggggtggggtggacgcgtgccgcccagtcgacgtcagcgtggtctgtcatcctgctagtttgtgatgttttctgacagtagcctccaagaagccgttgtgcgaagacagagtcctgcagagtccttccagcctag

SEQ ID NO: 3209 - DNA, 7603 bp, Homo sapiens
  source 1..7603: mol_type = unassigned DNA
ttttcttgcttttcttcccttttttttctttttgcaaacaaaacaaaaaacagcatagaagaaagagcaaaataaagaagaagaagaggaggaagagagggaaagagaggaagggaaaaaaaacaccaacccgggcagaggaggaggtgcggcggcggcggcggcggcggcagcggcggcagcggcgcggcggcggctcggaccccctcccccggctccccccatcagtgcagctctccgggcgatgccagaatagatgccggggcaatgtcccgccgcaaacagggcaacccgcagcacttgtcccagagggagctcatcaccccagaggctgaccatgtggaggccgccatcctcgaagaagacgagggtctggagatagaggagccaagtggcctggggctgatggtgggtggccccgaccctgacctgctcacctgtggccagtgtcaaatgaacttccccttgggggacatcctggtttttatagagcacaaaaggaagcagtgtggcggcagcttgggtgcctgctatgacaaggccctggacaaggacagcccgccaccctcctcacgctccgagctcaggaaagtgtccgagccggtggagatcgggatccaagtcacccccgacgaagatgaccacctgctctcacccacgaaaggcatctgtcccaagcaggagaacattgcaggtaaagatgagccttccagctacatttgcacaacatgcaagcagcccttcaacagcgcgtggttcctgctgcagcacgcgcagaacacgcacggcttccgcatctacctggagcccgggccggccagcagctcgctcacgccgcggctcaccatcccgccgccgctcgggccggaggccgtggcgcagtccccgctcatgaatttcctgggcgacagcaaccccttcaacctgctgcgcatgacgggccccatcctgcgggaccacccgggcttcggcgagggccgcctgccgggcacgccgcctctcttcagtcccccgccgcgccaccacctggacccgcaccgcctcagtgccgaggagatggggctcgtcgcccagcaccccagtgccttcgaccgagtcatgcgcctgaaccccatggccatcgactcgcccgccatggacttctcgcggcggctccgcgagctggcgggcaacagctccacgccgccgcccgtgtccccgggccgcggcaaccctatgcaccggctcctgaaccccttccagcccagccccaagtccccgttcctgagcacgccgccgctgccgcccatgccccctggcggcacgccgcccccgcagccgccagccaagagcaagtcgtgcgagttctgcggcaagaccttcaagttccagagcaatctcatcgtgcaccggcgcagtcacacgggcgagaagccctacaagtgccagctgtgcgaccacgcgtgctcgcaggccagcaagctcaagcgccacatgaagacgcacatgcacaaggccggctcgctggccggccgctccgacgacgggctctcggccgccagctcccccgagcccggcaccagcgagctggcgggcgagggcctcaaggcggccgacggtgacttccgccaccacgagagcgacccgtcgctgggccacgagccggaggaggaggacgaggaggaggaggaggaggaggaggagctgctactggagaacgagagccggcccgagtcgagcttcagcatggactcggagctgagccgcaaccgcgagaacggcggtggtggggtgcccggggtcccgggcgcggggggcggcgcggccaaggcgctggctgacgagaaggcgctggtgctgggcaaggtcatggagaacgtgggcctaggcgcactgccgcagtacggcgagctcctggccgacaagcagaagcgcggcgccttcctgaagcgtgcggcgggcggcggggacgcgggcgacgacgacgacgcgggcggctgcggggacgcgggcgcgggcggcgcggtcaacgggcgcgggggcggcttcgcgccaggcaccgagcccttccccgggctcttcccgcgcaagcccgcgccgctgcccagccccgggctcaacagcgccgccaagcgcatcaaggtggagaaggacctggagctgccgcccgccgcgctcatcccgtccgagaacgtgtactcgcagtggctggtgggctacgcggcgtcgcggcacttcatgaaggaccccttcctgggcttcacggacgcacgacagtcgcccttcgccacgtcgtccgagcactcgtccgagaacggcagcctgcgcttctccacgccgcccggggacctgctggacggcggcctctcgggccgcagcggcacggccagcggaggcagcaccccgcacctgggcggcccgggccccgggcggcccagctccaaggagggccgccgcagcgacacgtgcgagtactgcggcaaggtgttcaagaactgcagcaacttgacggtgcaccggcggagccacaccggcgagcggccttacaagtgcgagctgtgcaactacgcgtgcgcgcagagcagcaagctcacgcgccacatgaagacgcacgggcagatcggcaaggaggtgtaccgctgcgacatctgccagatgcccttcagcgtctacagcaccctggagaaacacatgaaaaagtggcacggcgagcacttgctgactaacgacgtcaaaatcgagcaggccgagaggagctaagcgcgcgggccccggcgccccgcacctgtacagtggaaccgttgccaaccgagagaatgctgacctgacttgcctccgtgtcaccgccaccccgcaccccgcgtgtccccggggcccaggggaggcggcactccaacctaacctgtgtctgcgaagtcctatggaaacccgagggttgattaaggcagtacaaattgtggagccttttaactgtgcaataatttctgtatttattgggttttgtaatttttttggcatgtgcaggtactttttattattattttttctgtttgaattcctttaagagattttgttgggtatccatcccttctttgttttttttttaacccggtagtagcctgagcaatgactcgcaagcaatgttagaggggaagcatatcttttaaattataatttggggggaggggtggtgctgcttttttgaaatttaagctaagcatgtgtaatttcttgtgaagaagccaacactcaaatgacttttaaagttgtttactttttcattccttccttttttttgtcctgaaataaaaagtggcatgcagttttttttttaattattttttaattttttttttggtttttgtttttggggtggggggtgtggatgtacagcggataacaatctttcaagtcgtagcactttgtttcagaactggaatggagatgtagcactcatgtcgtcccgagtcaagcggccttttctgtgttgatttcggctttcatattacataagggaaaccttgagtggtggtgctgggggaggcaccccacagactcagcgccgccagagatagggtttttggagggctcctctgggaaatggcccgacagcattctgaggttgtgcatgaccagcagatactatcctgttggtgtgccctggggtgccatggctgctattcgctgtagattaggctacataaaatgggctgagggtacctttttggggagatggggtggcctgcagtgacacagaaaggaagaaactagcggtgttcttttaggcgttttctggcttgacggcttctctctttttttaaatcacccccaccacataaatctcaaatcctatgttgctacaaggggtcatccatcatttcccaagcagacgaatgccctaattaattgaagttagtgttctctcatttaatgcacactgatgatattgtagggatgggtggggtggggatcttgcaaatttctattctcttttactgaaaaagcaggggatgagttccatcagaaggtgcccagcgctacttcccaggtttttattttttttttcctatctcattaggttggaaggtactaaatattgaactgttaagattagacatttgaattctgttgacccgcactttaaagcttttgtttgcatttaaattaaatggcttctaaacaagaaattgcagcatattcttctctttggcccagaggtgggttaaactgtaagggacagctgagattgagtgtcagtattgctaagcgtggcattcacaatactggcactataaagaacaaaataaaataataatttataggacagtttttctactgccattcaatttgatgtgagtgccttgaaaactgatcttcctatttgagtctcttgagacaaatgcaaaactttttttttgaaatgaaaagactttttaaaaaagtaaaacaagaaaagtacattctttagaaactaacaaagccacatttactttaagtaaaaaaaaaaaaaattctggttgaagatagaggatatgaaatgccataagacccaatcaaatgaagaaataaacccagcacaaccttggacatccattagctgaattatcctcagccccttttgtttttgggacaacgctgcttagatatggagtggaggtgatttactgctgaattaaaactcaagtgacacaagttacaagttgatatcgttgaatgaaaagcaaaacaaaaacaattcaggaacaacggctaattttttctaaagttaaatttagtgcactctgtcttaaaaatacgtttacagtattgggtacatacaagggtaaaaaaaaaattgtgtgtatgtgtgttggagcgatctttttttttcaaagtttgcttaataggttatacaaaaatgccacagtggccgcgtgtatattgttttcttttggtgacggggttttagtatatattatatatattaaaatttcttgattactgtaaaagtggaccagtatttgtaataatcgagaatgcctgggcattttacaaaacaagaaaaaaaatacccttttcttttccttgaaaatgttgcagtaaaatttaaatggtgggtctataaatttgttcttgttacagtaactgtaaagtcggagttttagtaaatttttttctgccttgggtgttgaatttttatttcaaaaaaaatgtatagaaacttgtatttggggattcaaaggggattgctacaccatgtagaaaaagtatgtagaaaaaaagtgcttaatattgttattgctttgcagaaaaaaaaaaaatcacatttctgacctgtacttatttttctcttcccgcctccctctggaatggatatattggttggttcatatgatgtaggcacttgctgtatttttactggagctcgtaattttttaactgtaagcttgtccttttaaagggatttaatgtacctttttgttagtgaatttggaaataaaaagaaaaaaaaaacaaaaacaaacaggctgccataatatatttttttaatttggcaggataaaatattgcaaaaaaaacacatttgtatgttaagtcctattgtacaggagaaaaagggttgtttgacaacctttgagaaaaagaaacaaaaggaagtagttaaatgctttggttcacaaatcatttagttgtatatattttttgtcggaattggcctacacagagaaccgttcgtgttgggcttctctctgaacgccccgaaccttgcatcaaggctccttggtgtggccacagcagaccagatgggaaattatttgtgttgagtggaaaaaaatcagtttttgtaaagatgtcagtaacattccacatcgtcctccctttctctaagaggccatctctaagatgtcagatgtagaggagagagagcgagagaacatcttccttctctaccatcactcctgtggcggtcaccaccaccacctctcccgcccttaccagcagaaagcaatgcaaactgagctgctttagtccttgagaaattgtgaaacaaacacaaatatcataaaaggagctggtgattcagctgggtccaggtgaagtgacctgctgttgagaccggtacaaattggatttcaggaaggagactccatcacagccaggacctttcgtgccatggagagtgttggcctcttgtctttcttccctgctttgctgctttgctctctgaaacctacattccgtcagtttccgaatgcgagggcctgggatgaatttggtgcctttccatatctcgttctctctccttcccctgcgtttcctctccatccttcatcctccattggtcctttttttttctttcattttttatttaatttcttttcttcctgtctgttcctcccctaatcctctattttatttttattttttgtaaagccaagtagctttaagataaagtggtggtcttttggatgagggaataatgcatttttaaataaaataccaatatcaggaagccattttttatttcaggaaatgtaagaaaccattatttcaggttatgaaagtataaccaagcatccttttgggcaattccttaccaaatgcagaagcttttctgttcgatgcactctttcctccttgccacttacctttgcaaagttaaaaaaaaggggggagggaatgggagagaaagctgagatttcagtttcctactgcagtttcctacctgcagatccaggggctgctgttgcctttggatgccccactgaggtcctagagtgcctccagggtggtcttcctgtagtcataacagctagccagtgctcaccagcttaccagattgccaggactaagccatcccaaagcacaagcattgtgtgtctctgtgactgcagagaagagagaattttgcttctgttttgtgtttaaaaaaccaacacggaagcagatgatcccgagagagaggcctctagcatgggtgacccagccgacctcaggccggtttccgcactgccacaactttgttcaaagttgcccccaattggaacctgccacttggcattagagggtctttcatggggagagaaggagactgaattactctaagcaaaatgtgaaaagtaaggaaatcagcctttcatcccggtcctaagtaaccgtcagccgaaggtctcgtggaacacaggcaaacccgtgattttggtgctccttgtaactcagccctgcaaagcaaagtcccattgatttaagttgtttgcatttgtactggcaaggcaaaatatttttattaccttttctattacttattgtatgagcttttgttgtttacttggaggttttgtcttttactacaagtttggaactatttattattgcttggtatttgtgctctgtttaagaaacaggcacttttttttattatggataaaatgttgagatgacaggaggtcatttcaatatggcttagtaaaatatttattgttcctttattctctgtacaagattttgggcctctttttttccttaatgtcacaatgttgagttcagcatgtgtctgccatttcatttgtacgcttgttcaaaaccaagtttgttctggtttcaagttataaaaataaattggacatttaacttgatctccaaa
